United States Patent Application Publication US 2026/0327580 A1, published October 22, 2026 (application 19/112,171).

The application's sequence listing, which the Patent Office published only in electronic form, follows.

SEQUENCE LISTING (6646 sequences)

SEQ ID NO: 1 - DNA, 2529 bp, synthetic construct
  misc_feature 1..2529: note = Wild type DNA polymerase I from Thermus sp. strain 2.9
  source 1..2529: mol_type = other DNA
atgcaccatcatcatcatcatggcggtagcggcatgttaccgttgttcgaacctaaaggtcgcgtgcttctggttgatggccatcatctcgcgtatcgtaacttctttgccctgaaaggattaaccaccagccgtggcgagccggtacagggtgtctacggctttgcaaagtcgctcctgaaagctctgaaagaagacggtgatgtggtgattgttgtctttgatgcgaaagcgccaagttttcgccacgaagcgtacgaagcttacaaagccgggcgtgctccaacgccggaagactttcctcgccaattggcgcttatgaaggaattagtggatttgcttggcctcgaacgcttggaagttcccggtttcgaggcagacgacgtattagcgactctcgcaaagaaagccgaacgtgagggctatgaagtccagatcttgacagcagatcgcgatcttttccagcttttatctccgcgcatttccgtgttacacccggaagggcatcgtatcaccccggaatggctctgggagaaatatggtttgcgtcccgaacaatgggtggattttcgcgccttagcgggcgatccgagcgacaatattccgggagttaaaggtatcggcgagaagacggcgctcaagctccttaaagaatgggggtcgttggagaacttgcttaagaatttagatcaggtcaaaccagcttcagtgcgtgagaagattcttgcacacctcgaagacctcaaattaagccgcgaattgtcccgtgtacgcaccgatttgccgctcgaagttgatttccgtggccgccgcgaacctgactgggagggtcttaaagcgtttttagagcgtcttgaatttggttcgctcttgcatgaattcggccttttagaaagcccgttaccagccgaagaagcaccttggccaccgcccgaaggcgcgtttttaggttaccgtttgagtcgcccggaaccgatgtgggccgaattattggctcttgcagcgtctgcccagggacgtgtgtatcgcgcggaagaccctcatggtgcgctccgtggcctcaaagaagtccgtggactccttgccaaagacttagctgttgttgcattgcgcgaaggtcttgatttacctccgactgatgatccaatgcttcttgcgtacctcttggacccgtcaaacacgacgcccgaaggcgtagcccgtcgttacggcggcgagtggaccgaagatgcaggtgagcgcgcgttattggccgaacgtttgcacgccaatttattaggacgtttgcaaggcgaggaacgtctcctctggctttacgaagaagtggagaaaccattgagtcgcgtgctcgcgcatatggaagctaccggtgtcaaattagacgtggcgtatttggaggcactcagccttgaagttgctgccgaaatgcgccgcttggaggaagaagtattccgtttagcaggccactcctttaaccttaattctcgcgatcagttagaacgtgtgttgttcgatgaacttggtctccctcctatcggcaagacagagaagaccggtaaacgtagcacttcagcggcggttttagaagctcttcgcgaagtccatcccattgtggacaagatcttgcagtaccgcgaactcgcgaaattgaaaggcacctatattgaccctcttccggcattagtccacccgaaaacgggacgcctccatacccgcttcaaccaaacagccacggcgaccggtcgtttgtcctcctctgatccaaaccttcagaatattccagtacgtaccccattgggccagaagatccgcaaagcgtttgtagctgaggagggttggcgtttagtggccctcgattatagccaaattgaattacgtgtccttgcccatctttctggcgatgagaacctcatccgcgtgtttcaggaaggccgcgacattcacactcaaacggcaagctggatgtttggattatcagctgaagcgatcgatcctttgatgcgtcgtgcagcgaagaccatcaatttcggtgttctctacggtatgagtgcccatcgtttgtcgcaggaattaggcattccctatgaagaagctgcggcgttcattcagcgctactttcaaagctatcccaaagttaaagcatggatcgagaagactctcgaagaaggccgcacacgtggttacgtagagaccttatttggacgtcgccgctatgttcccgatttaaacgctcgcgtgaaatctgtccgtgaagccgccgaacgcatggcgttcaacatgcctgtacagggcacggcagctgacctcatgaaacttgcaatggtgcgcctttttccacaattgcgtgaagttggtgcccgcatgctcttgcaggtccacgatgaactcttgttagaagcgccaaaagagcgtgcggaagaggtggcagccctcgcgaaagaggttatggaaggcgtgtggcccttagcggtgcctcttgaagtcgaagttggtattggcgaggattggttggctgccaaaggataatga

SEQ ID NO: 2 - protein, 841 aa, synthetic construct
  REGION 1..841: note = Wild type DNA polymerase I from Thermus sp. strain 2.9
MHHHHHHGGSGMLPLFEPKGRVLLVDGHHLAYRNFFALKGLTTSRGEPVQGVYGFAKSLLKALKEDGDVVIVVFDAKAPSFRHEAYEAYKAGRAPTPEDFPRQLALMKELVDLLGLERLEVPGFEADDVLATLAKKAEREGYEVQILTADRDLFQLLSPRISVLHPEGHRITPEWLWEKYGLRPEQWVDFRALAGDPSDNIPGVKGIGEKTALKLLKEWGSLENLLKNLDQVKPASVREKILAHLEDLKLSRELSRVRTDLPLEVDFRGRREPDWEGLKAFLERLEFGSLLHEFGLLESPLPAEEAPWPPPEGAFLGYRLSRPEPMWAELLALAASAQGRVYRAEDPHGALRGLKEVRGLLAKDLAVVALREGLDLPPTDDPMLLAYLLDPSNTTPEGVARRYGGEWTEDAGERALLAERLHANLLGRLQGEERLLWLYEEVEKPLSRVLAHMEATGVKLDVAYLEALSLEVAAEMRRLEEEVFRLAGHSFNLNSRDQLERVLFDELGLPPIGKTEKTGKRSTSAAVLEALREVHPIVDKILQYRELAKLKGTYIDPLPALVHPKTGRLHTRFNQTATATGRLSSSDPNLQNIPVRTPLGQKIRKAFVAEEGWRLVALDYSQIELRVLAHLSGDENLIRVFQEGRDIHTQTASWMFGLSAEAIDPLMRRAAKTINFGVLYGMSAHRLSQELGIPYEEAAAFIQRYFQSYPKVKAWIEKTLEEGRTRGYVETLFGRRRYVPDLNARVKSVREAAERMAFNMPVQGTAADLMKLAMVRLFPQLREVGARMLLQVHDELLLEAPKERAEEVAALAKEVMEGVWPLAVPLEVEVGIGEDWLAAKG

SEQ ID NO: 3 - DNA, 2529 bp, synthetic construct
  misc_feature 1..2529: note = Variant of DNA polymerase I from Thermus sp. strain 2.9
  source 1..2529: mol_type = other DNA
atgcaccatcatcatcatcatggcggtagcggcatgttaccgttgttcgaacctaaaggtcgcgtgcttctggttgatggccatcatctcgcgtatcgtaacttctttgccctgaaaggattaaccaccagccgtggcgagccggtacagggtgtctacggctttgcaaagtcgctcctgaaagctctgaaagaagacggtgatgtggtgattgttgtctttgatgcgaaagcgccaagttttcgccacgaagcgtacgaagcttacaaagccgggcgtgctccaacgccggaagactttcctcgccaattggcgcttatgaaggaattagtggatttgcttggcctcgaacgcttggaagttcccggtttcgaggcagacgacgtattagcgactctcgcaaagaaagccgaacgtgagggctatgaagtccatatcttgacagcagatcgcgatcttttccagcttttatctccgcgcatttccgtgttacacccggaagggcatcgtatcaccccggaatggctctgggagaaatatggtttgcgtcccgaacaatgggtggattttcgcgccttagcgggcgatccgagcgacaatattccgggagttaaaggtatcggcgagaagacggcgctcaagctccttaaagaatgggggtcgttggagaacttgcttaagaatttagatcaggtcaaaccagcttcagtgcgtgagaagattcttgcacacctcgaagacctcaaattaagccgcgaattggtccgtgtacgcaccgatttgccgctcgaagttgatttccgtggccgccgcgaacctgactgggagggtcttaaagcgtttttagagcgtcttgaatttggttcgctcttgcatgaattcggccttttagaaagcccgttaccagccgaagaagcaccttggccaccgcccgaaggcgcgtttttaggttaccgtttgagtcgcccggaaccgatgtgggccgaattattggctcttgcagcgtctgcccagggacgtgtgtatcgcgcggaagaccctcatggtgcgctccgtggcctcaaagaagtccgtggactccttgccaaagacttagctgttgttgcattgcgcgaaggtcttgatttacctccgactgatgatccaatgcttcttgcgtacctcttggacccgtcaaacacgacgcccgaaggcgtagcccgtcgttacggcggcgagtggaccgaagatgcaggtgagcgcgcgttattggccgaacgtttgcacgccaatttattaggacgtttgcaaggcgaggaacgtctcctctggctttacgaagaagtggagaaaccattgagtcgcgtgctcgcgcatatggaagctaccggtgtcaaattagacgtggcgtatttggaggcactcagccttgaagttgctgccgaaatgcgccgcttggaggaagaagtattccgtttagcaggccactcctttaaccttaattctcgcgatcagttagaacgtgtgttgttcgatgaacttggtctccctcctatcggcaagacagagaagaccggtaaacgtagcacttcagcggcggttttagaagctcttcgcgaagtccatcccattgtggacaagatcttgcagtaccgcgaactcgcgaaattgaaaggcacctatattgaccgtcttccggcattagtccacccgaaaacgggacgcctccatacccgcttcaaccaaacagccacggcgaccggtcgtttgtcctcctctgatccaaaccttcagaatattccagtacgtaccccattgggccagaagatccgcaaagcgtttgtagctgaggagggttggcgtttagtggccctcgattatagccaaattgaattacgtgtccttgcccatctttctggcgatgagaacctcatccgcgtgtttcaggaaggccgcgacattcacactcaaacggcaagctggatgtttggattatcagctgaagcgatcgatcctttgatgcgtcgtgcagcgaagaccatcaatttcggtgttctctacggtatgagtgcccatcgtttgtcgcaggaattaggcattccctatgaagaagctgcggcgttcattcagcgctactttcaaagctatcccaaagttaaagcatggatcgagaagactctcgaagaaggccgcacacgtggttacgtagagaccttatttggacgtcgccgctatgttcccgatttaaacgctcgcgtgaaatctgtccgtgaagccgccgaacgcatggcgtttaacatgcctgtacagggcacggcagctgacctcatgaaacttgcaatggtgcgcctttttccacaattgcgtgaagttggtgcccgcatgctcttgcaggtccacgatgaactcttgttagaagcgccaaaagagcgtgcggaagaggtggcagccctcgcgaaagaggttatggaaggcgtgtggcccttagcggtgcctcttgaagtcgaagttggtattggcgaggattggttggctgccaaaggataatga

SEQ ID NO: 4 - protein, 841 aa, synthetic construct
  REGION 1..841: note = Variant of DNA polymerase I from Thermus sp. strain 2.9
MHHHHHHGGSGMLPLFEPKGRVLLVDGHHLAYRNFFALKGLTTSRGEPVQGVYGFAKSLLKALKEDGDVVIVVFDAKAPSFRHEAYEAYKAGRAPTPEDFPRQLALMKELVDLLGLERLEVPGFEADDVLATLAKKAEREGYEVHILTADRDLFQLLSPRISVLHPEGHRITPEWLWEKYGLRPEQWVDFRALAGDPSDNIPGVKGIGEKTALKLLKEWGSLENLLKNLDQVKPASVREKILAHLEDLKLSRELVRVRTDLPLEVDFRGRREPDWEGLKAFLERLEFGSLLHEFGLLESPLPAEEAPWPPPEGAFLGYRLSRPEPMWAELLALAASAQGRVYRAEDPHGALRGLKEVRGLLAKDLAVVALREGLDLPPTDDPMLLAYLLDPSNTTPEGVARRYGGEWTEDAGERALLAERLHANLLGRLQGEERLLWLYEEVEKPLSRVLAHMEATGVKLDVAYLEALSLEVAAEMRRLEEEVFRLAGHSFNLNSRDQLERVLFDELGLPPIGKTEKTGKRSTSAAVLEALREVHPIVDKILQYRELAKLKGTYIDRLPALVHPKTGRLHTRFNQTATATGRLSSSDPNLQNIPVRTPLGQKIRKAFVAEEGWRLVALDYSQIELRVLAHLSGDENLIRVFQEGRDIHTQTASWMFGLSAEAIDPLMRRAAKTINFGVLYGMSAHRLSQELGIPYEEAAAFIQRYFQSYPKVKAWIEKTLEEGRTRGYVETLFGRRRYVPDLNARVKSVREAAERMAFNMPVQGTAADLMKLAMVRLFPQLREVGARMLLQVHDELLLEAPKERAEEVAALAKEVMEGVWPLAVPLEVEVGIGEDWLAAKG

SEQ ID NO: 5 - DNA, 2529 bp, synthetic construct
  misc_feature 1..2529: note = Variant of DNA polymerase I from Thermus sp. strain 2.9
  source 1..2529: mol_type = other DNA
atgcaccatcatcatcatcatggcggtagcggcatgttaccgttgttcgaacctaaaggtcgcgtgcttctggttgatggccatcatctcgcgtatcgtaacttctttgccctgaaaggattaaccaccagccgtggcgagccggtacagggtgtctacggctttgcaaagtcgctcctgaaagctctgaaagaagacggtgatgtggtgattgttgtctttgatgcgaaagcgccaagttttcgccacgaagcgtacgaagcttacaaagccgggcgtgctccaacgccggaagactttcctcgccaattggcgcttatgaaggaattagtggatttgcttggcctcgaacgcttggaagttcccggtttcgaggcagacgacgtattagcgactctcgcaaagaaagccgaacgtgagggctatgaagtccagatcttgacagcagatcgcgatcttttccagcttttatctccgcgcatttccgtgttacacccggaagggcatcgtatcaccccggaatggctctgggagaaatatggtttgcgtcccgaacaatgggtggattttcgcgccttagcgggcgatccgagcgacaatattccgggagttaaaggtatcggcgagaagacggcgctcaagctccttaaagaatgggggtcgttggagaacttgcttaagaatttagatcaggtcaaaccagcttcagtgcgtgagaagattcttgcacacctcgaagacctcaaattaagccgcgaattggtccgtgtacgcaccgatttgccgctcgaagttgatttccgtggccgccgcgaacctgactgggagggtcttaaagcgtttttagagcgtcttgaatttggttcgctcttgcatgaattcggccttttagaaagcccgttaccagccgaagaagcaccttggccaccgcccgaaggcgcgtttttaggttaccgtttgagtcgcccggaaccgatgtgggccgaattattggctcttgcagcgtctgcccagggacgtgtgtatcgcgcggaagaccctcatggtgcgctccgtggcctcaaagaagtccgtggactccttgccaaagacttagctgttgttgcattgcgcgaaggtcttgatttacctccgactgatgatccaatgcttcttgcgtacctcttggactcgtcaaacacgacgcccgaacgcgtagcccgtcgttacggcggcgagtggaccgaagatgcaggtgagcgcgcgttattggccgaacgtttgcacgccaatttattaggacgtttgcaaggcgaggaacgtctcctctggctttacgaagaagtggagaaaccattgagtcgcgtgctcgcgcatatggaagctaccggtgtcaaattagacgtggcgtatttggaggcactcagccttgaagtcgctgccgaactgcgccgcttggaggaagaagtattccgtttagcaggccactcctttaaccttaattctcgcgatcagttagaacgtgtgttgttcgatgaacttggtctccctcctatcggtaagacagagaagaccggtaaacgtagcacttcagcggcggttttagaagctcttcgcgaagtccatcccattgtggacaagatcttgcagtaccgcgaactcgcgaaattgaaaggcacctatattgaccctcttccggcattagtccacccgaaaacgggacgcctccatacccgcttcaaccaaacagccacggcgaccggtcgtttgtcctcctctgatccaaaccttcagaatattccagtacgtaccccattgggccagcatatccgcaaagcgtttgtagctgaggagggttggcgtttagtggccctcgattatagccaaattgaattacgtgtccttgcccatctttctggcgatgagaacctcatccgcgtgtttcaggaaggccgcgacattcacactcaaacggcaagctggatgtttggagtgtcatcggaagcgatcgatcctttgatgcgtcgtgcagcgaagaccatcaatttcggtgttctctacggtatgagtgccgcgcgtttgtcgcaggaattaggcattccctatgaagaagctgcggcgttcattcagcgctactttcaaagctatcccaaagttaaagcatggatcgagaagactctcgaagaaggccgcacacgtggttacgtagagaccttatttggacgtcgccgctatgttcccgatttaaatgctcgcgtgaaatctgtccgtgaagccgccgaacgcatggcgtttaacatgcctgtacagggcacggcagctgacctcatgaaacttgcaatggtgcgcctttttccacaattgcgtgaagttggtgcccgcatgctcttgcaggtccacgatgaactcttgttagaagcgccaaaagagcgtgcggaagaggtggcagccctcgcgaaagaggttatggaaggcgtgtggcccttagcggtgcctcttgaagtcgaagttggtattggcgaggattggttggctgccaaaggataatga

SEQ ID NO: 6 - protein, 841 aa, synthetic construct
  REGION 1..841: note = Variant of DNA polymerase I from Thermus sp. strain 2.9
MHHHHHHGGSGMLPLFEPKGRVLLVDGHHLAYRNFFALKGLTTSRGEPVQGVYGFAKSLLKALKEDGDVVIVVFDAKAPSFRHEAYEAYKAGRAPTPEDFPRQLALMKELVDLLGLERLEVPGFEADDVLATLAKKAEREGYEVQILTADRDLFQLLSPRISVLHPEGHRITPEWLWEKYGLRPEQWVDFRALAGDPSDNIPGVKGIGEKTALKLLKEWGSLENLLKNLDQVKPASVREKILAHLEDLKLSRELVRVRTDLPLEVDFRGRREPDWEGLKAFLERLEFGSLLHEFGLLESPLPAEEAPWPPPEGAFLGYRLSRPEPMWAELLALAASAQGRVYRAEDPHGALRGLKEVRGLLAKDLAVVALREGLDLPPTDDPMLLAYLLDSSNTTPERVARRYGGEWTEDAGERALLAERLHANLLGRLQGEERLLWLYEEVEKPLSRVLAHMEATGVKLDVAYLEALSLEVAAELRRLEEEVFRLAGHSFNLNSRDQLERVLFDELGLPPIGKTEKTGKRSTSAAVLEALREVHPIVDKILQYRELAKLKGTYIDPLPALVHPKTGRLHTRFNQTATATGRLSSSDPNLQNIPVRTPLGQHIRKAFVAEEGWRLVALDYSQIELRVLAHLSGDENLIRVFQEGRDIHTQTASWMFGVSSEAIDPLMRRAAKTINFGVLYGMSAARLSQELGIPYEEAAAFIQRYFQSYPKVKAWIEKTLEEGRTRGYVETLFGRRRYVPDLNARVKSVREAAERMAFNMPVQGTAADLMKLAMVRLFPQLREVGARMLLQVHDELLLEAPKERAEEVAALAKEVMEGVWPLAVPLEVEVGIGEDWLAAKG

SEQ ID NO: 7 - DNA, 2529 bp, synthetic construct
  misc_feature 1..2529: note = Variant of DNA polymerase I from Thermus sp. strain 2.9
  source 1..2529: mol_type = other DNA
atgcaccatcatcatcatcatggcggtagcggcatgttaccgttgttcgaacctaaaggtcgcgtgcttctggttgatggccatcatctcgcgtatcgtaacttctttgccctgaaaggattaaccaccagccgtggcgagccggtacagggtgtctacggctttgcaaagtcgctcctgaaagctctgaaagaagacggtgatgtggtgattgttgtctttgatgcgaaagcgccaagttttcgccacgaagcgtacgaagcttacaaagccgggcgtgctccaacgccggaagactttcctcgccaattggcgcttatgaaggaattagtggatttgcttggcctcgaacgcttggaagttcccggtttcgaggcagacgacgtattagcgactctcgcaaagaaagccgaacgtgagggctatgaagtccatatcttgacagcagatcgcgatcttttccagcttttatctccgcgcatttccgtgttacacccggaagggcatcgtatcaccccggaatggctctgggagaaatatggtttgcgtcccgaacaatgggtggattttcgcgccttagcgggcgatccgagcgacaatattccgggagttaaaggtatcggcgagaagacggcgctcaagctccttaaagaatgggggtcgttggagaacttgcttaagaatttagatcaggtcaaaccagcttcagtgcgtgagaagattcttgcacacctcgaagacctcaaattaagccgcgaattggtccgtgtacgcaccgatttgccgctcgaagttgatttccgtggccgccgcgaacctgactgggagggtcttaaagcgtttttagagcgtcttgaatttggttcgctcttgcatgaattcggccttttagaaagcccgttaccagccgaagaagcaccttggccaccgcccgaaggcgcgtttttaggttaccgtttgagtcgcccggaaccgatgtgggccgaattattggctcttgcagcgtctgcccagggacgtgtgtatcgcgcggaagaccctcatggtgcgctccgtggcctcaaagaagtccgtggactccttgccaaagacttagctgttgttgcattgcgcgaaggtcttgatttacctccgactgatgatccaatgcttcttgcgtacctcttggactcgtcaaacacgacgcccgaaggcgtagcccgtcgttacggcggcgagtggaccgaagatgcaggtgagcgcgcgttattggccgaacgtttgcacgccaatttattaggacgtttgcaaggcgaggaacgtctcctctggctttacgaagaagtggagaaaccattgagtcgcgtgctcgcgcatatggaagctaccggtgtcaaattagacgtggcgtatttggaggcactcagccttgaagttgctgccgaaatgcgccgcttggaggaagaagtattccgtttagcaggccactcctttaaccttaattctcgcgatcagttagaacgtgtgttgttcgatgaacttggtctccctcctatcggcaagacagagaagaccggtaaacgtagcacttcagcggcggttttagaagctcttcgcgaagtccatcccattgtggacaagatcttgcagtaccgcgaactcgcgaaattgaaaggcacctatattgaccgtcttccggcattagtccacccgaaaacgggacgcctccatacccgcttcaaccaaacagccacggcgaccggtcgtttgtcctcctctgatccaaaccttcagaatattccagtacgtaccccattgggccagaagatccgcaaagcgtttgtagctgaggagggttggcgtttagtggccctcgattatagccaaattgaattacgtgtccttgcccatctttctggcgatgagaacctcatccgcgtgtttcaggaaggccgcgacattcacactcaaacggcaagctggatgtttggactgtcagcggaagcgatcgatcctttgatgcgtcgtgcagcgaagaccatcaatttcggtgttctctacggtatgagtgcccatcgtttgtcgcaggaattaggcattccctatgaagaagctgcggcgttcattcagcgctactttcaaagctatcccaaagttaaagcatggatcgagaagactctcgaagaaggccgcacacgtggttacgtagagaccttatttggacgtcgccgctatgttcccgatttaaatgctcgcgtgaaatctgtccgtgaagccgccgaacgcatggcgtggaacatgcctgtacagggcacggcagctgacctcatgaaacttgcaatggtgcgcctttttccacaattgcgtgaagttggtgcccgcatgctcttgcaggtccacgatgaactcttgttagaagcgccaaaagagcgtgcggaagaggtggcagccctcgcgaaagaggttatggaaggcgtgtggcccttagcggtgcctcttgaagtcgaagttggtattggcgaggattggttggctgccaaaggataatga

SEQ ID NO: 8 - protein, 841 aa, synthetic construct
  REGION 1..841: note = Variant of DNA polymerase I from Thermus sp. strain 2.9
MHHHHHHGGSGMLPLFEPKGRVLLVDGHHLAYRNFFALKGLTTSRGEPVQGVYGFAKSLLKALKEDGDVVIVVFDAKAPSFRHEAYEAYKAGRAPTPEDFPRQLALMKELVDLLGLERLEVPGFEADDVLATLAKKAEREGYEVHILTADRDLFQLLSPRISVLHPEGHRITPEWLWEKYGLRPEQWVDFRALAGDPSDNIPGVKGIGEKTALKLLKEWGSLENLLKNLDQVKPASVREKILAHLEDLKLSRELVRVRTDLPLEVDFRGRREPDWEGLKAFLERLEFGSLLHEFGLLESPLPAEEAPWPPPEGAFLGYRLSRPEPMWAELLALAASAQGRVYRAEDPHGALRGLKEVRGLLAKDLAVVALREGLDLPPTDDPMLLAYLLDSSNTTPEGVARRYGGEWTEDAGERALLAERLHANLLGRLQGEERLLWLYEEVEKPLSRVLAHMEATGVKLDVAYLEALSLEVAAEMRRLEEEVFRLAGHSFNLNSRDQLERVLFDELGLPPIGKTEKTGKRSTSAAVLEALREVHPIVDKILQYRELAKLKGTYIDRLPALVHPKTGRLHTRFNQTATATGRLSSSDPNLQNIPVRTPLGQKIRKAFVAEEGWRLVALDYSQIELRVLAHLSGDENLIRVFQEGRDIHTQTASWMFGLSAEAIDPLMRRAAKTINFGVLYGMSAHRLSQELGIPYEEAAAFIQRYFQSYPKVKAWIEKTLEEGRTRGYVETLFGRRRYVPDLNARVKSVREAAERMAWNMPVQGTAADLMKLAMVRLFPQLREVGARMLLQVHDELLLEAPKERAEEVAALAKEVMEGVWPLAVPLEVEVGIGEDWLAAKG

SEQ ID NO: 9 - DNA, 2529 bp, synthetic construct
  misc_feature 1..2529: note = Variant of DNA polymerase I from Thermus sp. strain 2.9
  source 1..2529: mol_type = other DNA
atgcaccatcatcatcatcatggcggtagcggcatgttaccgttgttcgaacctaaaggtcgcgtgcttctggttgatggccatcatctcgcgtatcgtaacttctttgccctgaaaggattaaccaccagccgtggcgagccggtacatggtgtctacggctttgcaaagtcgctcctgaaagctctgaaagaagacggtgatgtggtgattgttgtctttgatgcgaaagcgccaagttttcgccacgaagcgtacgaagcttacaaagccgggcgtgctccaacgccggaagactttcctcgccaattggcgcttatgaaggaattagtggatttgcttggcctcgaacgcttggaagttcccggtttcgaggcagacgacgtattagcgactctcgcaaagaaagccgaacgtgagggctatgaagtccagatcttgacagcagatcgcgatcttttccagcttttatctccgcgcatttccgtgttacacccggaagggcatcgtatcaccccggaatggctctgggagaaatatggtttgcgtcccgaacaatgggtggattttcgcgccttagcgggcgatccgagcgacaatattccgggagttaaaggtatcggcgagaagacggcgctcaagctccttaaagaatgggggtcgttggagaacttgcttaagaatttagatcaggtcaaaccagcttcagtgcgtgagaagattcttgcacacctcgaagacctcaaattaagccgcgaattggtccgtgtacgcaccgatttgccgctcgaagttgatttccgtggccgccgcgaacctgactgggagggtcttaaagcgtttttagagcgtcttgaatttggttcgctcttgcatgaattcggccttttagaaagcccgttaccagccgaagaagcaccttggccaccgcccgaaggcgcgtttttaggttaccgtttgagtcgcccggaaccgatgtgggccgaattattggctcttgcagcgtctgcccagggacgtgtgtatcgcgcggaagaccctcatggtgcgctccgtggcctcaaagaagtccgtggactccttgccaaagacttagctgttgttgcattgcgcgaaggtcttgatttacctccgactgatgatccaatgcttcttgcgtacctcttggacccgtcaaacacgacgcccgaaggcgtagcccgtcgttacggcggcgagtggaccgaagatgcaggtgagcgcgcgttattggccgaacgtttgcacgccaatttattaggacgtttgcaaggcgaggaacgtctcctctggctttacgaagaagtggagaaaccattgagtcgcgtgctcgcgcatatggaagctaccggtgtcaaattagacgtggcgtatttggaggcactcagccttgaagttgctgccgaaatgcgccgcttggaggaagaagtattccgtttagcaggccactcctttaaccttaattctcgcgatcagttagaacgtgtgttgttcgatgaacttggtctccctcctatcggcaagacagagaagaccggtaaacgtagcacttcagcggcggttttagaagctcttcgcgaagtccatcccattgtggacaagatcttgcagtaccgcgaactcgcgaaattgaaaggcacctatattgaccgtcttccggcattagtccacccgaaaacgggacgcctccatacccgcttcaaccaaacagccacggcgaccggtcgtttgtcctcctctgatccaaaccttcagaatattccagtacgtaccccattgggccagaagatccgcaaagcgtttgtagctgaggagggttggcgtttagtggccctcgattatagccaaattgaattacgtgtccttgcccatctttctggcgatgagaacctcatccgcgtgtttcaggaaggccgcgacattcacactcaaacggcaagctggatgtttggattatcagctgaagcgatcgatcctttgatgcgtcgtgcagcgaagaccatcaatttcggtgttctctacggtatgagtgccgcgcgtttgtcgcaggaattaggcattccctatgaagaagctgcggcgttcattcagcgctactttcaaagctatcccaaagttaaagcatggatcgagaagactctcgaagaaggccgcacacgtggttacgtagagaccttatttggacgtcgccgctatgttcccgatttaaacgctcgcgtgaaatctgtccgtgaagccgccgaacgcatggcgttcaacatgcctgtacagggcacggcagctgacctcatgaaacttgcaatggtgcgcctttttccacaattgcgtgaagttggtgcccgcatgctcttgcaggtccacgatgaactcttgttagaagcgccaaaagagcgtgcggaagaggtggcagccctcgcgaaagaggttatggaaggcgtgtggcccttagcggtgcctcttgaagtcgaagttggtattggcgaggattggttggctgccaaaggataatga

SEQ ID NO: 10 - protein, 841 aa, synthetic construct
  REGION 1..841: note = Variant of DNA polymerase I from Thermus sp. strain 2.9
MHHHHHHGGSGMLPLFEPKGRVLLVDGHHLAYRNFFALKGLTTSRGEPVHGVYGFAKSLLKALKEDGDVVIVVFDAKAPSFRHEAYEAYKAGRAPTPEDFPRQLALMKELVDLLGLERLEVPGFEADDVLATLAKKAEREGYEVQILTADRDLFQLLSPRISVLHPEGHRITPEWLWEKYGLRPEQWVDFRALAGDPSDNIPGVKGIGEKTALKLLKEWGSLENLLKNLDQVKPASVREKILAHLEDLKLSRELVRVRTDLPLEVDFRGRREPDWEGLKAFLERLEFGSLLHEFGLLESPLPAEEAPWPPPEGAFLGYRLSRPEPMWAELLALAASAQGRVYRAEDPHGALRGLKEVRGLLAKDLAVVALREGLDLPPTDDPMLLAYLLDPSNTTPEGVARRYGGEWTEDAGERALLAERLHANLLGRLQGEERLLWLYEEVEKPLSRVLAHMEATGVKLDVAYLEALSLEVAAEMRRLEEEVFRLAGHSFNLNSRDQLERVLFDELGLPPIGKTEKTGKRSTSAAVLEALREVHPIVDKILQYRELAKLKGTYIDRLPALVHPKTGRLHTRFNQTATATGRLSSSDPNLQNIPVRTPLGQKIRKAFVAEEGWRLVALDYSQIELRVLAHLSGDENLIRVFQEGRDIHTQTASWMFGLSAEAIDPLMRRAAKTINFGVLYGMSAARLSQELGIPYEEAAAFIQRYFQSYPKVKAWIEKTLEEGRTRGYVETLFGRRRYVPDLNARVKSVREAAERMAFNMPVQGTAADLMKLAMVRLFPQLREVGARMLLQVHDELLLEAPKERAEEVAALAKEVMEGVWPLAVPLEVEVGIGEDWLAAKG

SEQ ID NO: 11 - DNA, 2529 bp, synthetic construct
  misc_feature 1..2529: note = Variant of DNA polymerase I from Thermus sp. strain 2.9
  source 1..2529: mol_type = other DNA
atgcaccatcatcatcatcatggcggtagcggcatgttaccgttgttcgaacctaaaggtcgcgtgcttctggttgatggccatcatctcgcgtatcgtaacttctttgccctgaaaggattaaccaccagccgtggcgagccggtacagggtgtctacggctttgcaaagtcgctcctgaaagctctgaaagaagacggtgatgtggtgattgttgtctttgatgcgaaagcgccaagttttcgccacgaagcgtacgaagcttacaaagccgggcgtgctccaacgccggaagactttcctcgccaattggcgcttatgaaggaattagtggatttgcttggcctcgaacgcttggaagttcccggtttcgaggcagacgacgtattagcgactctcgcaaagaaagccgaacgtgagggctatgaagtccatatcttgacagcagatcgcgatcttttccagcttttatctccgcgcatttccgtgttacacccggaagggcatcgtatcaccccggaatggctctgggagaaatatggtttgcgtcccgaacaatgggtggattttcgcgccttagcgggcgatccgagcgacaatattccgggagttaaaggtatcggcgagaagacggcgctcaagctccttaaagaatgggggtcgttggagaacttgcttaagaatttagatcaggtcaaaccagcttcagtgcgtgagaagattcttgcacacctcgaagacctcaaattaagccgcgaattgtcgcgtgtacgcaccgatttgccgctcgaagttgatttccgtggccgccgcgaacctgactgggagggtcttaaagcgtttttagagcgtcttgaatttggttcgctcttgcatgaattcggccttttagaaagcccgttaccagccgaagaagcaccttggccaccgcccgaaggcgcgtttttaggttaccgtttgagtcgcccggaaccgatgtgggccgaattattggctcttgcagcgtctgcccagggacgtgtgtatcgcgcggaagaccctcatggtgcgctccgtggcctcaaagaagtccgtggactccttgccaaagacttagctgttgttgcattgcgcgaaggtcttgatttacctccgactgatgatccaatgcttcttgcgtacctcttggactcgtcaaacacgacgcccgaaggcgtagcccgtcgttacggcggcgagtggaccgaagatgcaggtgagcgcgcgttattggccgaacgtttgcacgccaatttattaggacgtttgcaaggcgaggaacgtctcctctggctttacgaagaagtggagaaaccattgagtcgcgtgctcgcgcatatggaagctaccggtgtcaaattagacgtggcgtatttggaggcactcagccttgaagccgctgccgaactgcgccgcttggaggaagaagtattccgtttagcaggccactcctttaaccttaattctcgcgatcagttagaacgtgtgttgttcgatgaacttggtctccctcctatcggcaagacagagaagaccggtaaacgtagcacttcagcggcggttttagaagctcttcgcgaagtccatcccattgtggacaagatcttgcagtaccgcgaactcgcgaaattgaaaggcacctatattgaccctcttccggcattagtccacccgaaaacgggacgcctccatacccgcttcaaccaaacagccacggcgaccggtcgtttgtcctcctctgatccaaaccttcagaatattccagtacgtaccccattgggccagaagatccgcaaagcgtttgtagctgaggagggttggcgtttagtggccctcgattatagccaaattgaattacgtgtccttgcccatctttctggcgatgagaacctcatccgcgtgtttcaggaaggccgcgacattcacactcaaacggcaagctggatgtttggagtgtcatcggaagcgatcgatcctttgatgcgtcgtgcagcgaagaccatcaatttcggtgttctctacggtatgagtgcccatcgtttgtcgcaggaattaggcattccctatgaagaagctgcggcgttcattcagcgctactttcaaagctatcccaaagttaaagcatggatcgagaagactctcgaagaaggccgcacacgtggttacgtagagaccttatttggacgtcgccgctatgttcccgatttaaacgctcgcgtgaaatctgtccgtgaagccgccgaacgcatggcgtggaacatgcctgtacagggcacggcagctgacctcatgaaacttgcaatggtgcgcctttttccacaattgcgtgaagttggtgcccgcatgctcttgcaggtccacgatgaactcttgttagaagcgccaaaagagcgtgcggaagaggtggcagccctcgcgaaagaggttatggaaggcgtgtggcccttagcggtgcctcttgaagtcgaagttggtattggcgaggattggttggctgccaaaggataatga

SEQ ID NO: 12 - protein, 841 aa, synthetic construct
  REGION 1..841: note = Variant of DNA polymerase I from Thermus sp. strain 2.9
MHHHHHHGGSGMLPLFEPKGRVLLVDGHHLAYRNFFALKGLTTSRGEPVQGVYGFAKSLLKALKEDGDVVIVVFDAKAPSFRHEAYEAYKAGRAPTPEDFPRQLALMKELVDLLGLERLEVPGFEADDVLATLAKKAEREGYEVHILTADRDLFQLLSPRISVLHPEGHRITPEWLWEKYGLRPEQWVDFRALAGDPSDNIPGVKGIGEKTALKLLKEWGSLENLLKNLDQVKPASVREKILAHLEDLKLSRELSRVRTDLPLEVDFRGRREPDWEGLKAFLERLEFGSLLHEFGLLESPLPAEEAPWPPPEGAFLGYRLSRPEPMWAELLALAASAQGRVYRAEDPHGALRGLKEVRGLLAKDLAVVALREGLDLPPTDDPMLLAYLLDSSNTTPEGVARRYGGEWTEDAGERALLAERLHANLLGRLQGEERLLWLYEEVEKPLSRVLAHMEATGVKLDVAYLEALSLEAAAELRRLEEEVFRLAGHSFNLNSRDQLERVLFDELGLPPIGKTEKTGKRSTSAAVLEALREVHPIVDKILQYRELAKLKGTYIDPLPALVHPKTGRLHTRFNQTATATGRLSSSDPNLQNIPVRTPLGQKIRKAFVAEEGWRLVALDYSQIELRVLAHLSGDENLIRVFQEGRDIHTQTASWMFGVSSEAIDPLMRRAAKTINFGVLYGMSAHRLSQELGIPYEEAAAFIQRYFQSYPKVKAWIEKTLEEGRTRGYVETLFGRRRYVPDLNARVKSVREAAERMAWNMPVQGTAADLMKLAMVRLFPQLREVGARMLLQVHDELLLEAPKERAEEVAALAKEVMEGVWPLAVPLEVEVGIGEDWLAAKG

SEQ ID NO: 13 - DNA, 2529 bp, synthetic construct
  misc_feature 1..2529: note = Variant of DNA polymerase I from Thermus sp. strain 2.9
  source 1..2529: mol_type = other DNA
atgcaccatcatcatcatcatggcggtagcggcatgttaccgttgttcgaacctaaaggtcgcgtgcttctggttgatggccatcatctcgcgtatcgtaacttctttgccctgaaaggattaaccaccagccgtggcgagccggtacagggtgtctacggctttgcaaagtcgctcctgaaagctctgaaagaagacggtgatgtggtgattgttgtctttgatgcgaaagcgccaagttttcgccacgaagcgtacgaagcttacaaagccgggcgtgctccaacgccggaagactttcctcgccaattggcgcttatgaaggaattagtggatttgcttggcctcgaacgcttggaagttcccggtttcgaggcagacgacgtattagcgactctcgcaaagaaagccgaacgtgagggctatgaagtccatatcttgacagcagatcgcgatcttttccagcttttatctccgcgcatttccgtgttacacccggaagggcatcgtatcaccccggaatggctctgggagaaatatggtttgcgtcccgaacaatgggtggattttcgcgccttagcgggcgatccgagcgacaatattccgggagttaaaggtatcggcgagaagacggcgctcaagctccttaaagaatgggggtcgttggagaacttgcttaagaatttagatcaggtcaaaccagcttcagtgcgtgagaagattcttgcacacctcgaagacctcaaattaagccgcgaattgtcgcgtgtacgcaccgatttgccgctcgaagttgatttccgtggccgccgcgaacctgactgggagggtcttaaagcgtttttagagcgtcttgaatttggttcgctcttgcatgaattcggccttttagaaagcccgttaccagccgaagaagcaccttggccaccgcccgaaggcgcgtttttaggttaccgtttgagtcgcccggaaccgatgtgggccgaattattggctcttgcagcgtctgcccagggacgtgtgtatcgcgcggaagaccctcatggtgcgctccgtggcctcaaagaagtccgtggactccttgccaaagacttagctgttgttgcattgcgcgaaggtcttgatttacctccgactgatgatccaatgcttcttgcgtacctcttggactcgtcaaacacgacgcccgaaggcgtagcccgtcgttacggcggcgagtggaccgaagatgcaggtgagcgcgcgttattggccgaacgtttgcacgccaatttattaggacgtttgcaaggcgaggaacgtctcctctggctttacgaagaagtggagaaaccattgagtcgcgtgctcgcgcatatggaagctaccggtgtcaaattagacgtggcgtatttggaggcactcagccttgaagccgctgccgaactgcgccgcttggaggaagaagtattccgtttagcaggccactcctttaaccttaattctcgcgatcagttagaacgtgtgttgttcgatgaacttggtctccctcctatcggtaagacagagaagaccggtaaacgtagcacttcagcggcggttttagaagctcttcgcgaagtccatcccattgtggacaagatcttgcagtaccgcgaactcgcgaaattgaaaggcacctatattgaccgtcttccggcattagtccacccgaaaacgggacgcctccatacccgcttcaaccaaacagccacggcgaccggtcgtttgtcctcctctgatccaaaccttcagaatattccagtacgtaccccattgggccagaaaatccgcaaagcgtttgtagctgaggagggttggcgtttagtggccctcgattatagccaaattgaattacgtgtccttgcccatctttctggcgatgagaacctcatccgcgtgtttcaggaaggccgcgacattcacactcaaacggcaagctggatgtttggattatcagctgaagcgatcgatcctttgatgcgtcgtgcagcgaagaccatcaatttcggtgttctctacggtatgagtgcccatcgtttgtcgcaggaattaggcattccctatgaagaagctgcggcgttcattcagcgctactttcaaagctatcccaaagttaaagcatggatcgagaagactctcgaagaaggccgcacacgtggttacgtagagaccttatttggacgtcgccgctatgttcccgatttaactgctcgcgtgaaatctgtccgtgaagccgccgaacgcatggcgtggaacatgcctgtacagggcacggcagctgacctcatgaaacttgcaatggtgcgcctttttccacaattgcgtgaagttggtgcccgcatgctcttgcaggtccacgatgaactcttgttagaagcgccaaaagagcgtgcggaagaggtggcagccctcgcgaaagaggttatggaaggcgtgtggcccttagcggtgcctcttgaagtcgaagttggtattggcgaggattggttggctgccaaaggataatga

SEQ ID NO: 14 - protein, 841 aa, synthetic construct
  REGION 1..841: note = Variant of DNA polymerase I from Thermus sp. strain 2.9
MHHHHHHGGSGMLPLFEPKGRVLLVDGHHLAYRNFFALKGLTTSRGEPVQGVYGFAKSLLKALKEDGDVVIVVFDAKAPSFRHEAYEAYKAGRAPTPEDFPRQLALMKELVDLLGLERLEVPGFEADDVLATLAKKAEREGYEVHILTADRDLFQLLSPRISVLHPEGHRITPEWLWEKYGLRPEQWVDFRALAGDPSDNIPGVKGIGEKTALKLLKEWGSLENLLKNLDQVKPASVREKILAHLEDLKLSRELSRVRTDLPLEVDFRGRREPDWEGLKAFLERLEFGSLLHEFGLLESPLPAEEAPWPPPEGAFLGYRLSRPEPMWAELLALAASAQGRVYRAEDPHGALRGLKEVRGLLAKDLAVVALREGLDLPPTDDPMLLAYLLDSSNTTPEGVARRYGGEWTEDAGERALLAERLHANLLGRLQGEERLLWLYEEVEKPLSRVLAHMEATGVKLDVAYLEALSLEAAAELRRLEEEVFRLAGHSFNLNSRDQLERVLFDELGLPPIGKTEKTGKRSTSAAVLEALREVHPIVDKILQYRELAKLKGTYIDRLPALVHPKTGRLHTRFNQTATATGRLSSSDPNLQNIPVRTPLGQKIRKAFVAEEGWRLVALDYSQIELRVLAHLSGDENLIRVFQEGRDIHTQTASWMFGLSAEAIDPLMRRAAKTINFGVLYGMSAHRLSQELGIPYEEAAAFIQRYFQSYPKVKAWIEKTLEEGRTRGYVETLFGRRRYVPDLTARVKSVREAAERMAWNMPVQGTAADLMKLAMVRLFPQLREVGARMLLQVHDELLLEAPKERAEEVAALAKEVMEGVWPLAVPLEVEVGIGEDWLAAKG

SEQ ID NO: 15 - DNA, 2529 bp, synthetic construct
  misc_feature 1..2529: note = Variant of DNA polymerase I from Thermus sp. strain 2.9
  source 1..2529: mol_type = other DNA
atgcaccatcatcatcatcatggcggtagcggcatgttaccgttgttcgaacctaaaggtcgcgtgcttctggttgatggccatcatctcgcgtatcgtaacttctttgccctgaaaggattaaccaccagccgtggcgagccggtacagggtgtctacggctttgcaaagtcgctcctgaaagctctgaaagaagacggtgatgtggtgattgttgtctttgatgcgaaagcgccaagttttcgccacgaagcgtacgaagcttacaaagccgggcgtgctccaacgccggaagactttcctcgccaattggcgcttatgaaggaattagtggatttgcttggcctcgaacgcttggaagttcccggtttcgaggcagacgacgtattagcgactctcgcaaagaaagccgaacgtgagggctatgaagtccagatcttgacagcagatcgcgatcttttccagcttttatctccgcgcatttccgtgttacacccggaagggcatcgtatcaccccggaatggctctgggagaaatatggtttgcgtcccgaacaatgggtggattttcgcgccttagcgggcgatccgagcgacaatattccgggagttaaaggtatcggcgagaagacggcgctcaagctccttaaagaatgggggtcgttggagaacttgcttaagaatttagatcaggtcaaaccagcttcagtgcgtgagaagattcttgcacacctcgaagacctcaaattaagccgcgaattgtcccgtgtacgcaccgatttgccgctcgaagttgatttccgtggccgccgcgaacctgactgggagggtcttaaagcgtttttagagcgtcttgaatttggttcgctcttgcatgaattcggccttttagaaagcccgttaccagccgaagaagcaccttggccaccgcccgaaggcgcgtttttaggttaccgtttgagtcgcccggaaccgatgtgggccgaattattggctcttgcagcgtctgcccagggacgtgtgtatcgcgcggaagaccctcatggtgcgctccgtggcctcaaagaagtccgtggactccttgccaaagacttagctgttgttgcattgcgcgaaggtcttgatttacctccgactgatgatccaatgcttcttgcgtacctcttggactcgtcaaacacgacgcccgaaggcgtagcccgtcgttacggcggcgagtggaccgaagatgcaggtgagcgcgcgttattggccgaacgtttgcacgccaatttattaggacgtttgcaaggcgaggaacgtctcctctggctttacgaagaagtggagaaaccattgagtcgcgtgctcgcgcatatggaagctaccggtgtcaaattagacgtggcgtatttggaggcactcagccttgaagtcgctgccgaactgcgccgcttggaggaagaagtattccgtttagcaggccactcctttaaccttaattctcgcgatcagttagaacgtgtgttgttcgatgaacttggtctccctcctatcaccaagacagagaagaccggtaaacgtagcacttcagcggcggttttagaagctcttcgcgaagtccatcccattgtggacaagatcttgcagtaccgcgaactcgcgaaattgaaaggcacctatattgaccctcttccggcattagtccacccgaaaacgggacgcctccatacccgcttcaaccaaacagccacggcgaccggtcgtttgtcctcctctgatccaaaccttcagaatattccagtacgtaccccattgggccagaaaatccgcaaagcgtttgtagctgaggagggttggcgtttagtggccctcgattatagccaaattgaattacgtgtccttgcccatctttctggcgatgagaacctcatccgcgtgtttcaggaaggccgcgacattcacactcaaacggcaagctggatgtttggattatcagctgaagcgatcgatcctttgatgcgtcgtgcagcgaagaccatcaatttcggtgttctctacggtatgagtgcccatcgtttgtcgcaggaattaggcattccctatgaagaagctgcggcgttcattcagcgctactttcaaagctatcccaaagttaaagcatggatcgagaagactctcgaagaaggccgcacacgtggttacgtagagaccttatttggacgtcgccgctatgttcccgatttaactgctcgcgtgaaatctgtccgtgaagccgccgaacgcatggcgtttaacatgcctgtacagggcacggcagctgacctcatgaaacttgcaatggtgcgcctttttccacaattgcgtgaagttggtgcccgcatgctcttgcaggtccacgatgaactcttgttagaagcgccaaaagagcgtgcggaagaggtggcagccctcgcgaaagaggttatggaaggcgtgtggcccttagcggtgcctcttgaagtcgaagttggtattggcgaggattggttggctgccaaaggataatga

SEQ ID NO: 16 - protein, 841 aa, synthetic construct
  REGION 1..841: note = Variant of DNA polymerase I from Thermus sp. strain 2.9
MHHHHHHGGSGMLPLFEPKGRVLLVDGHHLAYRNFFALKGLTTSRGEPVQGVYGFAKSLLKALKEDGDVVIVVFDAKAPSFRHEAYEAYKAGRAPTPEDFPRQLALMKELVDLLGLERLEVPGFEADDVLATLAKKAEREGYEVQILTADRDLFQLLSPRISVLHPEGHRITPEWLWEKYGLRPEQWVDFRALAGDPSDNIPGVKGIGEKTALKLLKEWGSLENLLKNLDQVKPASVREKILAHLEDLKLSRELSRVRTDLPLEVDFRGRREPDWEGLKAFLERLEFGSLLHEFGLLESPLPAEEAPWPPPEGAFLGYRLSRPEPMWAELLALAASAQGRVYRAEDPHGALRGLKEVRGLLAKDLAVVALREGLDLPPTDDPMLLAYLLDSSNTTPEGVARRYGGEWTEDAGERALLAERLHANLLGRLQGEERLLWLYEEVEKPLSRVLAHMEATGVKLDVAYLEALSLEVAAELRRLEEEVFRLAGHSFNLNSRDQLERVLFDELGLPPITKTEKTGKRSTSAAVLEALREVHPIVDKILQYRELAKLKGTYIDPLPALVHPKTGRLHTRFNQTATATGRLSSSDPNLQNIPVRTPLGQKIRKAFVAEEGWRLVALDYSQIELRVLAHLSGDENLIRVFQEGRDIHTQTASWMFGLSAEAIDPLMRRAAKTINFGVLYGMSAHRLSQELGIPYEEAAAFIQRYFQSYPKVKAWIEKTLEEGRTRGYVETLFGRRRYVPDLTARVKSVREAAERMAFNMPVQGTAADLMKLAMVRLFPQLREVGARMLLQVHDELLLEAPKERAEEVAALAKEVMEGVWPLAVPLEVEVGIGEDWLAAKG

SEQ ID NO: 17 - DNA, 2529 bp, synthetic construct
  misc_feature 1..2529: note = Variant of DNA polymerase I from Thermus sp. strain 2.9
  source 1..2529: mol_type = other DNA
atgcaccatcatcatcatcatggcggtagcggcatgttaccgttgttcgaacctaaaggtcgcgtgcttctggttgatggccatcatctcgcgtatcgtaacttctttgccctgaaaggattaaccaccagccgtggcgagccggtacagggtgtctacggctttgcaaagtcgctcctgaaagctctgaaagaagacggtgatgtggtgattgttgtctttgatgcgaaagcgccaagttttcgccacgaagcgtacgaagcttacaaagccgggcgtgctccaacgccggaagactttcctcgccaattggcgcttatgaaggaattagtggatttgcttggcctcgaacgcttggaagttcccggtttcgaggcagacgacgtattagcgactctcgcaaagaaagccgaacgtgagggctatgaagtccagatcttgacagcagatcgcgatcttttccagcttttatctccgcgcatttccgtgttacacccggaagggcatcgtatcaccccggaatggctctgggagaaatatggtttgcgtcccgaacaatgggtggattttcgcgccttagcgggcgatccgagcgacaatattccgggagttaaaggtatcggcgagaagacggcgctcaagctccttaaagaatgggggtcgttggagaacttgcttaagaatttagatcaggtcaaaccagcttcagtgcgtgagaagattcttgcacacctcgaagacctcaaattaagccgcgaattggtccgtgtacgcaccgatttgccgctcgaagttgatttccgtggccgccgcgaacctgactgggagggtcttaaagcgtttttagagcgtcttgaatttggttcgctcttgcatgaattcggccttttagaaagcccgttaccagccgaagaagcaccttggccaccgcccgaaggcgcgtttttaggttaccgtttgagtcgcccggaaccgatgtgggccgaattattggctcttgcagcgtctgcccagggacgtgtgtatcgcgcggaagaccctcatggtgcgctccgtggcctcaaagaagtccgtggactccttgccaaagacttagctgttgttgcattgcgcgaaggtcttgatttacctccgactgatgatccaatgcttcttgcgtacctcttggactcgtcaaacacgacgcccgaaggcgtagcccgtcgttacggcggcgagtggaccgaagatgcaggtgagcgcgcgttattggccgaacgtttgcacgccaatttattaggacgtttgcaaggcgaggaacgtctcctctggctttacgaagaagtggagaaaccattgagtcgcgtgctcgcgcatatggaagctaccggtgtcaaattagacgtggcgtatttggaggcactcagccttgaagtcgctgccgaactgcgccgcttggaggaagaagtattccgtttagcaggccactcctttaaccttaattctcgcgatcagttagaacgtgtgttgttcgatgaacttggtctccctcctatcaccaagacagagaagaccggtaaacgtagcacttcagcggcggttttagaagctcttcgcgaagtccatcccattgtggacaagatcttgcagtaccgcgaactcgcgaaattgaaaggcacctatattgaccgtcttccggcattagtccacccgaaaacgggacgcctccatacccgcttcaaccaaacagccacggcgaccggtcgtttgtcctcctctgatccaaaccttcagaatattccagtacgtaccccattgggccagcatatccgcaaagcgtttgtagctgaggagggttggcgtttagtggccctcgattatagccaaattgaattacgtgtccttgcccatctttctggcgatgagaacctcatccgcgtgtttcaggaaggccgcgacattcacactcaaacggcaagctggatgtttggactgtcagcggaagcgatcgatcctttgatgcgtcgtgcagcgaagaccatcaatttcggtgttctctacggtatgagtgccgcgcgtttgtcgcaggaattaggcattccctatgaagaagctgcggcgttcattcagcgctactttcaaagctatcccaaagttaaagcatggatcgagaagactctcgaagaaggccgcacacgtggttacgtagagaccttatttggacgtcgccgctatgttcccgatttaaatgctcgcgtgaaatctgtccgtgaagccgccgaacgcatggcgtggaacatgcctgtacagggcacggcagctgacctcatgaaacttgcaatggtgcgcctttttccacaattgcgtgaagttggtgcccgcatgctcttgcaggtccacgatgaactcttgttagaagcgccaaaagagcgtgcggaagaggtggcagccctcgcgaaagaggttatggaaggcgtgtggcccttagcggtgcctcttgaagtcgaagttggtattggcgaggattggttggctgccaaaggataatga

SEQ ID NO: 18 - protein, 841 aa, synthetic construct
  REGION 1..841: note = Variant of DNA polymerase I from Thermus sp. strain 2.9
MHHHHHHGGSGMLPLFEPKGRVLLVDGHHLAYRNFFALKGLTTSRGEPVQGVYGFAKSLLKALKEDGDVVIVVFDAKAPSFRHEAYEAYKAGRAPTPEDFPRQLALMKELVDLLGLERLEVPGFEADDVLATLAKKAEREGYEVQILTADRDLFQLLSPRISVLHPEGHRITPEWLWEKYGLRPEQWVDFRALAGDPSDNIPGVKGIGEKTALKLLKEWGSLENLLKNLDQVKPASVREKILAHLEDLKLSRELVRVRTDLPLEVDFRGRREPDWEGLKAFLERLEFGSLLHEFGLLESPLPAEEAPWPPPEGAFLGYRLSRPEPMWAELLALAASAQGRVYRAEDPHGALRGLKEVRGLLAKDLAVVALREGLDLPPTDDPMLLAYLLDSSNTTPEGVARRYGGEWTEDAGERALLAERLHANLLGRLQGEERLLWLYEEVEKPLSRVLAHMEATGVKLDVAYLEALSLEVAAELRRLEEEVFRLAGHSFNLNSRDQLERVLFDELGLPPITKTEKTGKRSTSAAVLEALREVHPIVDKILQYRELAKLKGTYIDRLPALVHPKTGRLHTRFNQTATATGRLSSSDPNLQNIPVRTPLGQHIRKAFVAEEGWRLVALDYSQIELRVLAHLSGDENLIRVFQEGRDIHTQTASWMFGLSAEAIDPLMRRAAKTINFGVLYGMSAARLSQELGIPYEEAAAFIQRYFQSYPKVKAWIEKTLEEGRTRGYVETLFGRRRYVPDLNARVKSVREAAERMAWNMPVQGTAADLMKLAMVRLFPQLREVGARMLLQVHDELLLEAPKERAEEVAALAKEVMEGVWPLAVPLEVEVGIGEDWLAAKG

SEQ ID NO: 19 - DNA, 2529 bp, synthetic construct
  misc_feature 1..2529: note = Variant of DNA polymerase I from Thermus sp. strain 2.9
  source 1..2529: mol_type = other DNA
atgcaccatcatcatcatcatggcggtagcggcatgttaccgttgttcgaacctaaaggtcgcgtgcttctggttgatggccatcatctcgcgtatcgtaacttctttgccctgaaaggattaaccaccagccgtggcgagccggtacagggtgtctacggctttgcaaagtcgctcctgaaagctctgaaagaagacggtgatgtggtgattgttgtctttgatgcgaaagcgccaagttttcgccacgaagcgtacgaagcttacaaagccgggcgtgctccaacgccggaagactttcctcgccaattggcgcttatgaaggaattagtggatttgcttggcctcgaacgcttggaagttcccggtttcgaggcagacgacgtattagcgactctcgcaaagaaagccgaacgtgagggctatgaagtccagatcttgacagcagatcgcgatcttttccagcttttatctccgcgcatttccgtgttacacccggaagggcatcgtatcaccccggaatggctctgggagaaatatggtttgcgtcccgaacaatgggtggattttcgcgccttagcgggcgatccgagcgacaatattccgggagttaaaggtatcggcgagaagacggcgctcaagctccttaaagaatgggggtcgttggagaacttgcttaagaatttagatcaggtcaaaccagcttcagtgcgtgagaagattcttgcacacctcgaagacctcaaattaagccgcgaattggtccgtgtacgcaccgatttgccgctcgaagttgatttccgtggccgccgcgaacctgactgggagggtcttaaagcgtttttagagcgtcttgaatttggttcgctcttgcatgaattcggccttttagaaagcccgttaccagccgaagaagcaccttggccaccgcccgaaggcgcgtttttaggttaccgtttgagtcgcccggaaccgatgtgggccgaattattggctcttgcagcgtctgcccagggacgtgtgtatcgcgcggaagaccctcatggtgcgctccgtggcctcaaagaagtccgtggactccttgccaaagacttagctgttgttgcattgcgcgaaggtcttgatttacctccgactgatgatccaatgcttcttgcgtacctcttggacccgtcaaacacgacgcccgaaggcgtagcccgtcgttacggcggcgagtggaccgaagatgcaggtgagcgcgcgttattggccgaacgtttgcacgccaatttattaggacgtttgcaaggcgaggaacgtctcctctggctttacgaagaagtggagaaaccattgagtcgcgtgctcgcgcatatggaagctaccggtgtcaaattagacgtggcgtatttggaggcactcagccttgaagttgctgccgaaatgcgccgcttggaggaagaagtattccgtttagcaggccactcctttaaccttaattctcgcgatcagttagaacgtgtgttgttcgatgaacttggtctccctcctatcaccaagacagagaagaccggtaaacgtagcacttcagcggcggttttagaagctcttcgcgaagtccatcccattgtggacaagatcttgcagtaccgcgaactcgcgaaattgaaaggcacctatattgaccgtcttccggcattagtccacccgaaaacgggacgcctccatacccgcttcaaccaaacagccacggcgaccggtcgtttgtcctcctctgatccaaaccttcagaatattccagtacgtaccccattgggccagaagatccgcaaagcgtttgtagctgaggagggttggcgtttagtggccctcgattatagccaaattgaattacgtgtccttgcccatctttctggcgatgagaacctcatccgcgtgtttcaggaaggccgcgacattcacactcaaacggcaagctggatgtttggattatcagctgaagcgatcgatcctttgatgcgtcgtgcagcgaagaccatcaatttcggtgttctctacggtatgagtgcccatcgtttgtcgcaggaattaggcattccctatgaagaagctgcggcgttcattcagcgctactttcaaagctatcccaaagttaaagcatggatcgagaagactctcgaagaaggccgcacacgtggttacgtagagaccttatttggacgtcgccgctatgttcccgatttaaacgctcgcgtgaaatctgtccgtgaagccgccgaacgcatggcgttcaacatgcctgtacagggcacggcagctgacctcatgaaacttgcaatggtgcgcctttttccacaattgcgtgaagttggtgcccgcatgctcttgcaggtccacgatgaactcttgttagaagcgccaaaagagcgtgcggaagaggtggcagccctcgcgaaagaggttatggaaggcgtgtggcccttagcggtgcctcttgaagtcgaagttggtattggcgaggattggttggctgccaaaggataatga

SEQ ID NO: 20 - protein, 841 aa, synthetic construct
  REGION 1..841: note = Variant of DNA polymerase I from Thermus sp. strain 2.9
MHHHHHHGGSGMLPLFEPKGRVLLVDGHHLAYRNFFALKGLTTSRGEPVQGVYGFAKSLLKALKEDGDVVIVVFDAKAPSFRHEAYEAYKAGRAPTPEDFPRQLALMKELVDLLGLERLEVPGFEADDVLATLAKKAEREGYEVQILTADRDLFQLLSPRISVLHPEGHRITPEWLWEKYGLRPEQWVDFRALAGDPSDNIPGVKGIGEKTALKLLKEWGSLENLLKNLDQVKPASVREKILAHLEDLKLSRELVRVRTDLPLEVDFRGRREPDWEGLKAFLERLEFGSLLHEFGLLESPLPAEEAPWPPPEGAFLGYRLSRPEPMWAELLALAASAQGRVYRAEDPHGALRGLKEVRGLLAKDLAVVALREGLDLPPTDDPMLLAYLLDPSNTTPEGVARRYGGEWTEDAGERALLAERLHANLLGRLQGEERLLWLYEEVEKPLSRVLAHMEATGVKLDVAYLEALSLEVAAEMRRLEEEVFRLAGHSFNLNSRDQLERVLFDELGLPPITKTEKTGKRSTSAAVLEALREVHPIVDKILQYRELAKLKGTYIDRLPALVHPKTGRLHTRFNQTATATGRLSSSDPNLQNIPVRTPLGQKIRKAFVAEEGWRLVALDYSQIELRVLAHLSGDENLIRVFQEGRDIHTQTASWMFGLSAEAIDPLMRRAAKTINFGVLYGMSAHRLSQELGIPYEEAAAFIQRYFQSYPKVKAWIEKTLEEGRTRGYVETLFGRRRYVPDLNARVKSVREAAERMAFNMPVQGTAADLMKLAMVRLFPQLREVGARMLLQVHDELLLEAPKERAEEVAALAKEVMEGVWPLAVPLEVEVGIGEDWLAAKG

SEQ ID NO: 21 - DNA, 2529 bp, synthetic construct
  misc_feature 1..2529: note = Variant of DNA polymerase I from Thermus sp. strain 2.9
  source 1..2529: mol_type = other DNA
atgcaccatcatcatcatcatggcggtagcggcatgttaccgttgttcgaacctaaaggtcgcgtgcttctggttgatggccatcatctcgcgtatcgtaacttctttgccctgaaaggattaaccaccagccgtggcgagccggtacagggtgtctacggctttgcaaagtcgctcctgaaagctctgaaagaagacggtgatgtggtgattgttgtctttgatgcgaaagcgccaagttttcgccacgaagcgtacgaagcttacaaagccgggcgtgctccaacgccggaagactttcctcgccaattggcgcttatgaaggaattagtggatttgcttggcctcgaacgcttggaagttcccggtttcgaggcagacgacgtattagcgactctcgcaaagaaagccgaacgtgagggctatgaagtccagatcttgacagcagatcgcgatcttttccagcttttatctccgcgcatttccgtgttacacccggaagggcatcgtatcaccccggaatggctctgggagaaatatggtttgcgtcccgaacaatgggtggattttcgcgccttagcgggcgatccgagcgacaatattccgggagttaaaggtatcggcgagaagacggcgctcaagctccttaaagaatgggggtcgttggagaacttgcttaagaatttagatcaggtcaaaccagcttcagtgcgtgagaagattcttgcacacctcgaagacctcaaattaagccgcgaattgtcccgtgtacgcaccgatttgccgctcgaagttgatttccgtggccgccgcgaacctgactgggagggtcttaaagcgtttttagagcgtcttgaatttggttcgctcttgcatgaattcggccttttagaaagcccgttaccagccgaagaagcaccttggccaccgcccgaaggcgcgtttttaggttaccgtttgagtcgcccggaaccgatgtgggccgaattattggctcttgcagcgtctgcccagggacgtgtgtatcgcgcggaagaccctcatggtgcgctccgtggcctcaaagaagtccgtggactccttgccaaagacttagctgttgttgcattgcgcgaaggtcttgatttacctccgactgatgatccaatgcttcttgcgtacctcttggacccgtcaaacacgacgcccgaacgcgtagcccgtcgttacggcggcgagtggaccgaagatgcaggtgagcgcgcgttattggccgaacgtttgcacgccaatttattaggacgtttgcaaggcgaggaacgtctcctctggctttacgaagaagtggagaaaccattgagtcgcgtgctcgcgcatatggaagctaccggtgtcaaattagacgtggcgtatttggaggcactcagccttgaagttgctgccgaaatgcgccgcttggaggaagaagtattccgtttagcaggccactcctttaaccttaattctcgcgatcagttagaacgtgtgttgttcgatgaacttggtctccctcctatcggcaagacagagaagaccggtaaacgtagcacttcagcggcggttttagaagctcttcgcgaagtccatcccattgtggacaagatcttgcagtaccgcgaactcgcgaaattgaaaggcacctatattgaccgtcttccggcattagtccacccgaaaacgggacgcctccatacccgcttcaaccaaacagccacggcgaccggtcgtttgtcctcctctgatccaaaccttcagaatattccagtacgtaccccattgggccagcatatccgcaaagcgtttgtagctgaggagggttggcgtttagtggccctcgattatagccaaattgaattacgtgtccttgcccatctttctggcgatgagaacctcatccgcgtgtttcaggaaggccgcgacattcacactcaaacggcaagctggatgtttggagtgtcagcggaagcgatcgatcctttgatgcgtcgtgcagcgaagaccatcaatttcggtgttctctacggtatgagtgcccatcgtttgtcgcaggaattaggcattccctatgaagaagctgcggcgttcattcagcgctactttcaaagctatcccaaagttaaagcatggatcgagaagactctcgaagaaggccgcacacgtggttacgtagagaccttatttggacgtcgccgctatgttcccgatttaaacgctcgcgtgaaatctgtccgtgaagccgccgaacgcatggcgttcaacatgcctgtacagggcacggcagctgacctcatgaaacttgcaatggtgcgcctttttccacaattgcgtgaagttggtgcccgcatgctcttgcaggtccacgatgaactcttgttagaagcgccaaaagagcgtgcggaagaggtggcagccctcgcgaaagaggttatggaaggcgtgtggcccttagcggtgcctcttgaagtcgaagttggtattggcgaggattggttggctgccaaaggataatga

SEQ ID NO: 22 - protein, 841 aa, synthetic construct
  REGION 1..841: note = Variant of DNA polymerase I from Thermus sp. strain 2.9
MHHHHHHGGSGMLPLFEPKGRVLLVDGHHLAYRNFFALKGLTTSRGEPVQGVYGFAKSLLKALKEDGDVVIVVFDAKAPSFRHEAYEAYKAGRAPTPEDFPRQLALMKELVDLLGLERLEVPGFEADDVLATLAKKAEREGYEVQILTADRDLFQLLSPRISVLHPEGHRITPEWLWEKYGLRPEQWVDFRALAGDPSDNIPGVKGIGEKTALKLLKEWGSLENLLKNLDQVKPASVREKILAHLEDLKLSRELSRVRTDLPLEVDFRGRREPDWEGLKAFLERLEFGSLLHEFGLLESPLPAEEAPWPPPEGAFLGYRLSRPEPMWAELLALAASAQGRVYRAEDPHGALRGLKEVRGLLAKDLAVVALREGLDLPPTDDPMLLAYLLDPSNTTPERVARRYGGEWTEDAGERALLAERLHANLLGRLQGEERLLWLYEEVEKPLSRVLAHMEATGVKLDVAYLEALSLEVAAEMRRLEEEVFRLAGHSFNLNSRDQLERVLFDELGLPPIGKTEKTGKRSTSAAVLEALREVHPIVDKILQYRELAKLKGTYIDRLPALVHPKTGRLHTRFNQTATATGRLSSSDPNLQNIPVRTPLGQHIRKAFVAEEGWRLVALDYSQIELRVLAHLSGDENLIRVFQEGRDIHTQTASWMFGVSAEAIDPLMRRAAKTINFGVLYGMSAHRLSQELGIPYEEAAAFIQRYFQSYPKVKAWIEKTLEEGRTRGYVETLFGRRRYVPDLNARVKSVREAAERMAFNMPVQGTAADLMKLAMVRLFPQLREVGARMLLQVHDELLLEAPKERAEEVAALAKEVMEGVWPLAVPLEVEVGIGEDWLAAKG

SEQ ID NO: 23 - DNA, 2529 bp, synthetic construct
  misc_feature 1..2529: note = Variant of DNA polymerase I from Thermus sp. strain 2.9
  source 1..2529: mol_type = other DNA
atgcaccatcatcatcatcatggcggtagcggcatgttaccgttgttcgaacctaaaggtcgcgtgcttctggttgatggccatcatctcgcgtatcgtaacttctttgccctgaaaggattaaccaccagccgtggcgagccggtacagggtgtctacggctttgcaaagtcgctcctgaaagctctgaaagaagacggtgatgtggtgattgttgtctttgatgcgaaagcgccaagttttcgccacgaagcgtacgaagcttacaaagccgggcgtgctccaacgccggaagactttcctcgccaattggcgcttatgaaggaattagtggatttgcttggcctcgaacgcttggaagttcccggtttcgaggcagacgacgtattagcgactctcgcaaagaaagccgaacgtgagggctatgaagtccatatcttgacagcagatcgcgatcttttccagcttttatctccgcgcatttccgtgttacacccggaagggcatcgtatcaccccggaatggctctgggagaaatatggtttgcgtcccgaacaatgggtggattttcgcgccttagcgggcgatccgagcgacaatattccgggagttaaaggtatcggcgagaagacggcgctcaagctccttaaagaatgggggtcgttggagaacttgcttaagaatttagatcaggtcaaaccagcttcagtgcgtgagaagattcttgcacacctcgaagacctcaaattaagccgcgaattggtccgtgtacgcaccgatttgccgctcgaagttgatttccgtggccgccgcgaacctgactgggagggtcttaaagcgtttttagagcgtcttgaatttggttcgctcttgcatgaattcggccttttagaaagcccgttaccagccgaagaagcaccttggccaccgcccgaaggcgcgtttttaggttaccgtttgagtcgcccggaaccgatgtgggccgaattattggctcttgcagcgtctgcccagggacgtgtgtatcgcgcggaagaccctcatggtgcgctccgtggcctcaaagaagtccgtggactccttgccaaagacttagctgttgttgcattgcgcgaaggtcttgatttacctccgactgatgatccaatgcttcttgcgtacctcttggactcgtcaaacacgacgcccgaacgcgtagcccgtcgttacggcggcgagtggaccgaagatgcaggtgagcgcgcgttattggccgaacgtttgcacgccaatttattaggacgtttgcaaggcgaggaacgtctcctctggctttacgaagaagtggagaaaccattgagtcgcgtgctcgcgcatatggaagctaccggtgtcaaattagacgtggcgtatttggaggcactcagccttgaagtcgctgccgaaatgcgccgcttggaggaagaagtattccgtttagcaggccactcctttaaccttaattctcgcgatcagttagaacgtgtgttgttcgatgaacttggtctccctcctatcaccaagacagagaagaccggtaaacgtagcacttcagcggcggttttagaagctcttcgcgaagtccatcccattgtggacaagatcttgcagtaccgcgaactcgcgaaattgaaaggcacctatattgaccctcttccggcattagtccacccgaaaacgggacgcctccatacccgcttcaaccaaacagccacggcgaccggtcgtttgtcctcctctgatccaaaccttcagaatattccagtacgtaccccattgggccagaaaatccgcaaagcgtttgtagctgaggagggttggcgtttagtggccctcgattatagccaaattgaattacgtgtccttgcccatctttctggcgatgagaacctcatccgcgtgtttcaggaaggccgcgacattcacactcaaacggcaagctggatgtttggagtgtcagcggaagcgatcgatcctttgatgcgtcgtgcagcgaagaccatcaatttcggtgttctctacggtatgagtgccgcgcgtttgtcgcaggaattaggcattccctatgaagaagctgcggcgttcattcagcgctactttcaaagctatcccaaagttaaagcatggatcgagaagactctcgaagaaggccgcacacgtggttacgtagagaccttatttggacgtcgccgctatgttcccgatttaactgctcgcgtgaaatctgtccgtgaagccgccgaacgcatggcgttcaacatgcctgtacagggcacggcagctgacctcatgaaacttgcaatggtgcgcctttttccacaattgcgtgaagttggtgcccgcatgctcttgcaggtccacgatgaactcttgttagaagcgccaaaagagcgtgcggaagaggtggcagccctcgcgaaagaggttatggaaggcgtgtggcccttagcggtgcctcttgaagtcgaagttggtattggcgaggattggttggctgccaaaggataatga

SEQ ID NO: 24 - protein, 841 aa, synthetic construct
  REGION 1..841: note = Variant of DNA polymerase I from Thermus sp. strain 2.9
MHHHHHHGGSGMLPLFEPKGRVLLVDGHHLAYRNFFALKGLTTSRGEPVQGVYGFAKSLLKALKEDGDVVIVVFDAKAPSFRHEAYEAYKAGRAPTPEDFPRQLALMKELVDLLGLERLEVPGFEADDVLATLAKKAEREGYEVHILTADRDLFQLLSPRISVLHPEGHRITPEWLWEKYGLRPEQWVDFRALAGDPSDNIPGVKGIGEKTALKLLKEWGSLENLLKNLDQVKPASVREKILAHLEDLKLSRELVRVRTDLPLEVDFRGRREPDWEGLKAFLERLEFGSLLHEFGLLESPLPAEEAPWPPPEGAFLGYRLSRPEPMWAELLALAASAQGRVYRAEDPHGALRGLKEVRGLLAKDLAVVALREGLDLPPTDDPMLLAYLLDSSNTTPERVARRYGGEWTEDAGERALLAERLHANLLGRLQGEERLLWLYEEVEKPLSRVLAHMEATGVKLDVAYLEALSLEVAAEMRRLEEEVFRLAGHSFNLNSRDQLERVLFDELGLPPITKTEKTGKRSTSAAVLEALREVHPIVDKILQYRELAKLKGTYIDPLPALVHPKTGRLHTRFNQTATATGRLSSSDPNLQNIPVRTPLGQKIRKAFVAEEGWRLVALDYSQIELRVLAHLSGDENLIRVFQEGRDIHTQTASWMFGVSAEAIDPLMRRAAKTINFGVLYGMSAARLSQELGIPYEEAAAFIQRYFQSYPKVKAWIEKTLEEGRTRGYVETLFGRRRYVPDLTARVKSVREAAERMAFNMPVQGTAADLMKLAMVRLFPQLREVGARMLLQVHDELLLEAPKERAEEVAALAKEVMEGVWPLAVPLEVEVGIGEDWLAAKG

SEQ ID NO: 25 - DNA, 2529 bp, synthetic construct
  misc_feature 1..2529: note = Variant of DNA polymerase I from Thermus sp. strain 2.9
  source 1..2529: mol_type = other DNA
atgcaccatcatcatcatcatggcggtagcggcatgttaccgttgttcgaacctaaaggtcgcgtgcttctggttgatggccatcatctcgcgtatcgtaacttctttgccctgaaaggattaaccaccagccgtggcgagccggtacagggtgtctacggctttgcaaagtcgctcctgaaagctctgaaagaagacggtgatgtggtgattgttgtctttgatgcgaaagcgccaagttttcgccacgaagcgtacgaagcttacaaagccgggcgtgctccaacgccggaagactttcctcgccaattggcgcttatgaaggaattagtggatttgcttggcctcgaacgcttggaagttcccggtttcgaggcagacgacgtattagcgactctcgcaaagaaagccgaacgtgagggctatgaagtccagatcttgacagcagatcgcgatcttttccagcttttatctccgcgcatttccgtgttacacccggaagggcatcgtatcaccccggaatggctctgggagaaatatggtttgcgtcccgaacaatgggtggattttcgcgccttagcgggcgatccgagcgacaatattccgggagttaaaggtatcggcgagaagacggcgctcaagctccttaaagaatgggggtcgttggagaacttgcttaagaatttagatcaggtcaaaccagcttcagtgcgtgagaagattcttgcacacctcgaagacctcaaattaagccgcgaattggtccgtgtacgcaccgatttgccgctcgaagttgatttccgtggccgccgcgaacctgactgggagggtcttaaagcgtttttagagcgtcttgaatttggttcgctcttgcatgaattcggccttttagaaagcccgttaccagccgaagaagcaccttggccaccgcccgaaggcgcgtttttaggttaccgtttgagtcgcccggaaccgatgtgggccgaattattggctcttgcagcgtctgcccagggacgtgtgtatcgcgcggaagaccctcatggtgcgctccgtggcctcaaagaagtccgtggactccttgccaaagacttagctgttgttgcattgcgcgaaggtcttgatttacctccgactgatgatccaatgcttcttgcgtacctcttggacccgtcaaacacgacgcccgaaggcgtagcccgtcgttacggcggcgagtggaccgaagatgcaggtgagcgcgcgttattggccgaacgtttgcacgccaatttattaggacgtttgcaaggcgaggaacgtctcctctggctttacgaagaagtggagaaaccattgagtcgcgtgctcgcgcatatggaagctaccggtgtcaaattagacgtggcgtatttggaggcactcagccttgaagccgctgccgaaatgcgccgcttggaggaagaagtattccgtttagcaggccactcctttaaccttaattctcgcgatcagttagaacgtgtgttgttcgatgaacttggtctccctcctatcggcaagacagagaagaccggtaaacgtagcacttcagcggcggttttagaagctcttcgcgaagtccatcccattgtggacaagatcttgcagtaccgcgaactcgcgaaattgaaaggcacctatattgaccctcttccggcattagtccacccgaaaacgggacgcctccatacccgcttcaaccaaacagccacggcgaccggtcgtttgtcctcctctgatccaaaccttcagaatattccagtacgtaccccattgggccagaagatccgcaaagcgtttgtagctgaggagggttggcgtttagtggccctcgattatagccaaattgaattacgtgtccttgcccatctttctggcgatgagaacctcatccgcgtgtttcaggaaggccgcgacattcacactcaaacggcaagctggatgtttggattatcagctgaagcgatcgatcctttgatgcgtcgtgcagcgaagaccatcaatttcggtgttctctacggtatgagtgcccatcgtttgtcgcaggaattaggcattccctatgaagaagctgcggcgttcattcagcgctactttcaaagctatcccaaagttaaagcatggatcgagaagactctcgaagaaggccgcacacgtggttacgtagagaccttatttggacgtcgccgctatgttcccgatttaaatgctcgcgtgaaatctgtccgtgaagccgccgaacgcatggcgtggaacatgcctgtacagggcacggcagctgacctcatgaaacttgcaatggtgcgcctttttccacaattgcgtgaagttggtgcccgcatgctcttgcaggtccacgatgaactcttgttagaagcgccaaaagagcgtgcggaagaggtggcagccctcgcgaaagaggttatggaaggcgtgtggcccttagcggtgcctcttgaagtcgaagttggtattggcgaggattggttggctgccaaaggataatga

SEQ ID NO: 26 - protein, 841 aa, synthetic construct
  REGION 1..841: note = Variant of DNA polymerase I from Thermus sp. strain 2.9
MHHHHHHGGSGMLPLFEPKGRVLLVDGHHLAYRNFFALKGLTTSRGEPVQGVYGFAKSLLKALKEDGDVVIVVFDAKAPSFRHEAYEAYKAGRAPTPEDFPRQLALMKELVDLLGLERLEVPGFEADDVLATLAKKAEREGYEVQILTADRDLFQLLSPRISVLHPEGHRITPEWLWEKYGLRPEQWVDFRALAGDPSDNIPGVKGIGEKTALKLLKEWGSLENLLKNLDQVKPASVREKILAHLEDLKLSRELVRVRTDLPLEVDFRGRREPDWEGLKAFLERLEFGSLLHEFGLLESPLPAEEAPWPPPEGAFLGYRLSRPEPMWAELLALAASAQGRVYRAEDPHGALRGLKEVRGLLAKDLAVVALREGLDLPPTDDPMLLAYLLDPSNTTPEGVARRYGGEWTEDAGERALLAERLHANLLGRLQGEERLLWLYEEVEKPLSRVLAHMEATGVKLDVAYLEALSLEAAAEMRRLEEEVFRLAGHSFNLNSRDQLERVLFDELGLPPIGKTEKTGKRSTSAAVLEALREVHPIVDKILQYRELAKLKGTYIDPLPALVHPKTGRLHTRFNQTATATGRLSSSDPNLQNIPVRTPLGQKIRKAFVAEEGWRLVALDYSQIELRVLAHLSGDENLIRVFQEGRDIHTQTASWMFGLSAEAIDPLMRRAAKTINFGVLYGMSAHRLSQELGIPYEEAAAFIQRYFQSYPKVKAWIEKTLEEGRTRGYVETLFGRRRYVPDLNARVKSVREAAERMAWNMPVQGTAADLMKLAMVRLFPQLREVGARMLLQVHDELLLEAPKERAEEVAALAKEVMEGVWPLAVPLEVEVGIGEDWLAAKG

SEQ ID NO: 27 - DNA, 2529 bp, synthetic construct
  misc_feature 1..2529: note = Variant of DNA polymerase I from Thermus sp. strain 2.9
  source 1..2529: mol_type = other DNA
atgcaccatcatcatcatcatggcggtagcggcatgttaccgttgttcgaacctaaaggtcgcgtgcttctggttgatggccatcatctcgcgtatcgtaacttctttgccctgaaaggattaaccaccagccgtggcgagccggtacagggtgtctacggctttgcaaagtcgctcctgaaagctctgaaagaagacggtgatgtggtgattgttgtctttgatgcgaaagcgccaagttttcgccacgaagcgtacgaagcttacaaagccgggcgtgctccaacgccggaagactttcctcgccaattggcgcttatgaaggaattagtggatttgcttggcctcgaacgcttggaagttcccggtttcgaggcagacgacgtattagcgactctcgcaaagaaagccgaacgtgagggctatgaagtccagatcttgacagcagatcgcgatcttttccagcttttatctccgcgcatttccgtgttacacccggaagggcatcgtatcaccccggaatggctctgggagaaatatggtttgcgtcccgaacaatgggtggattttcgcgccttagcgggcgatccgagcgacaatattccgggagttaaaggtatcggcgagaagacggcgctcaagctccttaaagaatgggggtcgttggagaacttgcttaagaatttagatcaggtcaaaccagcttcagtgcgtgagaagattcttgcacacctcgaagacctcaaattaagccgcgaattggtccgtgtacgcaccgatttgccgctcgaagttgatttccgtggccgccgcgaacctgactgggagggtcttaaagcgtttttagagcgtcttgaatttggttcgctcttgcatgaattcggccttttagaaagcccgttaccagccgaagaagcaccttggccaccgcccgaaggcgcgtttttaggttaccgtttgagtcgcccggaaccgatgtgggccgaattattggctcttgcagcgtctgcccagggacgtgtgtatcgcgcggaagaccctcatggtgcgctccgtggcctcaaagaagtccgtggactccttgccaaagacttagctgttgttgcattgcgcgaaggtcttgatttacctccgactgatgatccaatgcttcttgcgtacctcttggacccgtcaaacacgacgcccgaacgcgtagcccgtcgttacggcggcgagtggaccgaagatgcaggtgagcgcgcgttattggccgaacgtttgcacgccaatttattaggacgtttgcaaggcgaggaacgtctcctctggctttacgaagaagtggagaaaccattgagtcgcgtgctcgcgcatatggaagctaccggtgtcaaattagacgtggcgtatttggaggcactcagccttgaagtcgctgccgaactgcgccgcttggaggaagaagtattccgtttagcaggccactcctttaaccttaattctcgcgatcagttagaacgtgtgttgttcgatgaacttggtctccctcctatcggcaagacagagaagaccggtaaacgtagcacttcagcggcggttttagaagctcttcgcgaagtccatcccattgtggacaagatcttgcagtaccgcgaactcgcgaaattgaaaggcacctatattgaccctcttccggcattagtccacccgaaaacgggacgcctccatacccgcttcaaccaaacagccacggcgaccggtcgtttgtcctcctctgatccaaaccttcagaatattccagtacgtaccccattgggccagaagatccgcaaagcgtttgtagctgaggagggttggcgtttagtggccctcgattatagccaaattgaattacgtgtccttgcccatctttctggcgatgagaacctcatccgcgtgtttcaggaaggccgcgacattcacactcaaacggcaagctggatgtttggattatcagctgaagcgatcgatcctttgatgcgtcgtgcagcgaagaccatcaatttcggtgttctctacggtatgagtgcccatcgtttgtcgcaggaattaggcattccctatgaagaagctgcggcgttcattcagcgctactttcaaagctatcccaaagttaaagcatggatcgagaagactctcgaagaaggccgcacacgtggttacgtagagaccttatttggacgtcgccgctatgttcccgatttaaacgctcgcgtgaaatctgtccgtgaagccgccgaacgcatggcgttcaacatgcctgtacagggcacggcagctgacctcatgaaacttgcaatggtgcgcctttttccacaattgcgtgaagttggtgcccgcatgctcttgcaggtccacgatgaactcttgttagaagcgccaaaagagcgtgcggaagaggtggcagccctcgcgaaagaggttatggaaggcgtgtggcccttagcggtgcctcttgaagtcgaagttggtattggcgaggattggttggctgccaaaggataatga

SEQ ID NO: 28 - protein, 841 aa, synthetic construct
  REGION 1..841: note = Variant of DNA polymerase I from Thermus sp. strain 2.9
MHHHHHHGGSGMLPLFEPKGRVLLVDGHHLAYRNFFALKGLTTSRGEPVQGVYGFAKSLLKALKEDGDVVIVVFDAKAPSFRHEAYEAYKAGRAPTPEDFPRQLALMKELVDLLGLERLEVPGFEADDVLATLAKKAEREGYEVQILTADRDLFQLLSPRISVLHPEGHRITPEWLWEKYGLRPEQWVDFRALAGDPSDNIPGVKGIGEKTALKLLKEWGSLENLLKNLDQVKPASVREKILAHLEDLKLSRELVRVRTDLPLEVDFRGRREPDWEGLKAFLERLEFGSLLHEFGLLESPLPAEEAPWPPPEGAFLGYRLSRPEPMWAELLALAASAQGRVYRAEDPHGALRGLKEVRGLLAKDLAVVALREGLDLPPTDDPMLLAYLLDPSNTTPERVARRYGGEWTEDAGERALLAERLHANLLGRLQGEERLLWLYEEVEKPLSRVLAHMEATGVKLDVAYLEALSLEVAAELRRLEEEVFRLAGHSFNLNSRDQLERVLFDELGLPPIGKTEKTGKRSTSAAVLEALREVHPIVDKILQYRELAKLKGTYIDPLPALVHPKTGRLHTRFNQTATATGRLSSSDPNLQNIPVRTPLGQKIRKAFVAEEGWRLVALDYSQIELRVLAHLSGDENLIRVFQEGRDIHTQTASWMFGLSAEAIDPLMRRAAKTINFGVLYGMSAHRLSQELGIPYEEAAAFIQRYFQSYPKVKAWIEKTLEEGRTRGYVETLFGRRRYVPDLNARVKSVREAAERMAFNMPVQGTAADLMKLAMVRLFPQLREVGARMLLQVHDELLLEAPKERAEEVAALAKEVMEGVWPLAVPLEVEVGIGEDWLAAKG

SEQ ID NO: 29 - DNA, 2529 bp, synthetic construct
  misc_feature 1..2529: note = Variant of DNA polymerase I from Thermus sp. strain 2.9
  source 1..2529: mol_type = other DNA
atgcaccatcatcatcatcatggcggtagcggcatgttaccgttgttcgaacctaaaggtcgcgtgcttctggttgatggccatcatctcgcgtatcgtaacttctttgccctgaaaggattaaccaccagccgtggcgagccggtacagggtgtctacggctttgcaaagtcgctcctgaaagctctgaaagaagacggtgatgtggtgattgttgtctttgatgcgaaagcgccaagttttcgccacgaagcgtacgaagcttacaaagccgggcgtgctccaacgccggaagactttcctcgccaattggcgcttatgaaggaattagtggatttgcttggcctcgaacgcttggaagttcccggtttcgaggcagacgacgtattagcgactctcgcaaagaaagccgaacgtgagggctatgaagtccagatcttgacagcagatcgcgatcttttccagcttttatctccgcgcatttccgtgttacacccggaagggcatcgtatcaccccggaatggctctgggagaaatatggtttgcgtcccgaacaatgggtggattttcgcgccttagcgggcgatccgagcgacaatattccgggagttaaaggtatcggcgagaagacggcgctcaagctccttaaagaatgggggtcgttggagaacttgcttaagaatttagatcaggtcaaaccagcttcagtgcgtgagaagattcttgcacacctcgaagacctcaaattaagccgcgaattggtccgtgtacgcaccgatttgccgctcgaagttgatttccgtggccgccgcgaacctgactgggagggtcttaaagcgtttttagagcgtcttgaatttggttcgctcttgcatgaattcggccttttagaaagcccgttaccagccgaagaagcaccttggccaccgcccgaaggcgcgtttttaggttaccgtttgagtcgcccggaaccgatgtgggccgaattattggctcttgcagcgtctgcccagggacgtgtgtatcgcgcggaagaccctcatggtgcgctccgtggcctcaaagaagtccgtggactccttgccaaagacttagctgttgttgcattgcgcgaaggtcttgatttacctccgactgatgatccaatgcttcttgcgtacctcttggactcgtcaaacacgacgcccgaaggcgtagcccgtcgttacggcggcgagtggaccgaagatgcaggtgagcgcgcgttattggccgaacgtttgcacgccaatttattaggacgtttgcaaggcgaggaacgtctcctctggctttacgaagaagtggagaaaccattgagtcgcgtgctcgcgcatatggaagctaccggtgtcaaattagacgtggcgtatttggaggcactcagccttgaagccgctgccgaaatgcgccgcttggaggaagaagtattccgtttagcaggccactcctttaaccttaattctcgcgatcagttagaacgtgtgttgttcgatgaacttggtctccctcctatcggtaagacagagaagaccggtaaacgtagcacttcagcggcggttttagaagctcttcgcgaagtccatcccattgtggacaagatcttgcagtaccgcgaactcgcgaaattgaaaggcacctatattgaccctcttccggcattagtccacccgaaaacgggacgcctccatacccgcttcaaccaaacagccacggcgaccggtcgtttgtcctcctctgatccaaaccttcagaatattccagtacgtaccccattgggccagaaaatccgcaaagcgtttgtagctgaggagggttggcgtttagtggccctcgattatagccaaattgaattacgtgtccttgcccatctttctggcgatgagaacctcatccgcgtgtttcaggaaggccgcgacattcacactcaaacggcaagctggatgtttggagtgtcatcggaagcgatcgatcctttgatgcgtcgtgcagcgaagaccatcaatttcggtgttctctacggtatgagtgcccatcgtttgtcgcaggaattaggcattccctatgaagaagctgcggcgttcattcagcgctactttcaaagctatcccaaagttaaagcatggatcgagaagactctcgaagaaggccgcacacgtggttacgtagagaccttatttggacgtcgccgctatgttcccgatttaaatgctcgcgtgaaatctgtccgtgaagccgccgaacgcatggcgtggaacatgcctgtacagggcacggcagctgacctcatgaaacttgcaatggtgcgcctttttccacaattgcgtgaagttggtgcccgcatgctcttgcaggtccacgatgaactcttgttagaagcgccaaaagagcgtgcggaagaggtggcagccctcgcgaaagaggttatggaaggcgtgtggcccttagcggtgcctcttgaagtcgaagttggtattggcgaggattggttggctgccaaaggataatga

SEQ ID NO: 30 - protein, 841 aa, synthetic construct
  REGION 1..841: note = Variant of DNA polymerase I from Thermus sp. strain 2.9
MHHHHHHGGSGMLPLFEPKGRVLLVDGHHLAYRNFFALKGLTTSRGEPVQGVYGFAKSLLKALKEDGDVVIVVFDAKAPSFRHEAYEAYKAGRAPTPEDFPRQLALMKELVDLLGLERLEVPGFEADDVLATLAKKAEREGYEVQILTADRDLFQLLSPRISVLHPEGHRITPEWLWEKYGLRPEQWVDFRALAGDPSDNIPGVKGIGEKTALKLLKEWGSLENLLKNLDQVKPASVREKILAHLEDLKLSRELVRVRTDLPLEVDFRGRREPDWEGLKAFLERLEFGSLLHEFGLLESPLPAEEAPWPPPEGAFLGYRLSRPEPMWAELLALAASAQGRVYRAEDPHGALRGLKEVRGLLAKDLAVVALREGLDLPPTDDPMLLAYLLDSSNTTPEGVARRYGGEWTEDAGERALLAERLHANLLGRLQGEERLLWLYEEVEKPLSRVLAHMEATGVKLDVAYLEALSLEAAAEMRRLEEEVFRLAGHSFNLNSRDQLERVLFDELGLPPIGKTEKTGKRSTSAAVLEALREVHPIVDKILQYRELAKLKGTYIDPLPALVHPKTGRLHTRFNQTATATGRLSSSDPNLQNIPVRTPLGQKIRKAFVAEEGWRLVALDYSQIELRVLAHLSGDENLIRVFQEGRDIHTQTASWMFGVSSEAIDPLMRRAAKTINFGVLYGMSAHRLSQELGIPYEEAAAFIQRYFQSYPKVKAWIEKTLEEGRTRGYVETLFGRRRYVPDLNARVKSVREAAERMAWNMPVQGTAADLMKLAMVRLFPQLREVGARMLLQVHDELLLEAPKERAEEVAALAKEVMEGVWPLAVPLEVEVGIGEDWLAAKG

SEQ ID NO: 31 - DNA, 2529 bp, synthetic construct
  misc_feature 1..2529: note = Variant of DNA polymerase I from Thermus sp. strain 2.9
  source 1..2529: mol_type = other DNA
atgcaccatcatcatcatcatggcggtagcggcatgttaccgttgttcgaacctaaaggtcgcgtgcttctggttgatggccatcatctcgcgtatcgtaacttctttgccctgaaaggattaaccaccagccgtggcgagccggtacagggtgtctacggctttgcaaagtcgctcctgaaagctctgaaagaagacggtgatgtggtgattgttgtctttgatgcgaaagcgccaagttttcgccacgaagcgtacgaagcttacaaagccgggcgtgctccaacgccggaagactttcctcgccaattggcgcttatgaaggaattagtggatttgcttggcctcgaacgcttggaagttcccggtttcgaggcagacgacgtattagcgactctcgcaaagaaagccgaacgtgagggctatgaagtccatatcttgacagcagatcgcgatcttttccagcttttatctccgcgcatttccgtgttacacccggaagggcatcgtatcaccccggaatggctctgggagaaatatggtttgcgtcccgaacaatgggtggattttcgcgccttagcgggcgatccgagcgacaatattccgggagttaaaggtatcggcgagaagacggcgctcaagctccttaaagaatgggggtcgttggagaacttgcttaagaatttagatcaggtcaaaccagcttcagtgcgtgagaagattcttgcacacctcgaagacctcaaattaagccgcgaattgtcgcgtgtacgcaccgatttgccgctcgaagttgatttccgtggccgccgcgaacctgactgggagggtcttaaagcgtttttagagcgtcttgaatttggttcgctcttgcatgaattcggccttttagaaagcccgttaccagccgaagaagcaccttggccaccgcccgaaggcgcgtttttaggttaccgtttgagtcgcccggaaccgatgtgggccgaattattggctcttgcagcgtctgcccagggacgtgtgtatcgcgcggaagaccctcatggtgcgctccgtggcctcaaagaagtccgtggactccttgccaaagacttagctgttgttgcattgcgcgaaggtcttgatttacctccgactgatgatccaatgcttcttgcgtacctcttggacccgtcaaacacgacgcccgaaggcgtagcccgtcgttacggcggcgagtggaccgaagatgcaggtgagcgcgcgttattggccgaacgtttgcacgccaatttattaggacgtttgcaaggcgaggaacgtctcctctggctttacgaagaagtggagaaaccattgagtcgcgtgctcgcgcatatggaagctaccggtgtcaaattagacgtggcgtatttggaggcactcagccttgaagtcgctgccgaaatgcgccgcttggaggaagaagtattccgtttagcaggccactcctttaaccttaattctcgcgatcagttagaacgtgtgttgttcgatgaacttggtctccctcctatcggcaagacagagaagaccggtaaacgtagcacttcagcggcggttttagaagctcttcgcgaagtccatcccattgtggacaagatcttgcagtaccgcgaactcgcgaaattgaaaggcacctatattgaccctcttccggcattagtccacccgaaaacgggacgcctccatacccgcttcaaccaaacagccacggcgaccggtcgtttgtcctcctctgatccaaaccttcagaatattccagtacgtaccccattgggccagaagatccgcaaagcgtttgtagctgaggagggttggcgtttagtggccctcgattatagccaaattgaattacgtgtccttgcccatctttctggcgatgagaacctcatccgcgtgtttcaggaaggccgcgacattcacactcaaacggcaagctggatgtttggattatcagctgaagcgatcgatcctttgatgcgtcgtgcagcgaagaccatcaatttcggtgttctctacggtatgagtgccgcgcgtttgtcgcaggaattaggcattccctatgaagaagctgcggcgttcattcagcgctactttcaaagctatcccaaagttaaagcatggatcgagaagactctcgaagaaggccgcacacgtggttacgtagagaccttatttggacgtcgccgctatgttcccgatttaaatgctcgcgtgaaatctgtccgtgaagccgccgaacgcatggcgttcaacatgcctgtacagggcacggcagctgacctcatgaaacttgcaatggtgcgcctttttccacaattgcgtgaagttggtgcccgcatgctcttgcaggtccacgatgaactcttgttagaagcgccaaaagagcgtgcggaagaggtggcagccctcgcgaaagaggttatggaaggcgtgtggcccttagcggtgcctcttgaagtcgaagttggtattggcgaggattggttggctgccaaaggataatga

SEQ ID NO: 32 - protein, 841 aa, synthetic construct
  REGION 1..841: note = Variant of DNA polymerase I from Thermus sp. strain 2.9
MHHHHHHGGSGMLPLFEPKGRVLLVDGHHLAYRNFFALKGLTTSRGEPVQGVYGFAKSLLKALKEDGDVVIVVFDAKAPSFRHEAYEAYKAGRAPTPEDFPRQLALMKELVDLLGLERLEVPGFEADDVLATLAKKAEREGYEVHILTADRDLFQLLSPRISVLHPEGHRITPEWLWEKYGLRPEQWVDFRALAGDPSDNIPGVKGIGEKTALKLLKEWGSLENLLKNLDQVKPASVREKILAHLEDLKLSRELSRVRTDLPLEVDFRGRREPDWEGLKAFLERLEFGSLLHEFGLLESPLPAEEAPWPPPEGAFLGYRLSRPEPMWAELLALAASAQGRVYRAEDPHGALRGLKEVRGLLAKDLAVVALREGLDLPPTDDPMLLAYLLDPSNTTPEGVARRYGGEWTEDAGERALLAERLHANLLGRLQGEERLLWLYEEVEKPLSRVLAHMEATGVKLDVAYLEALSLEVAAEMRRLEEEVFRLAGHSFNLNSRDQLERVLFDELGLPPIGKTEKTGKRSTSAAVLEALREVHPIVDKILQYRELAKLKGTYIDPLPALVHPKTGRLHTRFNQTATATGRLSSSDPNLQNIPVRTPLGQKIRKAFVAEEGWRLVALDYSQIELRVLAHLSGDENLIRVFQEGRDIHTQTASWMFGLSAEAIDPLMRRAAKTINFGVLYGMSAARLSQELGIPYEEAAAFIQRYFQSYPKVKAWIEKTLEEGRTRGYVETLFGRRRYVPDLNARVKSVREAAERMAFNMPVQGTAADLMKLAMVRLFPQLREVGARMLLQVHDELLLEAPKERAEEVAALAKEVMEGVWPLAVPLEVEVGIGEDWLAAKG

SEQ ID NO: 33 - DNA, 2529 bp, synthetic construct
  misc_feature 1..2529: note = Variant of DNA polymerase I from Thermus sp. strain 2.9
  source 1..2529: mol_type = other DNA
atgcaccatcatcatcatcatggcggtagcggcatgttaccgttgttcgaacctaaaggtcgcgtgcttctggttgatggccatcatctcgcgtatcgtaacttctttgccctgaaaggattaaccaccagccgtggcgagccggtacagggtgtctacggctttgcaaagtcgctcctgaaagctctgaaagaagacggtgatgtggtgattgttgtctttgatgcgaaagcgccaagttttcgccacgaagcgtacgaagcttacaaagccgggcgtgctccaacgccggaagactttcctcgccaattggcgcttatgaaggaattagtggatttgcttggcctcgaacgcttggaagttcccggtttcgaggcagacgacgtattagcgactctcgcaaagaaagccgaacgtgagggctatgaagtccagatcttgacagcagatcgcgatcttttccagcttttatctccgcgcatttccgtgttacacccggaagggcatcgtatcaccccggaatggctctgggagaaatatggtttgcgtcccgaacaatgggtggattttcgcgccttagcgggcgatccgagcgacaatattccgggagttaaaggtatcggcgagaagacggcgctcaagctccttaaagaatgggggtcgttggagaacttgcttaagaatttagatcaggtcaaaccagcttcagtgcgtgagaagattcttgcacacctcgaagacctcaaattaagccgcgaattggtccgtgtacgcaccgatttgccgctcgaagttgatttccgtggccgccgcgaacctgactgggagggtcttaaagcgtttttagagcgtcttgaatttggttcgctcttgcatgaattcggccttttagaaagcccgttaccagccgaagaagcaccttggccaccgcccgaaggcgcgtttttaggttaccgtttgagtcgcccggaaccgatgtgggccgaattattggctcttgcagcgtctgcccagggacgtgtgtatcgcgcggaagaccctcatggtgcgctccgtggcctcaaagaagtccgtggactccttgccaaagacttagctgttgttgcattgcgcgaaggtcttgatttacctccgactgatgatccaatgcttcttgcgtacctcttggactcgtcaaacacgacgcccgaacgcgtagcccgtcgttacggcggcgagtggaccgaagatgcaggtgagcgcgcgttattggccgaacgtttgcacgccaatttattaggacgtttgcaaggcgaggaacgtctcctctggctttacgaagaagtggagaaaccattgagtcgcgtgctcgcgcatatggaagctaccggtgtcaaattagacgtggcgtatttggaggcactcagccttgaagtcgctgccgaactgcgccgcttggaggaagaagtattccgtttagcaggccactcctttaaccttaattctcgcgatcagttagaacgtgtgttgttcgatgaacttggtctccctcctatcggcaagacagagaagaccggtaaacgtagcacttcagcggcggttttagaagctcttcgcgaagtccatcccattgtggacaagatcttgcagtaccgcgaactcgcgaaattgaaaggcacctatattgaccgtcttccggcattagtccacccgaaaacgggacgcctccatacccgcttcaaccaaacagccacggcgaccggtcgtttgtcctcctctgatccaaaccttcagaatattccagtacgtaccccattgggccagaagatccgcaaagcgtttgtagctgaggagggttggcgtttagtggccctcgattatagccaaattgaattacgtgtccttgcccatctttctggcgatgagaacctcatccgcgtgtttcaggaaggccgcgacattcacactcaaacggcaagctggatgtttggattatcagctgaagcgatcgatcctttgatgcgtcgtgcagcgaagaccatcaatttcggtgttctctacggtatgagtgcccatcgtttgtcgcaggaattaggcattccctatgaagaagctgcggcgttcattcagcgctactttcaaagctatcccaaagttaaagcatggatcgagaagactctcgaagaaggccgcacacgtggttacgtagagaccttatttggacgtcgccgctatgttcccgatttaaacgctcgcgtgaaatctgtccgtgaagccgccgaacgcatggcgttcaacatgcctgtacagggcacggcagctgacctcatgaaacttgcaatggtgcgcctttttccacaattgcgtgaagttggtgcccgcatgctcttgcaggtccacgatgaactcttgttagaagcgccaaaagagcgtgcggaagaggtggcagccctcgcgaaagaggttatggaaggcgtgtggcccttagcggtgcctcttgaagtcgaagttggtattggcgaggattggttggctgccaaaggataatga

SEQ ID NO: 34 - protein, 841 aa, synthetic construct
  REGION 1..841: note = Variant of DNA polymerase I from Thermus sp. strain 2.9
MHHHHHHGGSGMLPLFEPKGRVLLVDGHHLAYRNFFALKGLTTSRGEPVQGVYGFAKSLLKALKEDGDVVIVVFDAKAPSFRHEAYEAYKAGRAPTPEDFPRQLALMKELVDLLGLERLEVPGFEADDVLATLAKKAEREGYEVQILTADRDLFQLLSPRISVLHPEGHRITPEWLWEKYGLRPEQWVDFRALAGDPSDNIPGVKGIGEKTALKLLKEWGSLENLLKNLDQVKPASVREKILAHLEDLKLSRELVRVRTDLPLEVDFRGRREPDWEGLKAFLERLEFGSLLHEFGLLESPLPAEEAPWPPPEGAFLGYRLSRPEPMWAELLALAASAQGRVYRAEDPHGALRGLKEVRGLLAKDLAVVALREGLDLPPTDDPMLLAYLLDSSNTTPERVARRYGGEWTEDAGERALLAERLHANLLGRLQGEERLLWLYEEVEKPLSRVLAHMEATGVKLDVAYLEALSLEVAAELRRLEEEVFRLAGHSFNLNSRDQLERVLFDELGLPPIGKTEKTGKRSTSAAVLEALREVHPIVDKILQYRELAKLKGTYIDRLPALVHPKTGRLHTRFNQTATATGRLSSSDPNLQNIPVRTPLGQKIRKAFVAEEGWRLVALDYSQIELRVLAHLSGDENLIRVFQEGRDIHTQTASWMFGLSAEAIDPLMRRAAKTINFGVLYGMSAHRLSQELGIPYEEAAAFIQRYFQSYPKVKAWIEKTLEEGRTRGYVETLFGRRRYVPDLNARVKSVREAAERMAFNMPVQGTAADLMKLAMVRLFPQLREVGARMLLQVHDELLLEAPKERAEEVAALAKEVMEGVWPLAVPLEVEVGIGEDWLAAKG

SEQ ID NO: 35 - DNA, 2529 bp, synthetic construct
  misc_feature 1..2529: note = Variant of DNA polymerase I from Thermus sp. strain 2.9
  source 1..2529: mol_type = other DNA
atgcaccatcatcatcatcatggcggtagcggcatgttaccgttgttcgaacctaaaggtcgcgtgcttctggttgatggccatcatctcgcgtatcgtaacttctttgccctgaaaggattaaccaccagccgtggcgagccggtacagggtgtctacggctttgcaaagtcgctcctgaaagctctgaaagaagacggtgatgtggtgattgttgtctttgatgcgaaagcgccaagttttcgccacgaagcgtacgaagcttacaaagccgggcgtgctccaacgccggaagactttcctcgccaattggcgcttatgaaggaattagtggatttgcttggcctcgaacgcttggaagttcccggtttcgaggcagacgacgtattagcgactctcgcaaagaaagccgaacgtgagggctatgaagtccagatcttgacagcagatcgcgatcttttccagcttttatctccgcgcatttccgtgttacacccggaagggcatcgtatcaccccggaatggctctgggagaaatatggtttgcgtcccgaacaatgggtggattttcgcgccttagcgggcgatccgagcgacaatattccgggagttaaaggtatcggcgagaagacggcgctcaagctccttaaagaatgggggtcgttggagaacttgcttaagaatttagatcaggtcaaaccagcttcagtgcgtgagaagattcttgcacacctcgaagacctcaaattaagccgcgaattggtccgtgtacgcaccgatttgccgctcgaagttgatttccgtggccgccgcgaacctgactgggagggtcttaaagcgtttttagagcgtcttgaatttggttcgctcttgcatgaattcggccttttagaaagcccgttaccagccgaagaagcaccttggccaccgcccgaaggcgcgtttttaggttaccgtttgagtcgcccggaaccgatgtgggccgaattattggctcttgcagcgtctgcccagggacgtgtgtatcgcgcggaagaccctcatggtgcgctccgtggcctcaaagaagtccgtggactccttgccaaagacttagctgttgttgcattgcgcgaaggtcttgatttacctccgactgatgatccaatgcttcttgcgtacctcttggactcgtcaaacacgacgcccgaaggcgtagcccgtcgttacggcggcgagtggaccgaagatgcaggtgagcgcgcgttattggccgaacgtttgcacgccaatttattaggacgtttgcaaggcgaggaacgtctcctctggctttacgaagaagtggagaaaccattgagtcgcgtgctcgcgcatatggaagctaccggtgtcaaattagacgtggcgtatttggaggcactcagccttgaagccgctgccgaaatgcgccgcttggaggaagaagtattccgtttagcaggccactcctttaaccttaattctcgcgatcagttagaacgtgtgttgttcgatgaacttggtctccctcctatcaccaagacagagaagaccggtaaacgtagcacttcagcggcggttttagaagctcttcgcgaagtccatcccattgtggacaagatcttgcagtaccgcgaactcgcgaaattgaaaggcacctatattgaccctcttccggcattagtccacccgaaaacgggacgcctccatacccgcttcaaccaaacagccacggcgaccggtcgtttgtcctcctctgatccaaaccttcagaatattccagtacgtaccccattgggccagaagatccgcaaagcgtttgtagctgaggagggttggcgtttagtggccctcgattatagccaaattgaattacgtgtccttgcccatctttctggcgatgagaacctcatccgcgtgtttcaggaaggccgcgacattcacactcaaacggcaagctggatgtttggattatcagctgaagcgatcgatcctttgatgcgtcgtgcagcgaagaccatcaatttcggtgttctctacggtatgagtgcccatcgtttgtcgcaggaattaggcattccctatgaagaagctgcggcgttcattcagcgctactttcaaagctatcccaaagttaaagcatggatcgagaagactctcgaagaaggccgcacacgtggttacgtagagaccttatttggacgtcgccgctatgttcccgatttaaacgctcgcgtgaaatctgtccgtgaagccgccgaacgcatggcgtggaacatgcctgtacagggcacggcagctgacctcatgaaacttgcaatggtgcgcctttttccacaattgcgtgaagttggtgcccgcatgctcttgcaggtccacgatgaactcttgttagaagcgccaaaagagcgtgcggaagaggtggcagccctcgcgaaagaggttatggaaggcgtgtggcccttagcggtgcctcttgaagtcgaagttggtattggcgaggattggttggctgccaaaggataatga

SEQ ID NO: 36 - protein, 841 aa, synthetic construct
  REGION 1..841: note = Variant of DNA polymerase I from Thermus sp. strain 2.9
MHHHHHHGGSGMLPLFEPKGRVLLVDGHHLAYRNFFALKGLTTSRGEPVQGVYGFAKSLLKALKEDGDVVIVVFDAKAPSFRHEAYEAYKAGRAPTPEDFPRQLALMKELVDLLGLERLEVPGFEADDVLATLAKKAEREGYEVQILTADRDLFQLLSPRISVLHPEGHRITPEWLWEKYGLRPEQWVDFRALAGDPSDNIPGVKGIGEKTALKLLKEWGSLENLLKNLDQVKPASVREKILAHLEDLKLSRELVRVRTDLPLEVDFRGRREPDWEGLKAFLERLEFGSLLHEFGLLESPLPAEEAPWPPPEGAFLGYRLSRPEPMWAELLALAASAQGRVYRAEDPHGALRGLKEVRGLLAKDLAVVALREGLDLPPTDDPMLLAYLLDSSNTTPEGVARRYGGEWTEDAGERALLAERLHANLLGRLQGEERLLWLYEEVEKPLSRVLAHMEATGVKLDVAYLEALSLEAAAEMRRLEEEVFRLAGHSFNLNSRDQLERVLFDELGLPPITKTEKTGKRSTSAAVLEALREVHPIVDKILQYRELAKLKGTYIDPLPALVHPKTGRLHTRFNQTATATGRLSSSDPNLQNIPVRTPLGQKIRKAFVAEEGWRLVALDYSQIELRVLAHLSGDENLIRVFQEGRDIHTQTASWMFGLSAEAIDPLMRRAAKTINFGVLYGMSAHRLSQELGIPYEEAAAFIQRYFQSYPKVKAWIEKTLEEGRTRGYVETLFGRRRYVPDLNARVKSVREAAERMAWNMPVQGTAADLMKLAMVRLFPQLREVGARMLLQVHDELLLEAPKERAEEVAALAKEVMEGVWPLAVPLEVEVGIGEDWLAAKG

SEQ ID NO: 37 - DNA, 2529 bp, synthetic construct
  misc_feature 1..2529: note = Variant of DNA polymerase I from Thermus sp. strain 2.9
  source 1..2529: mol_type = other DNA
atgcaccatcatcatcatcatggcggtagcggcatgttaccgttgttcgaacctaaaggtcgcgtgcttctggttgatggccatcatctcgcgtatcgtaacttctttgccctgaaaggattaaccaccagccgtggcgagccggtacagggtgtctacggctttgcaaagtcgctcctgaaagctctgaaagaagacggtgatgtggtgattgttgtctttgatgcgaaagcgccaagttttcgccacgaagcgtacgaagcttacaaagccgggcgtgctccaacgccggaagactttcctcgccaattggcgcttatgaaggaattagtggatttgcttggcctcgaacgcttggaagttcccggtttcgaggcagacgacgtattagcgactctcgcaaagaaagccgaacgtgagggctatgaagtccatatcttgacagcagatcgcgatcttttccagcttttatctccgcgcatttccgtgttacacccggaagggcatcgtatcaccccggaatggctctgggagaaatatggtttgcgtcccgaacaatgggtggattttcgcgccttagcgggcgatccgagcgacaatattccgggagttaaaggtatcggcgagaagacggcgctcaagctccttaaagaatgggggtcgttggagaacttgcttaagaatttagatcaggtcaaaccagcttcagtgcgtgagaagattcttgcacacctcgaagacctcaaattaagccgcgaattgtcgcgtgtacgcaccgatttgccgctcgaagttgatttccgtggccgccgcgaacctgactgggagggtcttaaagcgtttttagagcgtcttgaactgggttcgctcttgcatgaattcggccttttagaaagcccgttaccagccgaagaagcaccttggccaccgcccgaaggcgcgtttttaggttaccgtttgagtcgcccggaaccgatgtgggccgaattattggctcttgcagcgtctgcccagggacgtgtgtatcgcgcggaagaccctcatggtgcgctccgtggcctcaaagaagtccgtggactccttgccaaagacttagctgttgttgcattgcgcgaaggtcttgatttacctccgactgatgatccaatgcttcttgcgtacctcttggacccgtcaaacacgacgcccgaaggcgtagcccgtcgttacggcggcgagtggaccgaagatgcaggtgagcgcgcgttattggccgaacgtttgcacgccaatttattaggacgtttgcaaggcgaggaacgtctcctctggctttacgaagaagtggagaaaccattgagtcgcgtgctcgcgcatatggaagctaccggtgtcaaattagacgtggcgtatttggaggcactcagccttgaagtcgctgccgaaatgcgccgcttggaggaagaagtattccgtttagcaggccactcctttaaccttaattctcgcgatcagttagaacgtgtgttgttcgatgaacttggtctccctcctatcggcaagacagagaagaccggtaaacgtagcacttcagcggcggttttagaagctcttcgcgaagtccatcccattgtggacaagatcttgcagtaccgcgaactcgcgaaattgaaaggcacctatattgaccctcttccggcattagtccacccgaaaacgggacgcctccatacccgcttcaaccaaacagccacggcgaccggtcgtttgtcctcctctgatccaaaccttcagaatattccagtacgtaccccattgggccagaaaatccgcaaagcgtttgtagctgaggagggttggcgtttagtggccctcgattatagccaaattgaattacgtgtccttgcccatctttctggcgatgagaacctcatccgcgtgtttcaggaaggccgcgacattcacactcaaacggcaagctggatgtttggagtgtcagcggaagcgatcgatcctttgatgcgtcgtgcagcgaagaccatcaatttcggtgttctctacggtatgagtgcccatcgtttgtcgcaggaattaggcattccctatgaagaagctgcggcgttcattcagcgctactttcaaagctatcccaaagttaaagcatggatcgagaagactctcgaagaaggccgcacacgtggttacgtagagaccttatttggacgtcgccgctatgttcccgatttaaatgctcgcgtgaaatctgtccgtgaagccgccgaacgcatggcgtggaacatgcctgtacagggcacggcagctgacctcatgaaacttgcaatggtgcgcctttttccacaattgcgtgaagttggtgcccgcatgctcttgcaggtccacgatgaactcttgttagaagcgccaaaagagcgtgcggaagaggtggcagccctcgcgaaagaggttatggaaggcgtgtggcccttagcggtgcctcttgaagtcgaagttggtattggcgaggattggttggctgccaaaggataatga

SEQ ID NO: 38 - protein, 841 aa, synthetic construct
  REGION 1..841: note = Variant of DNA polymerase I from Thermus sp. strain 2.9
MHHHHHHGGSGMLPLFEPKGRVLLVDGHHLAYRNFFALKGLTTSRGEPVQGVYGFAKSLLKALKEDGDVVIVVFDAKAPSFRHEAYEAYKAGRAPTPEDFPRQLALMKELVDLLGLERLEVPGFEADDVLATLAKKAEREGYEVHILTADRDLFQLLSPRISVLHPEGHRITPEWLWEKYGLRPEQWVDFRALAGDPSDNIPGVKGIGEKTALKLLKEWGSLENLLKNLDQVKPASVREKILAHLEDLKLSRELSRVRTDLPLEVDFRGRREPDWEGLKAFLERLELGSLLHEFGLLESPLPAEEAPWPPPEGAFLGYRLSRPEPMWAELLALAASAQGRVYRAEDPHGALRGLKEVRGLLAKDLAVVALREGLDLPPTDDPMLLAYLLDPSNTTPEGVARRYGGEWTEDAGERALLAERLHANLLGRLQGEERLLWLYEEVEKPLSRVLAHMEATGVKLDVAYLEALSLEVAAEMRRLEEEVFRLAGHSFNLNSRDQLERVLFDELGLPPIGKTEKTGKRSTSAAVLEALREVHPIVDKILQYRELAKLKGTYIDPLPALVHPKTGRLHTRFNQTATATGRLSSSDPNLQNIPVRTPLGQKIRKAFVAEEGWRLVALDYSQIELRVLAHLSGDENLIRVFQEGRDIHTQTASWMFGVSAEAIDPLMRRAAKTINFGVLYGMSAHRLSQELGIPYEEAAAFIQRYFQSYPKVKAWIEKTLEEGRTRGYVETLFGRRRYVPDLNARVKSVREAAERMAWNMPVQGTAADLMKLAMVRLFPQLREVGARMLLQVHDELLLEAPKERAEEVAALAKEVMEGVWPLAVPLEVEVGIGEDWLAAKG

SEQ ID NO: 39 - DNA, 2529 bp, synthetic construct
  misc_feature 1..2529: note = Variant of DNA polymerase I from Thermus sp. strain 2.9
  source 1..2529: mol_type = other DNA
atgcaccatcatcatcatcatggcggtagcggcatgttaccgttgttcgaacctaaaggtcgcgtgcttctggttgatggccatcatctcgcgtatcgtaacttctttgccctgaaaggattaaccaccagccgtggcgagccggtacagggtgtctacggctttgcaaagtcgctcctgaaagctctgaaagaagacggtgatgtggtgattgttgtctttgatgcgaaagcgccaagttttcgccacgaagcgtacgaagcttacaaagccgggcgtgctccaacgccggaagactttcctcgccaattggcgcttatgaaggaattagtggatttgcttggcctcgaacgcttggaagttcccggtttcgaggcagacgacgtattagcgactctcgcaaagaaagccgaacgtgagggctatgaagtccagatcttgacagcagatcgcgatcttttccagcttttatctccgcgcatttccgtgttacacccggaagggcatcgtatcaccccggaatggctctgggagaaatatggtttgcgtcccgaacaatgggtggattttcgcgccttagcgggcgatccgagcgacaatattccgggagttaaaggtatcggcgagaagacggcgctcaagctccttaaagaatgggggtcgttggagaacttgcttaagaatttagatcaggtcaaaccagcttcagtgcgtgagaagattcttgcacacctcgaagacctcaaattaagccgcgaattggtccgtgtacgcaccgatttgccgctcgaagttgatttccgtggccgccgcgaacctgactgggagggtcttaaagcgtttttagagcgtcttgaactgggttcgctcttgcatgaattcggccttttagaaagcccgttaccagccgaagaagcaccttggccaccgcccgaaggcgcgtttttaggttaccgtttgagtcgcccggaaccgatgtgggccgaattattggctcttgcagcgtctgcccagggacgtgtgtatcgcgcggaagaccctcatggtgcgctccgtggcctcaaagaagtccgtggactccttgccaaagacttagctgttgttgcattgcgcgaaggtcttgatttacctccgactgatgatccaatgcttcttgcgtacctcttggactcgtcaaacacgacgcccgaaggcgtagcccgtcgttacggcggcgagtggaccgaagatgcaggtgagcgcgcgttattggccgaacgtttgcacgccaatttattaggacgtttgcaaggcgaggaacgtctcctctggctttacgaagaagtggagaaaccattgagtcgcgtgctcgcgcatatggaagctaccggtgtcaaattagacgtggcgtatttggaggcactcagccttgaagccgctgccgaaatgcgccgcttggaggaagaagtattccgtttagcaggccactcctttaaccttaattctcgcgatcagttagaacgtgtgttgttcgatgaacttggtctccctcctatcggtaagacagagaagaccggtaaacgtagcacttcagcggcggttttagaagctcttcgcgaagtccatcccattgtggacaagatcttgcagtaccgcgaactcgcgaaattgaaaggcacctatattgaccctcttccggcattagtccacccgaaaacgggacgcctccatacccgcttcaaccaaacagccacggcgaccggtcgtttgtcctcctctgatccaaaccttcagaatattccagtacgtaccccattgggccagaaaatccgcaaagcgtttgtagctgaggagggttggcgtttagtggccctcgattatagccaaattgaattacgtgtccttgcccatctttctggcgatgagaacctcatccgcgtgtttcaggaaggccgcgacattcacactcaaacggcaagctggatgtttggagtgtcatcggaagcgatcgatcctttgatgcgtcgtgcagcgaagaccatcaatttcggtgttctctacggtatgagtgccgcgcgtttgtcgcaggaattaggcattccctatgaagaagctgcggcgttcattcagcgctactttcaaagctatcccaaagttaaagcatggatcgagaagactctcgaagaaggccgcacacgtggttacgtagagaccttatttggacgtcgccgctatgttcccgatttaaatgctcgcgtgaaatctgtccgtgaagccgccgaacgcatggcgtttaacatgcctgtacagggcacggcagctgacctcatgaaacttgcaatggtgcgcctttttccacaattgcgtgaagttggtgcccgcatgctcttgcaggtccacgatgaactcttgttagaagcgccaaaagagcgtgcggaagaggtggcagccctcgcgaaagaggttatggaaggcgtgtggcccttagcggtgcctcttgaagtcgaagttggtattggcgaggattggttggctgccaaaggataatga

SEQ ID NO: 40 - protein, 841 aa, synthetic construct
  REGION 1..841: note = Variant of DNA polymerase I from Thermus sp. strain 2.9
MHHHHHHGGSGMLPLFEPKGRVLLVDGHHLAYRNFFALKGLTTSRGEPVQGVYGFAKSLLKALKEDGDVVIVVFDAKAPSFRHEAYEAYKAGRAPTPEDFPRQLALMKELVDLLGLERLEVPGFEADDVLATLAKKAEREGYEVQILTADRDLFQLLSPRISVLHPEGHRITPEWLWEKYGLRPEQWVDFRALAGDPSDNIPGVKGIGEKTALKLLKEWGSLENLLKNLDQVKPASVREKILAHLEDLKLSRELVRVRTDLPLEVDFRGRREPDWEGLKAFLERLELGSLLHEFGLLESPLPAEEAPWPPPEGAFLGYRLSRPEPMWAELLALAASAQGRVYRAEDPHGALRGLKEVRGLLAKDLAVVALREGLDLPPTDDPMLLAYLLDSSNTTPEGVARRYGGEWTEDAGERALLAERLHANLLGRLQGEERLLWLYEEVEKPLSRVLAHMEATGVKLDVAYLEALSLEAAAEMRRLEEEVFRLAGHSFNLNSRDQLERVLFDELGLPPIGKTEKTGKRSTSAAVLEALREVHPIVDKILQYRELAKLKGTYIDPLPALVHPKTGRLHTRFNQTATATGRLSSSDPNLQNIPVRTPLGQKIRKAFVAEEGWRLVALDYSQIELRVLAHLSGDENLIRVFQEGRDIHTQTASWMFGVSSEAIDPLMRRAAKTINFGVLYGMSAARLSQELGIPYEEAAAFIQRYFQSYPKVKAWIEKTLEEGRTRGYVETLFGRRRYVPDLNARVKSVREAAERMAFNMPVQGTAADLMKLAMVRLFPQLREVGARMLLQVHDELLLEAPKERAEEVAALAKEVMEGVWPLAVPLEVEVGIGEDWLAAKG

SEQ ID NO: 41 - DNA, 2529 bp, synthetic construct
  misc_feature 1..2529: note = Variant of DNA polymerase I from Thermus sp. strain 2.9
  source 1..2529: mol_type = other DNA
atgcaccatcatcatcatcatggcggtagcggcatgttaccgttgttcgaacctaaaggtcgcgtgcttctggttgatggccatcatctcgcgtatcgtaacttctttgccctgaaaggattaaccaccagccgtggcgagccggtacagggtgtctacggctttgcaaagtcgctcctgaaagctctgaaagaagacggtgatgtggtgattgttgtctttgatgcgaaagcgccaagttttcgccacgaagcgtacgaagcttacaaagccgggcgtgctccaacgccggaagactttcctcgccaattggcgcttatgaaggaattagtggatttgcttggcctcgaacgcttggaagttcccggtttcgaggcagacgacgtattagcgactctcgcaaagaaagccgaacgtgagggctatgaagtccatatcttgacagcagatcgcgatcttttccagcttttatctccgcgcatttccgtgttacacccggaagggcatcgtatcaccccggaatggctctgggagaaatatggtttgcgtcccgaacaatgggtggattttcgcgccttagcgggcgatccgagcgacaatattccgggagttaaaggtatcggcgagaagacggcgctcaagctccttaaagaatgggggtcgttggagaacttgcttaagaatttagatcaggtcaaaccagcttcagtgcgtgagaagattcttgcacacctcgaagacctcaaattaagccgcgaattgtcccgtgtacgcaccgatttgccgctcgaagttgatttccgtggccgccgcgaacctgactgggagggtcttaaagcgtttttagagcgtcttgaatttggttcgctcttgcatgaattcggccttttagaaagcccgttaccagccgaagaagcaccttggccaccgcccgaaggcgcgtttttaggttaccgtttgagtcgcccggaaccgatgtgggccgaattattggctcttgcagcgtctgcccagggacgtgtgtatcgcgcggaagaccctcatggtgcgctccgtggcctcaaagaagtccgtggactccttgccaaagacttagctgttgttgcattgcgcgaaggtcttgatttacctccgactgatgatccaatgcttcttgcgtacctcttggactcgtcaaacacgacgcccgaaggcgtagcccgtcgttacggcggcgagtggaccgaagatgcaggtgagcgcgcgttattggccgaacgtttgcacgccaatttattaggacgtttgcaaggcgaggaacgtctcctctggctttacgaagaagtggagaaaccattgagtcgcgtgctcgcgcatatggaagctaccggtgtcaaattagacgtggcgtatttggaggcactcagccttgaagtcgctgccgaaatgcgccgcttggaggaagaagtattccgtttagcaggccactcctttaaccttaattctcgcgatcagttagaacgtgtgttgttcgatgaacttggtctccctcctatcaccaagacagagaagaccggtaaacgtagcacttcagcggcggttttagaagctcttcgcgaagtccatcccattgtggacaagatcttgcagtaccgcgaactcgcgaaattgaaaggcacctatattgaccctcttccggcattagtccacccgaaaacgggacgcctccatacccgcttcaaccaaacagccacggcgaccggtcgtttgtcctcctctgatccaaaccttcagaatattccagtacgtaccccattgggccagaaaatccgcaaagcgtttgtagctgaggagggttggcgtttagtggccctcgattatagccaaattgaattacgtgtccttgcccatctttctggcgatgagaacctcatccgcgtgtttcaggaaggccgcgacattcacactcaaacggcaagctggatgtttggagtgtcagcggaagcgatcgatcctttgatgcgtcgtgcagcgaagaccatcaatttcggtgttctctacggtatgagtgcccatcgtttgtcgcaggaattaggcattccctatgaagaagctgcggcgttcattcagcgctactttcaaagctatcccaaagttaaagcatggatcgagaagactctcgaagaaggccgcacacgtggttacgtagagaccttatttggacgtcgccgctatgttcccgatttaactgctcgcgtgaaatctgtccgtgaagccgccgaacgcatggcgtggaacatgcctgtacagggcacggcagctgacctcatgaaacttgcaatggtgcgcctttttccacaattgcgtgaagttggtgcccgcatgctcttgcaggtccacgatgaactcttgttagaagcgccaaaagagcgtgcggaagaggtggcagccctcgcgaaagaggttatggaaggcgtgtggcccttagcggtgcctcttgaagtcgaagttggtattggcgaggattggttggctgccaaaggataatga

SEQ ID NO: 42 - protein, 841 aa, synthetic construct
  REGION 1..841: note = Variant of DNA polymerase I from Thermus sp. strain 2.9
MHHHHHHGGSGMLPLFEPKGRVLLVDGHHLAYRNFFALKGLTTSRGEPVQGVYGFAKSLLKALKEDGDVVIVVFDAKAPSFRHEAYEAYKAGRAPTPEDFPRQLALMKELVDLLGLERLEVPGFEADDVLATLAKKAEREGYEVHILTADRDLFQLLSPRISVLHPEGHRITPEWLWEKYGLRPEQWVDFRALAGDPSDNIPGVKGIGEKTALKLLKEWGSLENLLKNLDQVKPASVREKILAHLEDLKLSRELSRVRTDLPLEVDFRGRREPDWEGLKAFLERLEFGSLLHEFGLLESPLPAEEAPWPPPEGAFLGYRLSRPEPMWAELLALAASAQGRVYRAEDPHGALRGLKEVRGLLAKDLAVVALREGLDLPPTDDPMLLAYLLDSSNTTPEGVARRYGGEWTEDAGERALLAERLHANLLGRLQGEERLLWLYEEVEKPLSRVLAHMEATGVKLDVAYLEALSLEVAAEMRRLEEEVFRLAGHSFNLNSRDQLERVLFDELGLPPITKTEKTGKRSTSAAVLEALREVHPIVDKILQYRELAKLKGTYIDPLPALVHPKTGRLHTRFNQTATATGRLSSSDPNLQNIPVRTPLGQKIRKAFVAEEGWRLVALDYSQIELRVLAHLSGDENLIRVFQEGRDIHTQTASWMFGVSAEAIDPLMRRAAKTINFGVLYGMSAHRLSQELGIPYEEAAAFIQRYFQSYPKVKAWIEKTLEEGRTRGYVETLFGRRRYVPDLTARVKSVREAAERMAWNMPVQGTAADLMKLAMVRLFPQLREVGARMLLQVHDELLLEAPKERAEEVAALAKEVMEGVWPLAVPLEVEVGIGEDWLAAKG

SEQ ID NO: 43 - DNA, 2529 bp, synthetic construct
  misc_feature 1..2529: note = Variant of DNA polymerase I from Thermus sp. strain 2.9
  source 1..2529: mol_type = other DNA
atgcaccatcatcatcatcatggcggtagcggcatgttaccgttgttcgaacctaaaggtcgcgtgcttctggttgatggccatcatctcgcgtatcgtaacttctttgccctgaaaggattaaccaccagccgtggcgagccggtacagggtgtctacggctttgcaaagtcgctcctgaaagctctgaaagaagacggtgatgtggtgattgttgtctttgatgcgaaagcgccaagttttcgccacgaagcgtacgaagcttacaaagccgggcgtgctccaacgccggaagactttcctcgccaattggcgcttatgaaggaattagtggatttgcttggcctcgaacgcttggaagttcccggtttcgaggcagacgacgtattagcgactctcgcaaagaaagccgaacgtgagggctatgaagtccagatcttgacagcagatcgcgatcttttccagcttttatctccgcgcatttccgtgttacacccggaagggcatcgtatcaccccggaatggctctgggagaaatatggtttgcgtcccgaacaatgggtggattttcgcgccttagcgggcgatccgagcgacaatattccgggagttaaaggtatcggcgagaagacggcgctcaagctccttaaagaatgggggtcgttggagaacttgcttaagaatttagatcaggtcaaaccagcttcagtgcgtgagaagattcttgcacacctcgaagacctcaaattaagccgcgaattggtccgtgtacgcaccgatttgccgctcgaagttgatttccgtggccgccgcgaacctgactgggagggtcttaaagcgtttttagagcgtcttgaatttggttcgctcttgcatgaattcggccttttagaaagcccgttaccagccgaagaagcaccttggccaccgcccgaaggcgcgtttttaggttaccgtttgagtcgcccggaaccgatgtgggccgaattattggctcttgcagcgtctgcccagggacgtgtgtatcgcgcggaagaccctcatggtgcgctccgtggcctcaaagaagtccgtggactccttgccaaagacttagctgttgttgcattgcgcgaaggtcttgatttacctccgactgatgatccaatgcttcttgcgtacctcttggacccgtcaaacacgacgcccgaaggcgtagcccgtcgttacggcggcgagtggaccgaagatgcaggtgagcgcgcgttattggccgaacgtttgcacgccaatttattaggacgtttgcaaggcgaggaacgtctcctctggctttacgaagaagtggagaaaccattgagtcgcgtgctcgcgcatatggaagctaccggtgtcaaattagacgtggcgtatttggaggcactcagccttgaagttgctgccgaaatgcgccgcttggaggaagaagtattccgtttagcaggccactcctttaaccttaattctcgcgatcagttagaacgtgtgttgttcgatgaacttggtctccctcctatcggtaagacagagaagaccggtaaacgtagcacttcagcggcggttttagaagctcttcgcgaagtccatcccattgtggacaagatcttgcagtaccgcgaactcgcgaaattgaaaggcacctatattgaccctcttccggcattagtccacccgaaaacgggacgcctccatacccgcttcaaccaaacagccacggcgaccggtcgtttgtcctcctctgatccaaaccttcagaatattccagtacgtaccccattgggccagcatatccgcaaagcgtttgtagctgaggagggttggcgtttagtggccctcgattatagccaaattgaattacgtgtccttgcccatctttctggcgatgagaacctcatccgcgtgtttcaggaaggccgcgacattcacactcaaacggcaagctggatgtttggattatcagctgaagcgatcgatcctttgatgcgtcgtgcagcgaagaccatcaatttcggtgttctctacggtatgagtgcccatcgtttgtcgcaggaattaggcattccctatgaagaagctgcggcgttcattcagcgctactttcaaagctatcccaaagttaaagcatggatcgagaagactctcgaagaaggccgcacacgtggttacgtagagaccttatttggacgtcgccgctatgttcccgatttaaacgctcgcgtgaaatctgtccgtgaagccgccgaacgcatggcgttcaacatgcctgtacagggcacggcagctgacctcatgaaacttgcaatggtgcgcctttttccacaattgcgtgaagttggtgcccgcatgctcttgcaggtccacgatgaactcttgttagaagcgccaaaagagcgtgcggaagaggtggcagccctcgcgaaagaggttatggaaggcgtgtggcccttagcggtgcctcttgaagtcgaagttggtattggcgaggattggttggctgccaaaggataatga

SEQ ID NO: 44 - protein, 841 aa, synthetic construct
  REGION 1..841: note = Variant of DNA polymerase I from Thermus sp. strain 2.9
MHHHHHHGGSGMLPLFEPKGRVLLVDGHHLAYRNFFALKGLTTSRGEPVQGVYGFAKSLLKALKEDGDVVIVVFDAKAPSFRHEAYEAYKAGRAPTPEDFPRQLALMKELVDLLGLERLEVPGFEADDVLATLAKKAEREGYEVQILTADRDLFQLLSPRISVLHPEGHRITPEWLWEKYGLRPEQWVDFRALAGDPSDNIPGVKGIGEKTALKLLKEWGSLENLLKNLDQVKPASVREKILAHLEDLKLSRELVRVRTDLPLEVDFRGRREPDWEGLKAFLERLEFGSLLHEFGLLESPLPAEEAPWPPPEGAFLGYRLSRPEPMWAELLALAASAQGRVYRAEDPHGALRGLKEVRGLLAKDLAVVALREGLDLPPTDDPMLLAYLLDPSNTTPEGVARRYGGEWTEDAGERALLAERLHANLLGRLQGEERLLWLYEEVEKPLSRVLAHMEATGVKLDVAYLEALSLEVAAEMRRLEEEVFRLAGHSFNLNSRDQLERVLFDELGLPPIGKTEKTGKRSTSAAVLEALREVHPIVDKILQYRELAKLKGTYIDPLPALVHPKTGRLHTRFNQTATATGRLSSSDPNLQNIPVRTPLGQHIRKAFVAEEGWRLVALDYSQIELRVLAHLSGDENLIRVFQEGRDIHTQTASWMFGLSAEAIDPLMRRAAKTINFGVLYGMSAHRLSQELGIPYEEAAAFIQRYFQSYPKVKAWIEKTLEEGRTRGYVETLFGRRRYVPDLNARVKSVREAAERMAFNMPVQGTAADLMKLAMVRLFPQLREVGARMLLQVHDELLLEAPKERAEEVAALAKEVMEGVWPLAVPLEVEVGIGEDWLAAKG

SEQ ID NO: 45 - DNA, 2529 bp, synthetic construct
  misc_feature 1..2529: note = Variant of DNA polymerase I from Thermus sp. strain 2.9
  source 1..2529: mol_type = other DNA
atgcaccatcatcatcatcatggcggtagcggcatgttaccgttgttcgaacctaaaggtcgcgtgcttctggttgatggccatcatctcgcgtatcgtaacttctttgccctgaaaggattaaccaccagccgtggcgagccggtacagggtgtctacggctttgcaaagtcgctcctgaaagctctgaaagaagacggtgatgtggtgattgttgtctttgatgcgaaagcgccaagttttcgccacgaagcgtacgaagcttacaaagccgggcgtgctccaacgccggaagactttcctcgccaattggcgcttatgaaggaattagtggatttgcttggcctcgaacgcttggaagttcccggtttcgaggcagacgacgtattagcgactctcgcaaagaaagccgaacgtgagggctatgaagtccatatcttgacagcagatcgcgatcttttccagcttttatctccgcgcatttccgtgttacacccggaagggcatcgtatcaccccggaatggctctgggagaaatatggtttgcgtcccgaacaatgggtggattttcgcgccttagcgggcgatccgagcgacaatattccgggagttaaaggtatcggcgagaagacggcgctcaagctccttaaagaatgggggtcgttggagaacttgcttaagaatttagatcaggtcaaaccagcttcagtgcgtgagaagattcttgcacacctcgaagacctcaaattaagccgcgaattggtccgtgtacgcaccgatttgccgctcgaagttgatttccgtggccgccgcgaacctgactgggagggtcttaaagcgtttttagagcgtcttgaatttggttcgctcttgcatgaattcggccttttagaaagcccgttaccagccgaagaagcaccttggccaccgcccgaaggcgcgtttttaggttaccgtttgagtcgcccggaaccgatgtgggccgaattattggctcttgcagcgtctgcccagggacgtgtgtatcgcgcggaagaccctcatggtgcgctccgtggcctcaaagaagtccgtggactccttgccaaagacttagctgttgttgcattgcgcgaaggtcttgatttacctccgactgatgatccaatgcttcttgcgtacctcttggacccgtcaaacacgacgcccgaaggcgtagcccgtcgttacggcggcgagtggaccgaagatgcaggtgagcgcgcgttattggccgaacgtttgcacgccaatttattaggacgtttgcaaggcgaggaacgtctcctctggctttacgaagaagtggagaaaccattgagtcgcgtgctcgcgcatatggaagctaccggtgtcaaattagacgtggcgtatttggaggcactcagccttgaagttgctgccgaaatgcgccgcttggaggaagaagtattccgtttagcaggccactcctttaaccttaattctcgcgatcagttagaacgtgtgttgttcgatgaacttggtctccctcctatcaccaagacagagaagaccggtaaacgtagcacttcagcggcggttttagaagctcttcgcgaagtccatcccattgtggacaagatcttgcagtaccgcgaactcgcgaaattgaaaggcacctatattgaccctcttccggcattagtccacccgaaaacgggacgcctccatacccgcttcaaccaaacagccacggcgaccggtcgtttgtcctcctctgatccaaaccttcagaatattccagtacgtaccccattgggccagaagatccgcaaagcgtttgtagctgaggagggttggcgtttagtggccctcgattatagccaaattgaattacgtgtccttgcccatctttctggcgatgagaacctcatccgcgtgtttcaggaaggccgcgacattcacactcaaacggcaagctggatgtttggattatcagctgaagcgatcgatcctttgatgcgtcgtgcagcgaagaccatcaatttcggtgttctctacggtatgagtgcccatcgtttgtcgcaggaattaggcattccctatgaagaagctgcggcgttcattcagcgctactttcaaagctatcccaaagttaaagcatggatcgagaagactctcgaagaaggccgcacacgtggttacgtagagaccttatttggacgtcgccgctatgttcccgatttaaacgctcgcgtgaaatctgtccgtgaagccgccgaacgcatggcgttcaacatgcctgtacagggcacggcagctgacctcatgaaacttgcaatggtgcgcctttttccacaattgcgtgaagttggtgcccgcatgctcttgcaggtccacgatgaactcttgttagaagcgccaaaagagcgtgcggaagaggtggcagccctcgcgaaagaggttatggaaggcgtgtggcccttagcggtgcctcttgaagtcgaagttggtattggcgaggattggttggctgccaaaggataatga

SEQ ID NO: 46 - protein, 841 aa, synthetic construct
  REGION 1..841: note = Variant of DNA polymerase I from Thermus sp. strain 2.9
MHHHHHHGGSGMLPLFEPKGRVLLVDGHHLAYRNFFALKGLTTSRGEPVQGVYGFAKSLLKALKEDGDVVIVVFDAKAPSFRHEAYEAYKAGRAPTPEDFPRQLALMKELVDLLGLERLEVPGFEADDVLATLAKKAEREGYEVHILTADRDLFQLLSPRISVLHPEGHRITPEWLWEKYGLRPEQWVDFRALAGDPSDNIPGVKGIGEKTALKLLKEWGSLENLLKNLDQVKPASVREKILAHLEDLKLSRELVRVRTDLPLEVDFRGRREPDWEGLKAFLERLEFGSLLHEFGLLESPLPAEEAPWPPPEGAFLGYRLSRPEPMWAELLALAASAQGRVYRAEDPHGALRGLKEVRGLLAKDLAVVALREGLDLPPTDDPMLLAYLLDPSNTTPEGVARRYGGEWTEDAGERALLAERLHANLLGRLQGEERLLWLYEEVEKPLSRVLAHMEATGVKLDVAYLEALSLEVAAEMRRLEEEVFRLAGHSFNLNSRDQLERVLFDELGLPPITKTEKTGKRSTSAAVLEALREVHPIVDKILQYRELAKLKGTYIDPLPALVHPKTGRLHTRFNQTATATGRLSSSDPNLQNIPVRTPLGQKIRKAFVAEEGWRLVALDYSQIELRVLAHLSGDENLIRVFQEGRDIHTQTASWMFGLSAEAIDPLMRRAAKTINFGVLYGMSAHRLSQELGIPYEEAAAFIQRYFQSYPKVKAWIEKTLEEGRTRGYVETLFGRRRYVPDLNARVKSVREAAERMAFNMPVQGTAADLMKLAMVRLFPQLREVGARMLLQVHDELLLEAPKERAEEVAALAKEVMEGVWPLAVPLEVEVGIGEDWLAAKG

SEQ ID NO: 47 - DNA, 2529 bp, synthetic construct
  misc_feature 1..2529: note = Variant of DNA polymerase I from Thermus sp. strain 2.9
  source 1..2529: mol_type = other DNA
atgcaccatcatcatcatcatggcggtagcggcatgttaccgttgttcgaacctaaaggtcgcgtgcttctggttgatggccatcatctcgcgtatcgtaacttctttgccctgaaaggattaaccaccagccgtggcgagccggtacagggtgtctacggctttgcaaagtcgctcctgaaagctctgaaagaagacggtgatgtggtgattgttgtctttgatgcgaaagcgccaagttttcgccacgaagcgtacgaagcttacaaagccgggcgtgctccaacgccggaagactttcctcgccaattggcgcttatgaaggaattagtggatttgcttggcctcgaacgcttggaagttcccggtttcgaggcagacgacgtattagcgactctcgcaaagaaagccgaacgtgagggctatgaagtccatatcttgacagcagatcgcgatcttttccagcttttatctccgcgcatttccgtgttacacccggaagggcatcgtatcaccccggaatggctctgggagaaatatggtttgcgtcccgaacaatgggtggattttcgcgccttagcgggcgatccgagcgacaatattccgggagttaaaggtatcggcgagaagacggcgctcaagctccttaaagaatgggggtcgttggagaacttgcttaagaatttagatcaggtcaaaccagcttcagtgcgtgagaagattcttgcacacctcgaagacctcaaattaagccgcgaattgtcgcgtgtacgcaccgatttgccgctcgaagttgatttccgtggccgccgcgaacctgactgggagggtcttaaagcgtttttagagcgtcttgaatttggttcgctcttgcatgaattcggccttttagaaagcccgttaccagccgaagaagcaccttggccaccgcccgaaggcgcgtttttaggttaccgtttgagtcgcccggaaccgatgtgggccgaattattggctcttgcagcgtctgcccagggacgtgtgtatcgcgcggaagaccctcatggtgcgctccgtggcctcaaagaagtccgtggactccttgccaaagacttagctgttgttgcattgcgcgaaggtcttgatttacctccgactgatgatccaatgcttcttgcgtacctcttggactcgtcaaacacgacgcccgaaggcgtagcccgtcgttacggcggcgagtggaccgaagatgcaggtgagcgcgcgttattggccgaacgtttgcacgccaatttattaggacgtttgcaaggcgaggaacgtctcctctggctttacgaagaagtggagaaaccattgagtcgcgtgctcgcgcatatggaagctaccggtgtcaaattagacgtggcgtatttggaggcactcagccttgaagccgctgccgaactgcgccgcttggaggaagaagtattccgtttagcaggccactcctttaaccttaattctcgcgatcagttagaacgtgtgttgttcgatgaacttggtctccctcctatcggtaagacagagaagaccggtaaacgtagcacttcagcggcggttttagaagctcttcgcgaagtccatcccattgtggacaagatcttgcagtaccgcgaactcgcgaaattgaaaggcacctatattgaccctcttccggcattagtccacccgaaaacgggacgcctccatacccgcttcaaccaaacagccacggcgaccggtcgtttgtcctcctctgatccaaaccttcagaatattccagtacgtaccccattgggccagaagatccgcaaagcgtttgtagctgaggagggttggcgtttagtggccctcgattatagccaaattgaattacgtgtccttgcccatctttctggcgatgagaacctcatccgcgtgtttcaggaaggccgcgacattcacactcaaacggcaagctggatgtttggagtgtcagcggaagcgatcgatcctttgatgcgtcgtgcagcgaagaccatcaatttcggtgttctctacggtatgagtgccgcgcgtttgtcgcaggaattaggcattccctatgaagaagctgcggcgttcattcagcgctactttcaaagctatcccaaagttaaagcatggatcgagaagactctcgaagaaggccgcacacgtggttacgtagagaccttatttggacgtcgccgctatgttcccgatttaaacgctcgcgtgaaatctgtccgtgaagccgccgaacgcatggcgtggaacatgcctgtacagggcacggcagctgacctcatgaaacttgcaatggtgcgcctttttccacaattgcgtgaagttggtgcccgcatgctcttgcaggtccacgatgaactcttgttagaagcgccaaaagagcgtgcggaagaggtggcagccctcgcgaaagaggttatggaaggcgtgtggcccttagcggtgcctcttgaagtcgaagttggtattggcgaggattggttggctgccaaaggataatga

SEQ ID NO: 48 - protein, 841 aa, synthetic construct
  REGION 1..841: note = Variant of DNA polymerase I from Thermus sp. strain 2.9
MHHHHHHGGSGMLPLFEPKGRVLLVDGHHLAYRNFFALKGLTTSRGEPVQGVYGFAKSLLKALKEDGDVVIVVFDAKAPSFRHEAYEAYKAGRAPTPEDFPRQLALMKELVDLLGLERLEVPGFEADDVLATLAKKAEREGYEVHILTADRDLFQLLSPRISVLHPEGHRITPEWLWEKYGLRPEQWVDFRALAGDPSDNIPGVKGIGEKTALKLLKEWGSLENLLKNLDQVKPASVREKILAHLEDLKLSRELSRVRTDLPLEVDFRGRREPDWEGLKAFLERLEFGSLLHEFGLLESPLPAEEAPWPPPEGAFLGYRLSRPEPMWAELLALAASAQGRVYRAEDPHGALRGLKEVRGLLAKDLAVVALREGLDLPPTDDPMLLAYLLDSSNTTPEGVARRYGGEWTEDAGERALLAERLHANLLGRLQGEERLLWLYEEVEKPLSRVLAHMEATGVKLDVAYLEALSLEAAAELRRLEEEVFRLAGHSFNLNSRDQLERVLFDELGLPPIGKTEKTGKRSTSAAVLEALREVHPIVDKILQYRELAKLKGTYIDPLPALVHPKTGRLHTRFNQTATATGRLSSSDPNLQNIPVRTPLGQKIRKAFVAEEGWRLVALDYSQIELRVLAHLSGDENLIRVFQEGRDIHTQTASWMFGVSAEAIDPLMRRAAKTINFGVLYGMSAARLSQELGIPYEEAAAFIQRYFQSYPKVKAWIEKTLEEGRTRGYVETLFGRRRYVPDLNARVKSVREAAERMAWNMPVQGTAADLMKLAMVRLFPQLREVGARMLLQVHDELLLEAPKERAEEVAALAKEVMEGVWPLAVPLEVEVGIGEDWLAAKG

SEQ ID NO: 49 - DNA, 2529 bp, synthetic construct
  misc_feature 1..2529: note = Variant of DNA polymerase I from Thermus sp. strain 2.9
  source 1..2529: mol_type = other DNA
atgcaccatcatcatcatcatggcggtagcggcatgttaccgttgttcgaacctaaaggtcgcgtgcttctggttgatggccatcatctcgcgtatcgtaacttctttgccctgaaaggattaaccaccagccgtggcgagccggtacagggtgtctacggctttgcaaagtcgctcctgaaagctctgaaagaagacggtgatgtggtgattgttgtctttgatgcgaaagcgccaagttttcgccacgaagcgtacgaagcttacaaagccgggcgtgctccaacgccggaagactttcctcgccaattggcgcttatgaaggaattagtggatttgcttggcctcgaacgcttggaagttcccggtttcgaggcagacgacgtattagcgactctcgcaaagaaagccgaacgtgagggctatgaagtccatatcttgacagcagatcgcgatcttttccagcttttatctccgcgcatttccgtgttacacccggaagggcatcgtatcaccccggaatggctctgggagaaatatggtttgcgtcccgaacaatgggtggattttcgcgccttagcgggcgatccgagcgacaatattccgggagttaaaggtatcggcgagaagacggcgctcaagctccttaaagaatgggggtcgttggagaacttgcttaagaatttagatcaggtcaaaccagcttcagtgcgtgagaagattcttgcacacctcgaagacctcaaattaagccgcgaattggtccgtgtacgcaccgatttgccgctcgaagttgatttccgtggccgccgcgaacctgactgggagggtcttaaagcgtttttagagcgtcttgaatttggttcgctcttgcatgaattcggccttttagaaagcccgttaccagccgaagaagcaccttggccaccgcccgaaggcgcgtttttaggttaccgtttgagtcgcccggaaccgatgtgggccgaattattggctcttgcagcgtctgcccagggacgtgtgtatcgcgcggaagaccctcatggtgcgctccgtggcctcaaagaagtccgtggactccttgccaaagacttagctgttgttgcattgcgcgaaggtcttgatttacctccgactgatgatccaatgcttcttgcgtacctcttggactcgtcaaacacgacgcccgaaggcgtagcccgtcgttacggcggcgagtggaccgaagatgcaggtgagcgcgcgttattggccgaacgtttgcacgccaatttattaggacgtttgcaaggcgaggaacgtctcctctggctttacgaagaagtggagaaaccattgagtcgcgtgctcgcgcatatggaagctaccggtgtcaaattagacgtggcgtatttggaggcactcagccttgaagccgctgccgaaatgcgccgcttggaggaagaagtattccgtttagcaggccactcctttaaccttaattctcgcgatcagttagaacgtgtgttgttcgatgaacttggtctccctcctatcggcaagacagagaagaccggtaaacgtagcacttcagcggcggttttagaagctcttcgcgaagtccatcccattgtggacaagatcttgcagtaccgcgaactcgcgaaattgaaaggcacctatattgaccgtcttccggcattagtccacccgaaaacgggacgcctccatacccgcttcaaccaaacagccacggcgaccggtcgtttgtcctcctctgatccaaaccttcagaatattccagtacgtaccccattgggccagaaaatccgcaaagcgtttgtagctgaggagggttggcgtttagtggccctcgattatagccaaattgaattacgtgtccttgcccatctttctggcgatgagaacctcatccgcgtgtttcaggaaggccgcgacattcacactcaaacggcaagctggatgtttggattatcagctgaagcgatcgatcctttgatgcgtcgtgcagcgaagaccatcaatttcggtgttctctacggtatgagtgccgcgcgtttgtcgcaggaattaggcattccctatgaagaagctgcggcgttcattcagcgctactttcaaagctatcccaaagttaaagcatggatcgagaagactctcgaagaaggccgcacacgtggttacgtagagaccttatttggacgtcgccgctatgttcccgatttaaatgctcgcgtgaaatctgtccgtgaagccgccgaacgcatggcgttcaacatgcctgtacagggcacggcagctgacctcatgaaacttgcaatggtgcgcctttttccacaattgcgtgaagttggtgcccgcatgctcttgcaggtccacgatgaactcttgttagaagcgccaaaagagcgtgcggaagaggtggcagccctcgcgaaagaggttatggaaggcgtgtggcccttagcggtgcctcttgaagtcgaagttggtattggcgaggattggttggctgccaaaggataatga

SEQ ID NO: 50 - protein, 841 aa, synthetic construct
  REGION 1..841: note = Variant of DNA polymerase I from Thermus sp. strain 2.9
MHHHHHHGGSGMLPLFEPKGRVLLVDGHHLAYRNFFALKGLTTSRGEPVQGVYGFAKSLLKALKEDGDVVIVVFDAKAPSFRHEAYEAYKAGRAPTPEDFPRQLALMKELVDLLGLERLEVPGFEADDVLATLAKKAEREGYEVHILTADRDLFQLLSPRISVLHPEGHRITPEWLWEKYGLRPEQWVDFRALAGDPSDNIPGVKGIGEKTALKLLKEWGSLENLLKNLDQVKPASVREKILAHLEDLKLSRELVRVRTDLPLEVDFRGRREPDWEGLKAFLERLEFGSLLHEFGLLESPLPAEEAPWPPPEGAFLGYRLSRPEPMWAELLALAASAQGRVYRAEDPHGALRGLKEVRGLLAKDLAVVALREGLDLPPTDDPMLLAYLLDSSNTTPEGVARRYGGEWTEDAGERALLAERLHANLLGRLQGEERLLWLYEEVEKPLSRVLAHMEATGVKLDVAYLEALSLEAAAEMRRLEEEVFRLAGHSFNLNSRDQLERVLFDELGLPPIGKTEKTGKRSTSAAVLEALREVHPIVDKILQYRELAKLKGTYIDRLPALVHPKTGRLHTRFNQTATATGRLSSSDPNLQNIPVRTPLGQKIRKAFVAEEGWRLVALDYSQIELRVLAHLSGDENLIRVFQEGRDIHTQTASWMFGLSAEAIDPLMRRAAKTINFGVLYGMSAARLSQELGIPYEEAAAFIQRYFQSYPKVKAWIEKTLEEGRTRGYVETLFGRRRYVPDLNARVKSVREAAERMAFNMPVQGTAADLMKLAMVRLFPQLREVGARMLLQVHDELLLEAPKERAEEVAALAKEVMEGVWPLAVPLEVEVGIGEDWLAAKG

SEQ ID NO: 51 - DNA, 2529 bp, synthetic construct
  misc_feature 1..2529: note = Variant of DNA polymerase I from Thermus sp. strain 2.9
  source 1..2529: mol_type = other DNA
atgcaccatcatcatcatcatggcggtagcggcatgttaccgttgttcgaacctaaaggtcgcgtgcttctggttgatggccatcatctcgcgtatcgtaacttctttgccctgaaaggattaaccaccagccgtggcgagccggtacagggtgtctacggctttgcaaagtcgctcctgaaagctctgaaagaagacggtgatgtggtgattgttgtctttgatgcgaaagcgccaagttttcgccacgaagcgtacgaagcttacaaagccgggcgtgctccaacgccggaagactttcctcgccaattggcgcttatgaaggaattagtggatttgcttggcctcgaacgcttggaagttcccggtttcgaggcagacgacgtattagcgactctcgcaaagaaagccgaacgtgagggctatgaagtccatatcttgacagcagatcgcgatcttttccagcttttatctccgcgcatttccgtgttacacccggaagggcatcgtatcaccccggaatggctctgggagaaatatggtttgcgtcccgaacaatgggtggattttcgcgccttagcgggcgatccgagcgacaatattccgggagttaaaggtatcggcgagaagacggcgctcaagctccttaaagaatgggggtcgttggagaacttgcttaagaatttagatcaggtcaaaccagcttcagtgcgtgagaagattcttgcacacctcgaagacctcaaattaagccgcgaattgtcccgtgtacgcaccgatttgccgctcgaagttgatttccgtggccgccgcgaacctgactgggagggtcttaaagcgtttttagagcgtcttgaatttggttcgctcttgcatgaattcggccttttagaaagcccgttaccagccgaagaagcaccttggccaccgcccgaaggcgcgtttttaggttaccgtttgagtcgcccggaaccgatgtgggccgaattattggctcttgcagcgtctgcccagggacgtgtgtatcgcgcggaagaccctcatggtgcgctccgtggcctcaaagaagtccgtggactccttgccaaagacttagctgttgttgcattgcgcgaaggtcttgatttacctccgactgatgatccaatgcttcttgcgtacctcttggacccgtcaaacacgacgcccgaaggcgtagcccgtcgttacggcggcgagtggaccgaagatgcaggtgagcgcgcgttattggccgaacgtttgcacgccaatttattaggacgtttgcaaggcgaggaacgtctcctctggctttacgaagaagtggagaaaccattgagtcgcgtgctcgcgcatatggaagctaccggtgtcaaattagacgtggcgtatttggaggcactcagccttgaagtcgctgccgaaatgcgccgcttggaggaagaagtattccgtttagcaggccactcctttaaccttaattctcgcgatcagttagaacgtgtgttgttcgatgaacttggtctccctcctatcggcaagacagagaagaccggtaaacgtagcacttcagcggcggttttagaagctcttcgcgaagtccatcccattgtggacaagatcttgcagtaccgcgaactcgcgaaattgaaaggcacctatattgaccgtcttccggcattagtccacccgaaaacgggacgcctccatacccgcttcaaccaaacagccacggcgaccggtcgtttgtcctcctctgatccaaaccttcagaatattccagtacgtaccccattgggccagaaaatccgcaaagcgtttgtagctgaggagggttggcgtttagtggccctcgattatagccaaattgaattacgtgtccttgcccatctttctggcgatgagaacctcatccgcgtgtttcaggaaggccgcgacattcacactcaaacggcaagctggatgtttggattatcagctgaagcgatcgatcctttgatgcgtcgtgcagcgaagaccatcaatttcggtgttctctacggtatgagtgccgcgcgtttgtcgcaggaattaggcattccctatgaagaagctgcggcgttcattcagcgctactttcaaagctatcccaaagttaaagcatggatcgagaagactctcgaagaaggccgcacacgtggttacgtagagaccttatttggacgtcgccgctatgttcccgatttaaatgctcgcgtgaaatctgtccgtgaagccgccgaacgcatggcgtggaacatgcctgtacagggcacggcagctgacctcatgaaacttgcaatggtgcgcctttttccacaattgcgtgaagttggtgcccgcatgctcttgcaggtccacgatgaactcttgttagaagcgccaaaagagcgtgcggaagaggtggcagccctcgcgaaagaggttatggaaggcgtgtggcccttagcggtgcctcttgaagtcgaagttggtattggcgaggattggttggctgccaaaggataatga

SEQ ID NO: 52 - protein, 841 aa, synthetic construct
  REGION 1..841: note = Variant of DNA polymerase I from Thermus sp. strain 2.9
MHHHHHHGGSGMLPLFEPKGRVLLVDGHHLAYRNFFALKGLTTSRGEPVQGVYGFAKSLLKALKEDGDVVIVVFDAKAPSFRHEAYEAYKAGRAPTPEDFPRQLALMKELVDLLGLERLEVPGFEADDVLATLAKKAEREGYEVHILTADRDLFQLLSPRISVLHPEGHRITPEWLWEKYGLRPEQWVDFRALAGDPSDNIPGVKGIGEKTALKLLKEWGSLENLLKNLDQVKPASVREKILAHLEDLKLSRELSRVRTDLPLEVDFRGRREPDWEGLKAFLERLEFGSLLHEFGLLESPLPAEEAPWPPPEGAFLGYRLSRPEPMWAELLALAASAQGRVYRAEDPHGALRGLKEVRGLLAKDLAVVALREGLDLPPTDDPMLLAYLLDPSNTTPEGVARRYGGEWTEDAGERALLAERLHANLLGRLQGEERLLWLYEEVEKPLSRVLAHMEATGVKLDVAYLEALSLEVAAEMRRLEEEVFRLAGHSFNLNSRDQLERVLFDELGLPPIGKTEKTGKRSTSAAVLEALREVHPIVDKILQYRELAKLKGTYIDRLPALVHPKTGRLHTRFNQTATATGRLSSSDPNLQNIPVRTPLGQKIRKAFVAEEGWRLVALDYSQIELRVLAHLSGDENLIRVFQEGRDIHTQTASWMFGLSAEAIDPLMRRAAKTINFGVLYGMSAARLSQELGIPYEEAAAFIQRYFQSYPKVKAWIEKTLEEGRTRGYVETLFGRRRYVPDLNARVKSVREAAERMAWNMPVQGTAADLMKLAMVRLFPQLREVGARMLLQVHDELLLEAPKERAEEVAALAKEVMEGVWPLAVPLEVEVGIGEDWLAAKG

SEQ ID NO: 53 - DNA, 2529 bp, synthetic construct
  misc_feature 1..2529: note = Variant of DNA polymerase I from Thermus sp. strain 2.9
  source 1..2529: mol_type = other DNA
atgcaccatcatcatcatcatggcggtagcggcatgttaccgttgttcgaacctaaaggtcgcgtgcttctggttgatggccatcatctcgcgtatcgtaacttctttgccctgaaaggattaaccaccagccgtggcgagccggtacagggtgtctacggctttgcaaagtcgctcctgaaagctctgaaagaagacggtgatgtggtgattgttgtctttgatgcgaaagcgccaagttttcgccacgaagcgtacgaagcttacaaagccgggcgtgctccaacgccggaagactttcctcgccaattggcgcttatgaaggaattagtggatttgcttggcctcgaacgcttggaagttcccggtttcgaggcagacgacgtattagcgactctcgcaaagaaagccgaacgtgagggctatgaagtccatatcttgacagcagatcgcgatcttttccagcttttatctccgcgcatttccgtgttacacccggaagggcatcgtatcaccccggaatggctctgggagaaatatggtttgcgtcccgaacaatgggtggattttcgcgccttagcgggcgatccgagcgacaatattccgggagttaaaggtatcggcgagaagacggcgctcaagctccttaaagaatgggggtcgttggagaacttgcttaagaatttagatcaggtcaaaccagcttcagtgcgtgagaagattcttgcacacctcgaagacctcaaattaagccgcgaattgtcgcgtgtacgcaccgatttgccgctcgaagttgatttccgtggccgccgcgaacctgactgggagggtcttaaagcgtttttagagcgtcttgaatttggttcgctcttgcatgaattcggccttttagaaagcccgttaccagccgaagaagcaccttggccaccgcccgaaggcgcgtttttaggttaccgtttgagtcgcccggaaccgatgtgggccgaattattggctcttgcagcgtctgcccagggacgtgtgtatcgcgcggaagaccctcatggtgcgctccgtggcctcaaagaagtccgtggactccttgccaaagacttagctgttgttgcattgcgcgaaggtcttgatttacctccgactgatgatccaatgcttcttgcgtacctcttggactcgtcaaacacgacgcccgaaggcgtagcccgtcgttacggcggcgagtggaccgaagatgcaggtgagcgcgcgttattggccgaacgtttgcacgccaatttattaggacgtttgcaaggcgaggaacgtctcctctggctttacgaagaagtggagaaaccattgagtcgcgtgctcgcgcatatggaagctaccggtgtcaaattagacgtggcgtatttggaggcactcagccttgaagtcgctgccgaaatgcgccgcttggaggaagaagtattccgtttagcaggccactcctttaaccttaattctcgcgatcagttagaacgtgtgttgttcgatgaacttggtctccctcctatcaccaagacagagaagaccggtaaacgtagcacttcagcggcggttttagaagctcttcgcgaagtccatcccattgtggacaagatcttgcagtaccgcgaactcgcgaaattgaaaggcacctatattgaccgtcttccggcattagtccacccgaaaacgggacgcctccatacccgcttcaaccaaacagccacggcgaccggtcgtttgtcctcctctgatccaaaccttcagaatattccagtacgtaccccattgggccagaaaatccgcaaagcgtttgtagctgaggagggttggcgtttagtggccctcgattatagccaaattgaattacgtgtccttgcccatctttctggcgatgagaacctcatccgcgtgtttcaggaaggccgcgacattcacactcaaacggcaagctggatgtttggagtgtcagcggaagcgatcgatcctttgatgcgtcgtgcagcgaagaccatcaatttcggtgttctctacggtatgagtgccgcgcgtttgtcgcaggaattaggcattccctatgaagaagctgcggcgttcattcagcgctactttcaaagctatcccaaagttaaagcatggatcgagaagactctcgaagaaggccgcacacgtggttacgtagagaccttatttggacgtcgccgctatgttcccgatttaaatgctcgcgtgaaatctgtccgtgaagccgccgaacgcatggcgttcaacatgcctgtacagggcacggcagctgacctcatgaaacttgcaatggtgcgcctttttccacaattgcgtgaagttggtgcccgcatgctcttgcaggtccacgatgaactcttgttagaagcgccaaaagagcgtgcggaagaggtggcagccctcgcgaaagaggttatggaaggcgtgtggcccttagcggtgcctcttgaagtcgaagttggtattggcgaggattggttggctgccaaaggataatga

SEQ ID NO: 54 - protein, 841 aa, synthetic construct
  REGION 1..841: note = Variant of DNA polymerase I from Thermus sp. strain 2.9
MHHHHHHGGSGMLPLFEPKGRVLLVDGHHLAYRNFFALKGLTTSRGEPVQGVYGFAKSLLKALKEDGDVVIVVFDAKAPSFRHEAYEAYKAGRAPTPEDFPRQLALMKELVDLLGLERLEVPGFEADDVLATLAKKAEREGYEVHILTADRDLFQLLSPRISVLHPEGHRITPEWLWEKYGLRPEQWVDFRALAGDPSDNIPGVKGIGEKTALKLLKEWGSLENLLKNLDQVKPASVREKILAHLEDLKLSRELSRVRTDLPLEVDFRGRREPDWEGLKAFLERLEFGSLLHEFGLLESPLPAEEAPWPPPEGAFLGYRLSRPEPMWAELLALAASAQGRVYRAEDPHGALRGLKEVRGLLAKDLAVVALREGLDLPPTDDPMLLAYLLDSSNTTPEGVARRYGGEWTEDAGERALLAERLHANLLGRLQGEERLLWLYEEVEKPLSRVLAHMEATGVKLDVAYLEALSLEVAAEMRRLEEEVFRLAGHSFNLNSRDQLERVLFDELGLPPITKTEKTGKRSTSAAVLEALREVHPIVDKILQYRELAKLKGTYIDRLPALVHPKTGRLHTRFNQTATATGRLSSSDPNLQNIPVRTPLGQKIRKAFVAEEGWRLVALDYSQIELRVLAHLSGDENLIRVFQEGRDIHTQTASWMFGVSAEAIDPLMRRAAKTINFGVLYGMSAARLSQELGIPYEEAAAFIQRYFQSYPKVKAWIEKTLEEGRTRGYVETLFGRRRYVPDLNARVKSVREAAERMAFNMPVQGTAADLMKLAMVRLFPQLREVGARMLLQVHDELLLEAPKERAEEVAALAKEVMEGVWPLAVPLEVEVGIGEDWLAAKG

SEQ ID NO: 55 - DNA, 2529 bp, synthetic construct
  misc_feature 1..2529: note = Variant of DNA polymerase I from Thermus sp. strain 2.9
  source 1..2529: mol_type = other DNA
atgcaccatcatcatcatcatggcggtagcggcatgttaccgttgttcgaacctaaaggtcgcgtgcttctggttgatggccatcatctcgcgtatcgtaacttctttgccctgaaaggattaaccaccagccgtggcgagccggtacagggtgtctacggctttgcaaagtcgctcctgaaagctctgaaagaagacggtgatgtggtgattgttgtctttgatgcgaaagcgccaagttttcgccacgaagcgtacgaagcttacaaagccgggcgtgctccaacgccggaagactttcctcgccaattggcgcttatgaaggaattagtggatttgcttggcctcgaacgcttggaagttcccggtttcgaggcagacgacgtattagcgactctcgcaaagaaagccgaacgtgagggctatgaagtccagatcttgacagcagatcgcgatcttttccagcttttatctccgcgcatttccgtgttacacccggaagggcatcgtatcaccccggaatggctctgggagaaatatggtttgcgtcccgaacaatgggtggattttcgcgccttagcgggcgatccgagcgacaatattccgggagttaaaggtatcggcgagaagacggcgctcaagctccttaaagaatgggggtcgttggagaacttgcttaagaatttagatcaggtcaaaccagcttcagtgcgtgagaagattcttgcacacctcgaagacctcaaattaagccgcgaattggtccgtgtacgcaccgatttgccgctcgaagttgatttccgtggccgccgcgaacctgactgggagggtcttaaagcgtttttagagcgtcttgaatttggttcgctcttgcatgaattcggccttttagaaagcccgttaccagccgaagaagcaccttggccaccgcccgaaggcgcgtttttaggttaccgtttgagtcgcccggaaccgatgtgggccgaattattggctcttgcagcgtctgcccagggacgtgtgtatcgcgcggaagaccctcatggtgcgctccgtggcctcaaagaagtccgtggactccttgccaaagacttagctgttgttgcattgcgcgaaggtcttgatttacctccgactgatgatccaatgcttcttgcgtacctcttggactcgtcaaacacgacgcccgaaggcgtagcccgtcgttacggcggcgagtggaccgaagatgcaggtgagcgcgcgttattggccgaacgtttgcacgccaatttattaggacgtttgcaaggcgaggaacgtctcctctggctttacgaagaagtggagaaaccattgagtcgcgtgctcgcgcatatggaagctaccggtgtcaaattagacgtggcgtatttggaggcactcagccttgaagccgctgccgaaatgcgccgcttggaggaagaagtattccgtttagcaggccactcctttaaccttaattctcgcgatcagttagaacgtgtgttgttcgatgaacttggtctccctcctatcggtaagacagagaagaccggtaaacgtagcacttcagcggcggttttagaagctcttcgcgaagtccatcccattgtggacaagatcttgcagtaccgcgaactcgcgaaattgaaaggcacctatattgaccgtcttccggcattagtccacccgaaaacgggacgcctccatacccgcttcaaccaaacagccacggcgaccggtcgtttgtcctcctctgatccaaaccttcagaatattccagtacgtaccccattgggccagaaaatccgcaaagcgtttgtagctgaggagggttggcgtttagtggccctcgattatagccaaattgaattacgtgtccttgcccatctttctggcgatgagaacctcatccgcgtgtttcaggaaggccgcgacattcacactcaaacggcaagctggatgtttggagtgtcatcggaagcgatcgatcctttgatgcgtcgtgcagcgaagaccatcaatttcggtgttctctacggtatgagtgccgcgcgtttgtcgcaggaattaggcattccctatgaagaagctgcggcgttcattcagcgctactttcaaagctatcccaaagttaaagcatggatcgagaagactctcgaagaaggccgcacacgtggttacgtagagaccttatttggacgtcgccgctatgttcccgatttaactgctcgcgtgaaatctgtccgtgaagccgccgaacgcatggcgtggaacatgcctgtacagggcacggcagctgacctcatgaaacttgcaatggtgcgcctttttccacaattgcgtgaagttggtgcccgcatgctcttgcaggtccacgatgaactcttgttagaagcgccaaaagagcgtgcggaagaggtggcagccctcgcgaaagaggttatggaaggcgtgtggcccttagcggtgcctcttgaagtcgaagttggtattggcgaggattggttggctgccaaaggataatga

SEQ ID NO: 56 - protein, 841 aa, synthetic construct
  REGION 1..841: note = Variant of DNA polymerase I from Thermus sp. strain 2.9
MHHHHHHGGSGMLPLFEPKGRVLLVDGHHLAYRNFFALKGLTTSRGEPVQGVYGFAKSLLKALKEDGDVVIVVFDAKAPSFRHEAYEAYKAGRAPTPEDFPRQLALMKELVDLLGLERLEVPGFEADDVLATLAKKAEREGYEVQILTADRDLFQLLSPRISVLHPEGHRITPEWLWEKYGLRPEQWVDFRALAGDPSDNIPGVKGIGEKTALKLLKEWGSLENLLKNLDQVKPASVREKILAHLEDLKLSRELVRVRTDLPLEVDFRGRREPDWEGLKAFLERLEFGSLLHEFGLLESPLPAEEAPWPPPEGAFLGYRLSRPEPMWAELLALAASAQGRVYRAEDPHGALRGLKEVRGLLAKDLAVVALREGLDLPPTDDPMLLAYLLDSSNTTPEGVARRYGGEWTEDAGERALLAERLHANLLGRLQGEERLLWLYEEVEKPLSRVLAHMEATGVKLDVAYLEALSLEAAAEMRRLEEEVFRLAGHSFNLNSRDQLERVLFDELGLPPIGKTEKTGKRSTSAAVLEALREVHPIVDKILQYRELAKLKGTYIDRLPALVHPKTGRLHTRFNQTATATGRLSSSDPNLQNIPVRTPLGQKIRKAFVAEEGWRLVALDYSQIELRVLAHLSGDENLIRVFQEGRDIHTQTASWMFGVSSEAIDPLMRRAAKTINFGVLYGMSAARLSQELGIPYEEAAAFIQRYFQSYPKVKAWIEKTLEEGRTRGYVETLFGRRRYVPDLTARVKSVREAAERMAWNMPVQGTAADLMKLAMVRLFPQLREVGARMLLQVHDELLLEAPKERAEEVAALAKEVMEGVWPLAVPLEVEVGIGEDWLAAKG

SEQ ID NO: 57 - DNA, 2529 bp, synthetic construct
  misc_feature 1..2529: note = Variant of DNA polymerase I from Thermus sp. strain 2.9
  source 1..2529: mol_type = other DNA
atgcaccatcatcatcatcatggcggtagcggcatgttaccgttgttcgaacctaaaggtcgcgtgcttctggttgatggccatcatctcgcgtatcgtaacttctttgccctgaaaggattaaccaccagccgtggcgagccggtacagggtgtctacggctttgcaaagtcgctcctgaaagctctgaaagaagacggtgatgtggtgattgttgtctttgatgcgaaagcgccaagttttcgccacgaagcgtacgaagcttacaaagccgggcgtgctccaacgccggaagactttcctcgccaattggcgcttatgaaggaattagtggatttgcttggcctcgaacgcttggaagttcccggtttcgaggcagacgacgtattagcgactctcgcaaagaaagccgaacgtgagggctatgaagtccagatcttgacagcagatcgcgatcttttccagcttttatctccgcgcatttccgtgttacacccggaagggcatcgtatcaccccggaatggctctgggagaaatatggtttgcgtcccgaacaatgggtggattttcgcgccttagcgggcgatccgagcgacaatattccgggagttaaaggtatcggcgagaagacggcgctcaagctccttaaagaatgggggtcgttggagaacttgcttaagaatttagatcaggtcaaaccagcttcagtgcgtgagaagattcttgcacacctcgaagacctcaaattaagccgcgaattgtcccgtgtacgcaccgatttgccgctcgaagttgatttccgtggccgccgcgaacctgactgggagggtcttaaagcgtttttagagcgtcttgaactgggttcgctcttgcatgaattcggccttttagaaagcccgttaccagccgaagaagcaccttggccaccgcccgaaggcgcgtttttaggttaccgtttgagtcgcccggaaccgatgtgggccgaattattggctcttgcagcgtctgcccagggacgtgtgtatcgcgcggaagaccctcatggtgcgctccgtggcctcaaagaagtccgtggactccttgccaaagacttagctgttgttgcattgcgcgaaggtcttgatttacctccgactgatgatccaatgcttcttgcgtacctcttggacccgtcaaacacgacgcccgaaggcgtagcccgtcgttacggcggcgagtggaccgaagatgcaggtgagcgcgcgttattggccgaacgtttgcacgccaatttattaggacgtttgcaaggcgaggaacgtctcctctggctttacgaagaagtggagaaaccattgagtcgcgtgctcgcgcatatggaagctaccggtgtcaaattagacgtggcgtatttggaggcactcagccttgaagttgctgccgaaatgcgccgcttggaggaagaagtattccgtttagcaggccactcctttaaccttaattctcgcgatcagttagaacgtgtgttgttcgatgaacttggtctccctcctatcggcaagacagagaagaccggtaaacgtagcacttcagcggcggttttagaagctcttcgcgaagtccatcccattgtggacaagatcttgcagtaccgcgaactcgcgaaattgaaaggcacctatattgaccctcttccggcattagtccacccgaaaacgggacgcctccatacccgcttcaaccaaacagccacggcgaccggtcgtttgtcctcctctgatccaaaccttcagaatattccagtacgtaccccattgggccagaagatccgcaaagcgtttgtagctgaggagggttggcgtttagtggccctcgattatagccaaattgaattacgtgtccttgcccatctttctggcgatgagaacctcatccgcgtgtttcaggaaggccgcgacattcacactcaaacggcaagctggatgtttggattatcagctgaagcgatcgatcctttgatgcgtcgtgcagcgaagaccatcaatttcggtgttctctacggtatgagtgccgcgcgtttgtcgcaggaattaggcattccctatgaagaagctgcggcgttcattcagcgctactttcaaagctatcccaaagttaaagcatggatcgagaagactctcgaagaaggccgcacacgtggttacgtagagaccttatttggacgtcgccgctatgttcccgatttaaatgctcgcgtgaaatctgtccgtgaagccgccgaacgcatggcgttcaacatgcctgtacagggcacggcagctgacctcatgaaacttgcaatggtgcgcctttttccacaattgcgtgaagttggtgcccgcatgctcttgcaggtccacgatgaactcttgttagaagcgccaaaagagcgtgcggaagaggtggcagccctcgcgaaagaggttatggaaggcgtgtggcccttagcggtgcctcttgaagtcgaagttggtattggcgaggattggttggctgccaaaggataatga

SEQ ID NO: 58 - protein, 841 aa, synthetic construct
  REGION 1..841: note = Variant of DNA polymerase I from Thermus sp. strain 2.9
MHHHHHHGGSGMLPLFEPKGRVLLVDGHHLAYRNFFALKGLTTSRGEPVQGVYGFAKSLLKALKEDGDVVIVVFDAKAPSFRHEAYEAYKAGRAPTPEDFPRQLALMKELVDLLGLERLEVPGFEADDVLATLAKKAEREGYEVQILTADRDLFQLLSPRISVLHPEGHRITPEWLWEKYGLRPEQWVDFRALAGDPSDNIPGVKGIGEKTALKLLKEWGSLENLLKNLDQVKPASVREKILAHLEDLKLSRELSRVRTDLPLEVDFRGRREPDWEGLKAFLERLELGSLLHEFGLLESPLPAEEAPWPPPEGAFLGYRLSRPEPMWAELLALAASAQGRVYRAEDPHGALRGLKEVRGLLAKDLAVVALREGLDLPPTDDPMLLAYLLDPSNTTPEGVARRYGGEWTEDAGERALLAERLHANLLGRLQGEERLLWLYEEVEKPLSRVLAHMEATGVKLDVAYLEALSLEVAAEMRRLEEEVFRLAGHSFNLNSRDQLERVLFDELGLPPIGKTEKTGKRSTSAAVLEALREVHPIVDKILQYRELAKLKGTYIDPLPALVHPKTGRLHTRFNQTATATGRLSSSDPNLQNIPVRTPLGQKIRKAFVAEEGWRLVALDYSQIELRVLAHLSGDENLIRVFQEGRDIHTQTASWMFGLSAEAIDPLMRRAAKTINFGVLYGMSAARLSQELGIPYEEAAAFIQRYFQSYPKVKAWIEKTLEEGRTRGYVETLFGRRRYVPDLNARVKSVREAAERMAFNMPVQGTAADLMKLAMVRLFPQLREVGARMLLQVHDELLLEAPKERAEEVAALAKEVMEGVWPLAVPLEVEVGIGEDWLAAKG

SEQ ID NO: 59 - DNA, 2529 bp, synthetic construct
  misc_feature 1..2529: note = Variant of DNA polymerase I from Thermus sp. strain 2.9
  source 1..2529: mol_type = other DNA
atgcaccatcatcatcatcatggcggtagcggcatgttaccgttgttcgaacctaaaggtcgcgtgcttctggttgatggccatcatctcgcgtatcgtaacttctttgccctgaaaggattaaccaccagccgtggcgagccggtacagggtgtctacggctttgcaaagtcgctcctgaaagctctgaaagaagacggtgatgtggtgattgttgtctttgatgcgaaagcgccaagttttcgccacgaagcgtacgaagcttacaaagccgggcgtgctccaacgccggaagactttcctcgccaattggcgcttatgaaggaattagtggatttgcttggcctcgaacgcttggaagttcccggtttcgaggcagacgacgtattagcgactctcgcaaagaaagccgaacgtgagggctatgaagtccagatcttgacagcagatcgcgatcttttccagcttttatctccgcgcatttccgtgttacacccggaagggcatcgtatcaccccggaatggctctgggagaaatatggtttgcgtcccgaacaatgggtggattttcgcgccttagcgggcgatccgagcgacaatattccgggagttaaaggtatcggcgagaagacggcgctcaagctccttaaagaatgggggtcgttggagaacttgcttaagaatttagatcaggtcaaaccagcttcagtgcgtgagaagattcttgcacacctcgaagacctcaaattaagccgcgaattgtcgcgtgtacgcaccgatttgccgctcgaagttgatttccgtggccgccgcgaacctgactgggagggtcttaaagcgtttttagagcgtcttgaatttggttcgctcttgcatgaattcggccttttagaaagcccgttaccagccgaagaagcaccttggccaccgcccgaaggcgcgtttttaggttaccgtttgagtcgcccggaaccgatgtgggccgaattattggctcttgcagcgtctgcccagggacgtgtgtatcgcgcggaagaccctcatggtgcgctccgtggcctcaaagaagtccgtggactccttgccaaagacttagctgttgttgcattgcgcgaaggtcttgatttacctccgactgatgatccaatgcttcttgcgtacctcttggactcgtcaaacacgacgcccgaaggcgtagcccgtcgttacggcggcgagtggaccgaagatgcaggtgagcgcgcgttattggccgaacgtttgcacgccaatttattaggacgtttgcaaggcgaggaacgtctcctctggctttacgaagaagtggagaaaccattgagtcgcgtgctcgcgcatatggaagctaccggtgtcaaattagacgtggcgtatttggaggcactcagccttgaagtcgctgccgaactgcgccgcttggaggaagaagtattccgtttagcaggccactcctttaaccttaattctcgcgatcagttagaacgtgtgttgttcgatgaacttggtctccctcctatcggtaagacagagaagaccggtaaacgtagcacttcagcggcggttttagaagctcttcgcgaagtccatcccattgtggacaagatcttgcagtaccgcgaactcgcgaaattgaaaggcacctatattgaccgtcttccggcattagtccacccgaaaacgggacgcctccatacccgcttcaaccaaacagccacggcgaccggtcgtttgtcctcctctgatccaaaccttcagaatattccagtacgtaccccattgggccagaaaatccgcaaagcgtttgtagctgaggagggttggcgtttagtggccctcgattatagccaaattgaattacgtgtccttgcccatctttctggcgatgagaacctcatccgcgtgtttcaggaaggccgcgacattcacactcaaacggcaagctggatgtttggattatcagctgaagcgatcgatcctttgatgcgtcgtgcagcgaagaccatcaatttcggtgttctctacggtatgagtgcccatcgtttgtcgcaggaattaggcattccctatgaagaagctgcggcgttcattcagcgctactttcaaagctatcccaaagttaaagcatggatcgagaagactctcgaagaaggccgcacacgtggttacgtagagaccttatttggacgtcgccgctatgttcccgatttaaacgctcgcgtgaaatctgtccgtgaagccgccgaacgcatggcgttcaacatgcctgtacagggcacggcagctgacctcatgaaacttgcaatggtgcgcctttttccacaattgcgtgaagttggtgcccgcatgctcttgcaggtccacgatgaactcttgttagaagcgccaaaagagcgtgcggaagaggtggcagccctcgcgaaagaggttatggaaggcgtgtggcccttagcggtgcctcttgaagtcgaagttggtattggcgaggattggttggctgccaaaggataatga

SEQ ID NO: 60 - protein, 841 aa, synthetic construct
  REGION 1..841: note = Variant of DNA polymerase I from Thermus sp. strain 2.9
MHHHHHHGGSGMLPLFEPKGRVLLVDGHHLAYRNFFALKGLTTSRGEPVQGVYGFAKSLLKALKEDGDVVIVVFDAKAPSFRHEAYEAYKAGRAPTPEDFPRQLALMKELVDLLGLERLEVPGFEADDVLATLAKKAEREGYEVQILTADRDLFQLLSPRISVLHPEGHRITPEWLWEKYGLRPEQWVDFRALAGDPSDNIPGVKGIGEKTALKLLKEWGSLENLLKNLDQVKPASVREKILAHLEDLKLSRELSRVRTDLPLEVDFRGRREPDWEGLKAFLERLEFGSLLHEFGLLESPLPAEEAPWPPPEGAFLGYRLSRPEPMWAELLALAASAQGRVYRAEDPHGALRGLKEVRGLLAKDLAVVALREGLDLPPTDDPMLLAYLLDSSNTTPEGVARRYGGEWTEDAGERALLAERLHANLLGRLQGEERLLWLYEEVEKPLSRVLAHMEATGVKLDVAYLEALSLEVAAELRRLEEEVFRLAGHSFNLNSRDQLERVLFDELGLPPIGKTEKTGKRSTSAAVLEALREVHPIVDKILQYRELAKLKGTYIDRLPALVHPKTGRLHTRFNQTATATGRLSSSDPNLQNIPVRTPLGQKIRKAFVAEEGWRLVALDYSQIELRVLAHLSGDENLIRVFQEGRDIHTQTASWMFGLSAEAIDPLMRRAAKTINFGVLYGMSAHRLSQELGIPYEEAAAFIQRYFQSYPKVKAWIEKTLEEGRTRGYVETLFGRRRYVPDLNARVKSVREAAERMAFNMPVQGTAADLMKLAMVRLFPQLREVGARMLLQVHDELLLEAPKERAEEVAALAKEVMEGVWPLAVPLEVEVGIGEDWLAAKG

SEQ ID NO: 61 - DNA, 2529 bp, synthetic construct
  misc_feature 1..2529: note = Variant of DNA polymerase I from Thermus sp. strain 2.9
  source 1..2529: mol_type = other DNA
atgcaccatcatcatcatcatggcggtagcggcatgttaccgttgttcgaacctaaaggtcgcgtgcttctggttgatggccatcatctcgcgtatcgtaacttctttgccctgaaaggattaaccaccagccgtggcgagccggtacagggtgtctacggctttgcaaagtcgctcctgaaagctctgaaagaagacggtgatgtggtgattgttgtctttgatgcgaaagcgccaagttttcgccacgaagcgtacgaagcttacaaagccgggcgtgctccaacgccggaagactttcctcgccaattggcgcttatgaaggaattagtggatttgcttggcctcgaacgcttggaagttcccggtttcgaggcagacgacgtattagcgactctcgcaaagaaagccgaacgtgagggctatgaagtccagatcttgacagcagatcgcgatcttttccagcttttatctccgcgcatttccgtgttacacccggaagggcatcgtatcaccccggaatggctctgggagaaatatggtttgcgtcccgaacaatgggtggattttcgcgccttagcgggcgatccgagcgacaatattccgggagttaaaggtatcggcgagaagacggcgctcaagctccttaaagaatgggggtcgttggagaacttgcttaagaatttagatcaggtcaaaccagcttcagtgcgtgagaagattcttgcacacctcgaagacctcaaattaagccgcgaattgtcccgtgtacgcaccgatttgccgctcgaagttgatttccgtggccgccgcgaacctgactgggagggtcttaaagcgtttttagagcgtcttgaatttggttcgctcttgcatgaattcggccttttagaaagcccgttaccagccgaagaagcaccttggccaccgcccgaaggcgcgtttttaggttaccgtttgagtcgcccggaaccgatgtgggccgaattattggctcttgcagcgtctgcccagggacgtgtgtatcgcgcggaagaccctcatggtgcgctccgtggcctcaaagaagtccgtggactccttgccaaagacttagctgttgttgcattgcgcgaaggtcttgatttacctccgactgatgatccaatgcttcttgcgtacctcttggacccgtcaaacacgacgcccgaaggcgtagcccgtcgttacggcggcgagtggaccgaagatgcaggtgagcgcgcgttattggccgaacgtttgcacgccaatttattaggacgtttgcaaggcgaggaacgtctcctctggctttacgaagaagtggagaaaccattgagtcgcgtgctcgcgcatatggaagctaccggtgtcaaattagacgtggcgtatttggaggcactcagccttgaagttgctgccgaaatgcgccgcttggaggaagaagtattccgtttagcaggccactcctttaaccttaattctcgcgatcagttagaacgtgtgttgttcgatgaacttggtctccctcctatcggcaagacagagaagaccggtaaacgtagcacttcagcggcggttttagaagctcttcgcgaagtccatcccattgtggacaagatcttgcagtaccgcgaactcgcgaaattgaaaggcacctatattgaccgtcttccggcattagtccacccgaaaacgggacgcctccatacccgcttcaaccaaacagccacggcgaccggtcgtttgtcctcctctgatccaaaccttcagaatattccagtacgtaccccattgggccagaagatccgcaaagcgtttgtagctgaggagggttggcgtttagtggccctcgattatagccaaattgaattacgtgtccttgcccatctttctggcgatgagaacctcatccgcgtgtttcaggaaggccgcgacattcacactcaaacggcaagctggatgtttggattatcagctgaagcgatcgatcctttgatgcgtcgtgcagcgaagaccatcaatttcggtgttctctacggtatgagtgcccatcgtttgtcgcaggaattaggcattccctatgaagaagctgcggcgttcattcagcgctactttcaaagctatcccaaagttaaagcatggatcgagaagactctcgaagaaggccgcacacgtggttacgtagagaccttatttggacgtcgccgctatgttcccgatttaactgctcgcgtgaaatctgtccgtgaagccgccgaacgcatggcgttcaacatgcctgtacagggcacggcagctgacctcatgaaacttgcaatggtgcgcctttttccacaattgcgtgaagttggtgcccgcatgctcttgcaggtccacgatgaactcttgttagaagcgccaaaagagcgtgcggaagaggtggcagccctcgcgaaagaggttatggaaggcgtgtggcccttagcggtgcctcttgaagtcgaagttggtattggcgaggattggttggctgccaaaggataatga

SEQ ID NO: 62 - protein, 841 aa, synthetic construct
  REGION 1..841: note = Variant of DNA polymerase I from Thermus sp. strain 2.9
MHHHHHHGGSGMLPLFEPKGRVLLVDGHHLAYRNFFALKGLTTSRGEPVQGVYGFAKSLLKALKEDGDVVIVVFDAKAPSFRHEAYEAYKAGRAPTPEDFPRQLALMKELVDLLGLERLEVPGFEADDVLATLAKKAEREGYEVQILTADRDLFQLLSPRISVLHPEGHRITPEWLWEKYGLRPEQWVDFRALAGDPSDNIPGVKGIGEKTALKLLKEWGSLENLLKNLDQVKPASVREKILAHLEDLKLSRELSRVRTDLPLEVDFRGRREPDWEGLKAFLERLEFGSLLHEFGLLESPLPAEEAPWPPPEGAFLGYRLSRPEPMWAELLALAASAQGRVYRAEDPHGALRGLKEVRGLLAKDLAVVALREGLDLPPTDDPMLLAYLLDPSNTTPEGVARRYGGEWTEDAGERALLAERLHANLLGRLQGEERLLWLYEEVEKPLSRVLAHMEATGVKLDVAYLEALSLEVAAEMRRLEEEVFRLAGHSFNLNSRDQLERVLFDELGLPPIGKTEKTGKRSTSAAVLEALREVHPIVDKILQYRELAKLKGTYIDRLPALVHPKTGRLHTRFNQTATATGRLSSSDPNLQNIPVRTPLGQKIRKAFVAEEGWRLVALDYSQIELRVLAHLSGDENLIRVFQEGRDIHTQTASWMFGLSAEAIDPLMRRAAKTINFGVLYGMSAHRLSQELGIPYEEAAAFIQRYFQSYPKVKAWIEKTLEEGRTRGYVETLFGRRRYVPDLTARVKSVREAAERMAFNMPVQGTAADLMKLAMVRLFPQLREVGARMLLQVHDELLLEAPKERAEEVAALAKEVMEGVWPLAVPLEVEVGIGEDWLAAKG

SEQ ID NO: 63 - DNA, 2529 bp, synthetic construct
  misc_feature 1..2529: note = Variant of DNA polymerase I from Thermus sp. strain 2.9
  source 1..2529: mol_type = other DNA
atgcaccatcatcatcatcatggcggtagcgacatgttaccgttgttcgaacctaaaggtcgcgtgcttctggttgatggccatcatctcgcgtatcgtaacttctttgccctgaaaggattaaccaccagccgtggcgagccggtacagggtgtctacggctttgcaaagtcgctcctgaaagctctgaaagaagacggtgatgtggtgattgttgtctttgatgcgaaagcgccaagttttcgccacgaagcgtacgaagcttacaaagccgggcgtgctccaacgccggaagactttcctcgccaattggcgcttatgaaggaattagtggatttgcttggcctcgaacgcttggaagttcccggtttcgaggcagacgacgtattagcgactctcgcaaagaaagccgaacgtgagggctatgaagtccagatcttgacagcagatcgcgatcttttccagcttttatctccgcgcatttccgtgttacacccggaagggcatcgtatcaccccggaatggctctgggagaaatatggtttgcgtcccgaacaatgggtggattttcgcgccttagcgggcgatccgagcgacaatattccgggagttaaaggtatcggcgagaagacggcgctcaagctccttaaagaatgggggtcgttggagaacttgcttaagaatttagatcaggtcaaaccagcttcagtgcgtgagaagattcttgcacacctcgaagacctcaaattaagccgcgaattgtcccgtgtacgcaccgatttgccgctcgaagttgatttccgtggccgccgcgaacctgactgggagggtcttaaagcgtttttagagcgtcttgaactgggttcgctcttgcatgaattcggccttttagaaagcccgttaccagccgaagaagcaccttggccaccgcccgaaggcgcgtttttaggttaccgtttgagtcgcccggaaccgatgtgggccgaattattggctcttgcagcgtctgcccagggacgtgtgtatcgcgcggaagaccctcatggtgcgctccgtggcctcaaagaagtccgtggactccttgccaaagacttagctgttgttgcattgcgcgaaggtcttgatttacctccgactgatgatccaatgcttcttgcgtacctcttggacccgtcaaacacgacgcccgaaggcgtagcccgtcgttacggcggcgagtggaccgaagatgcaggtgagcgcgcgttattggccgaacgtttgcacgccaatttattaggacgtttgcaaggcgaggaacgtctcctctggctttacgaagaagtggagaaaccattgagtcgcgtgctcgcgcatatggaagctaccggtgtcaaattagacgtggcgtatttggaggcactcagccttgaagttgctgccgaaatgcgccgcttggaggaagaagtattccgtttagcaggccactcctttaaccttaattctcgcgatcagttagaacgtgtgttgttcgatgaacttggtctccctcctatcggcaagacagagaagaccggtaaacgtagcacttcagcggcggttttagaagctcttcgcgaagtccatcccattgtggacaagatcttgcagtaccgcgaactcgcgaaattgaaaggcacctatattgaccctcttccggcattagtccacccgaaaacgggacgcctccatacccgcttcaaccaaacagccacggcgaccggtcgtttgtcctcctctgatccaaaccttcagaatattccagtacgtaccccattgggccagaagatccgcaaagcgtttgtagctgaggagggttggcgtttagtggccctcgattatagccaaattgaattacgtgtccttgcccatctttctggcgatgagaacctcatccgcgtgtttcaggaaggccgcgacattcacactcaaacggcaagctggatgtttggattatcagctgaagcgatcgatcctttgatgcgtcgtgcagcgaagaccatcaatttcggtgttctctacggtatgagtgcccatcgtttgtcgcaggaattaggcattccctatgaagaagctgcggcgttcattcagcgctactttcaaagctatcccaaagttaaagcatggatcgagaagactctcgaagaaggccgcacacgtggttacgtagagaccttatttggacgtcgccgctatgttcccgatttaaacgctcgcgtgaaatctgtccgtgaagccgccgaacgcatggcgttcaacatgcctgtacagggcacggcagctgacctcatgaaacttgcaatggtgcgcctttttccacaattgcgtgaagttggtgcccgcatgctcttgcaggtccacgatgaactcttgttagaagcgccaaaagagcgtgcggaagaggtggcagccctcgcgaaagaggttatggaaggcgtgtggcccttagcggtgcctcttgaagtcgaagttggtattggcgaggattggttggctgccaaaggataatga

SEQ ID NO: 64 - protein, 841 aa, synthetic construct
  REGION 1..841: note = Variant of DNA polymerase I from Thermus sp. strain 2.9
MHHHHHHGGSDMLPLFEPKGRVLLVDGHHLAYRNFFALKGLTTSRGEPVQGVYGFAKSLLKALKEDGDVVIVVFDAKAPSFRHEAYEAYKAGRAPTPEDFPRQLALMKELVDLLGLERLEVPGFEADDVLATLAKKAEREGYEVQILTADRDLFQLLSPRISVLHPEGHRITPEWLWEKYGLRPEQWVDFRALAGDPSDNIPGVKGIGEKTALKLLKEWGSLENLLKNLDQVKPASVREKILAHLEDLKLSRELSRVRTDLPLEVDFRGRREPDWEGLKAFLERLELGSLLHEFGLLESPLPAEEAPWPPPEGAFLGYRLSRPEPMWAELLALAASAQGRVYRAEDPHGALRGLKEVRGLLAKDLAVVALREGLDLPPTDDPMLLAYLLDPSNTTPEGVARRYGGEWTEDAGERALLAERLHANLLGRLQGEERLLWLYEEVEKPLSRVLAHMEATGVKLDVAYLEALSLEVAAEMRRLEEEVFRLAGHSFNLNSRDQLERVLFDELGLPPIGKTEKTGKRSTSAAVLEALREVHPIVDKILQYRELAKLKGTYIDPLPALVHPKTGRLHTRFNQTATATGRLSSSDPNLQNIPVRTPLGQKIRKAFVAEEGWRLVALDYSQIELRVLAHLSGDENLIRVFQEGRDIHTQTASWMFGLSAEAIDPLMRRAAKTINFGVLYGMSAHRLSQELGIPYEEAAAFIQRYFQSYPKVKAWIEKTLEEGRTRGYVETLFGRRRYVPDLNARVKSVREAAERMAFNMPVQGTAADLMKLAMVRLFPQLREVGARMLLQVHDELLLEAPKERAEEVAALAKEVMEGVWPLAVPLEVEVGIGEDWLAAKG

SEQ ID NO: 65 - DNA, 2529 bp, synthetic construct
  misc_feature 1..2529: note = Variant of DNA polymerase I from Thermus sp. strain 2.9
  source 1..2529: mol_type = other DNA
atgcaccatcatcatcatcatggcggtagcggcatgttaccgttgttcgaacctaaaggtcgcgtgcttctggttgatggccatcatctcgcgtatcgtaacttctttgccctgaaaggattaaccaccagccgtggcgagccggtacagggtgtctacggctttgcaaagtcgctcctgaaagctctgaaagaagacggtgatgtggtgattgttgtctttgatgcgaaagcgccaagttttcgccacgaagcgtacgaagcttacaaagccgggcgtgctccaacgccggaagactttcctcgccaattggcgcttatgaaggaattagtggatttgcttggcctcgaacgcttggaagttcccggtttcgaggcagacgacgtattagcgactctcgcaaagaaagccgaacgtgagggctatgaagtccagatcttgacagcagatcgcgatcttttccagcttttatctccgcgcatttccgtgttacacccggaagggcatcgtatcaccccggaatggctctgggagaaatatggtttgcgtcccgaacaatgggtggattttcgcgccttagcgggcgatccgagcgacaatattccgggagttaaaggtatcggcgagaagacggcgctcaagctccttaaagaatgggggtcgttggagaacttgcttaagaatttagatcaggtcaaaccagcttcagtgcgtgagaagattcttgcacacctcgaagacctcaaattaagccgcgaattgtcccgtgtacgcaccgatttgccgctcgaagttgatttccgtggccgccgcgaacctgactgggagggtcttaaagcgtttttagagcgtcttgaatttggttcgctcttgcatgaattcggccttttagaaagcccgttaccagccgaagaagcaccttggccaccgcccgaaggcgcgtttttaggttaccgtttgagtcgcccggaaccgatgtgggccgaattattggctcttgcagcgtctgcccagggacgtgtgtatcgcgcggaagaccctcatggtgcgctccgtggcctcaaagaagtccgtggactccttgccaaagacttagctgttgttgcattgcgcgaaggtcttgatttacctccgactgatgatccaatgcttcttgcgtacctcttggactcgtcaaacacgacgcccgaaggcgtagcccgtcgttacggcggcgagtggaccgaagatgcaggtgagcgcgcgttattggccgaacgtttgcacgccaatttattaggacgtttgcaaggcgaggaacgtctcctctggctttacgaagaagtggagaaaccattgagtcgcgtgctcgcgcatatggaagctaccggtgtcaaattagacgtggcgtatttggaggcactcagccttgaagtcgctgccgaaatgcgccgcttggaggaagaagtattccgtttagcaggccactcctttaaccttaattctcgcgatcagttagaacgtgtgttgttcgatgaacttggtctccctcctatcaccaagacagagaagaccggtaaacgtagcacttcagcggcggttttagaagctcttcgcgaagtccatcccattgtggacaagatcttgcagtaccgcgaactcgcgaaattgaaaggcacctatattgaccctcttccggcattagtccacccgaaaacgggacgcctccatacccgcttcaaccaaacagccacggcgaccggtcgtttgtcctcctctgatccaaaccttcagaatattccagtacgtaccccattgggccagaagatccgcaaagcgtttgtagctgaggagggttggcgtttagtggccctcgattatagccaaattgaattacgtgtccttgcccatctttctggcgatgagaacctcatccgcgtgtttcaggaaggccgcgacattcacactcaaacggcaagctggatgtttggagtgtcatcggaagcgatcgatcctttgatgcgtcgtgcagcgaagaccatcaatttcggtgttctctacggtatgagtgcccatcgtttgtcgcaggaattaggcattccctatgaagaagctgcggcgttcattcagcgctactttcaaagctatcccaaagttaaagcatggatcgagaagactctcgaagaaggccgcacacgtggttacgtagagaccttatttggacgtcgccgctatgttcccgatttaaacgctcgcgtgaaatctgtccgtgaagccgccgaacgcatggcgttcaacatgcctgtacagggcacggcagctgacctcatgaaacttgcaatggtgcgcctttttccacaattgcgtgaagttggtgcccgcatgctcttgcaggtccacgatgaactcttgttagaagcgccaaaagagcgtgcggaagaggtggcagccctcgcgaaagaggttatggaaggcgtgtggcccttagcggtgcctcttgaagtcgaagttggtattggcgaggattggttggctgccaaaggataatga

SEQ ID NO: 66 - protein, 841 aa, synthetic construct
  REGION 1..841: note = Variant of DNA polymerase I from Thermus sp. strain 2.9
MHHHHHHGGSGMLPLFEPKGRVLLVDGHHLAYRNFFALKGLTTSRGEPVQGVYGFAKSLLKALKEDGDVVIVVFDAKAPSFRHEAYEAYKAGRAPTPEDFPRQLALMKELVDLLGLERLEVPGFEADDVLATLAKKAEREGYEVQILTADRDLFQLLSPRISVLHPEGHRITPEWLWEKYGLRPEQWVDFRALAGDPSDNIPGVKGIGEKTALKLLKEWGSLENLLKNLDQVKPASVREKILAHLEDLKLSRELSRVRTDLPLEVDFRGRREPDWEGLKAFLERLEFGSLLHEFGLLESPLPAEEAPWPPPEGAFLGYRLSRPEPMWAELLALAASAQGRVYRAEDPHGALRGLKEVRGLLAKDLAVVALREGLDLPPTDDPMLLAYLLDSSNTTPEGVARRYGGEWTEDAGERALLAERLHANLLGRLQGEERLLWLYEEVEKPLSRVLAHMEATGVKLDVAYLEALSLEVAAEMRRLEEEVFRLAGHSFNLNSRDQLERVLFDELGLPPITKTEKTGKRSTSAAVLEALREVHPIVDKILQYRELAKLKGTYIDPLPALVHPKTGRLHTRFNQTATATGRLSSSDPNLQNIPVRTPLGQKIRKAFVAEEGWRLVALDYSQIELRVLAHLSGDENLIRVFQEGRDIHTQTASWMFGVSSEAIDPLMRRAAKTINFGVLYGMSAHRLSQELGIPYEEAAAFIQRYFQSYPKVKAWIEKTLEEGRTRGYVETLFGRRRYVPDLNARVKSVREAAERMAFNMPVQGTAADLMKLAMVRLFPQLREVGARMLLQVHDELLLEAPKERAEEVAALAKEVMEGVWPLAVPLEVEVGIGEDWLAAKG

SEQ ID NO: 67 - DNA, 2529 bp, synthetic construct
  misc_feature 1..2529: note = Variant of DNA polymerase I from Thermus sp. strain 2.9
  source 1..2529: mol_type = other DNA
atgcaccatcatcatcatcatggcggtagcggcatgttaccgttgttcgaacctaaaggtcgcgtgcttctggttgatggccatcatctcgcgtatcgtaacttctttgccctgaaaggattaaccaccagccgtggcgagccggtacagggtgtctacggctttgcaaagtcgctcctgaaagctctgaaagaagacggtgatgtggtgattgttgtctttgatgcgaaagcgccaagttttcgccacgaagcgtacgaagcttacaaagccgggcgtgctccaacgccggaagactttcctcgccaattggcgcttatgaaggaattagtggatttgcttggcctcgaacgcttggaagttcccggtttcgaggcagacgacgtattagcgactctcgcaaagaaagccgaacgtgagggctatgaagtccagatcttgacagcagatcgcgatcttttccagcttttatctccgcgcatttccgtgttacacccggaagggcatcgtatcaccccggaatggctctgggagaaatatggtttgcgtcccgaacaatgggtggattttcgcgccttagcgggcgatccgagcgacaatattccgggagttaaaggtatcggcgagaagacggcgctcaagctccttaaagaatgggggtcgttggagaacttgcttaagaatttagatcaggtcaaaccagcttcagtgcgtgagaagattcttgcacacctcgaagacctcaaattaagccgcgaattgtcgcgtgtacgcaccgatttgccgctcgaagttgatttccgtggccgccgcgaacctgactgggagggtcttaaagcgtttttagagcgtcttgaatttggttcgctcttgcatgaattcggccttttagaaagcccgttaccagccgaagaagcaccttggccaccgcccgaaggcgcgtttttaggttaccgtttgagtcgcccggaaccgatgtgggccgaattattggctcttgcagcgtctgcccagggacgtgtgtatcgcgcggaagaccctcatggtgcgctccgtggcctcaaagaagtccgtggactccttgccaaagacttagctgttgttgcattgcgcgaaggtcttgatttacctccgactgatgatccaatgcttcttgcgtacctcttggactcgtcaaacacgacgcccgaaggcgtagcccgtcgttacggcggcgagtggaccgaagatgcaggtgagcgcgcgttattggccgaacgtttgcacgccaatttattaggacgtttgcaaggcgaggaacgtctcctctggctttacgaagaagtggagaaaccattgagtcgcgtgctcgcgcatatggaagctaccggtgtcaaattagacgtggcgtatttggaggcactcagccttgaagttgctgccgaaatgcgccgcttggaggaagaagtattccgtttagcaggccactcctttaaccttaattctcgcgatcagttagaacgtgtgttgttcgatgaacttggtctccctcctatcggtaagacagagaagaccggtaaacgtagcacttcagcggcggttttagaagctcttcgcgaagtccatcccattgtggacaagatcttgcagtaccgcgaactcgcgaaattgaaaggcacctatattgaccgtcttccggcattagtccacccgaaaacgggacgcctccatacccgcttcaaccaaacagccacggcgaccggtcgtttgtcctcctctgatccaaaccttcagaatattccagtacgtaccccattgggccagaagatccgcaaagcgtttgtagctgaggagggttggcgtttagtggccctcgattatagccaaattgaattacgtgtccttgcccatctttctggcgatgagaacctcatccgcgtgtttcaggaaggccgcgacattcacactcaaacggcaagctggatgtttggattatcagctgaagcgatcgatcctttgatgcgtcgtgcagcgaagaccatcaatttcggtgttctctacggtatgagtgcccatcgtttgtcgcaggaattaggcattccctatgaagaagctgcggcgttcattcagcgctactttcaaagctatcccaaagttaaagcatggatcgagaagactctcgaagaaggccgcacacgtggttacgtagagaccttatttggacgtcgccgctatgttcccgatttaaacgctcgcgtgaaatctgtccgtgaagccgccgaacgcatggcgtggaacatgcctgtacagggcacggcagctgacctcatgaaacttgcaatggtgcgcctttttccacaattgcgtgaagttggtgcccgcatgctcttgcaggtccacgatgaactcttgttagaagcgccaaaagagcgtgcggaagaggtggcagccctcgcgaaagaggttatggaaggcgtgtggcccttagcggtgcctcttgaagtcgaagttggtattggcgaggattggttggctgccaaaggataatga

SEQ ID NO: 68 - protein, 841 aa, synthetic construct
  REGION 1..841: note = Variant of DNA polymerase I from Thermus sp. strain 2.9
MHHHHHHGGSGMLPLFEPKGRVLLVDGHHLAYRNFFALKGLTTSRGEPVQGVYGFAKSLLKALKEDGDVVIVVFDAKAPSFRHEAYEAYKAGRAPTPEDFPRQLALMKELVDLLGLERLEVPGFEADDVLATLAKKAEREGYEVQILTADRDLFQLLSPRISVLHPEGHRITPEWLWEKYGLRPEQWVDFRALAGDPSDNIPGVKGIGEKTALKLLKEWGSLENLLKNLDQVKPASVREKILAHLEDLKLSRELSRVRTDLPLEVDFRGRREPDWEGLKAFLERLEFGSLLHEFGLLESPLPAEEAPWPPPEGAFLGYRLSRPEPMWAELLALAASAQGRVYRAEDPHGALRGLKEVRGLLAKDLAVVALREGLDLPPTDDPMLLAYLLDSSNTTPEGVARRYGGEWTEDAGERALLAERLHANLLGRLQGEERLLWLYEEVEKPLSRVLAHMEATGVKLDVAYLEALSLEVAAEMRRLEEEVFRLAGHSFNLNSRDQLERVLFDELGLPPIGKTEKTGKRSTSAAVLEALREVHPIVDKILQYRELAKLKGTYIDRLPALVHPKTGRLHTRFNQTATATGRLSSSDPNLQNIPVRTPLGQKIRKAFVAEEGWRLVALDYSQIELRVLAHLSGDENLIRVFQEGRDIHTQTASWMFGLSAEAIDPLMRRAAKTINFGVLYGMSAHRLSQELGIPYEEAAAFIQRYFQSYPKVKAWIEKTLEEGRTRGYVETLFGRRRYVPDLNARVKSVREAAERMAWNMPVQGTAADLMKLAMVRLFPQLREVGARMLLQVHDELLLEAPKERAEEVAALAKEVMEGVWPLAVPLEVEVGIGEDWLAAKG

SEQ ID NO: 69 - DNA, 2529 bp, synthetic construct
  misc_feature 1..2529: note = Variant of DNA polymerase I from Thermus sp. strain 2.9
  source 1..2529: mol_type = other DNA
atgcaccatcatcatcatcatggcggtagcggcatgttaccgttgttcgaacctaaaggtcgcgtgcttctggttgatggccatcatctcgcgtatcgtaacttctttgccctgaaaggattaaccaccagccgtggcgagccggtacagggtgtctacggctttgcaaagtcgctcctgaaagctctgaaagaagacggtgatgtggtgattgttgtctttgatgcgaaagcgccaagttttcgccacgaagcgtacgaagcttacaaagccgggcgtgctccaacgccggaagactttcctcgccaattggcgcttatgaaggaattagtggatttgcttggcctcgaacgcttggaagttcccggtttcgaggcagacgacgtattagcgactctcgcaaagaaagccgaacgtgagggctatgaagtccagatcttgacagcagatcgcgatcttttccagcttttatctccgcgcatttccgtgttacacccggaagggcatcgtatcaccccggaatggctctgggagaaatatggtttgcgtcccgaacaatgggtggattttcgcgccttagcgggcgatccgagcgacaatattccgggagttaaaggtatcggcgagaagacggcgctcaagctccttaaagaatgggggtcgttggagaacttgcttaagaatttagatcaggtcaaaccagcttcagtgcgtgagaagattcttgcacacctcgaagacctcaaattaagccgcgaattgtcccgtgtacgcaccgatttgccgctcgaagttgatttccgtggccgccgcgaacctgactgggagggtcttaaagcgtttttagagcgtcttgaatttggttcgctcttgcatgaattcggccttttagaaagcccgttaccagccgaagaagcaccttggccaccgcccgaaggcgcgtttttaggttaccgtttgagtcgcccggaaccgatgtgggccgaattattggctcttgcagcgtctgcccagggacgtgtgtatcgcgcggaagaccctcatggtgcgctccgtggcctcaaagaagtccgtggactccttgccaaagacttagctgttgttgcattgcgcgaaggtcttgatttacctccgactgatgatccaatgcttcttgcgtacctcttggacccgtcaaacacgacgcccgaaggcgtagcccgtcgttacggcggcgagtggaccgaagatgcaggtgagcgcgcgttattggccgaacgtttgcacgccaatttattaggacgtttgcaaggcgaggaacgtctcctctggctttacgaagaagtggagaaaccattgagtcgcgtgctcgcgcatatggaagctaccggtgtcaaattagacgtggcgtatttggaggcactcagccttgaagttgctgccgaaatgcgccgcttggaggaagaagtattccgtttagcaggccactcctttaaccttaattctcgcgatcagttagaacgtgtgttgttcgatgaacttggtctccctcctatcaccaagacagagaagaccggtaaacgtagcacttcagcggcggttttagaagctcttcgcgaagtccatcccattgtggacaagatcttgcagtaccgcgaactcgcgaaattgaaaggcacctatattgaccgtcttccggcattagtccacccgaaaacgggacgcctccatacccgcttcaaccaaacagccacggcgaccggtcgtttgtcctcctctgatccaaaccttcagaatattccagtacgtaccccattgggccagaaaatccgcaaagcgtttgtagctgaggagggttggcgtttagtggccctcgattatagccaaattgaattacgtgtccttgcccatctttctggcgatgagaacctcatccgcgtgtttcaggaaggccgcgacattcacactcaaacggcaagctggatgtttggattatcagctgaagcgatcgatcctttgatgcgtcgtgcagcgaagaccatcaatttcggtgttctctacggtatgagtgcccatcgtttgtcgcaggaattaggcattccctatgaagaagctgcggcgttcattcagcgctactttcaaagctatcccaaagttaaagcatggatcgagaagactctcgaagaaggccgcacacgtggttacgtagagaccttatttggacgtcgccgctatgttcccgatttaaacgctcgcgtgaaatctgtccgtgaagccgccgaacgcatggcgtggaacatgcctgtacagggcacggcagctgacctcatgaaacttgcaatggtgcgcctttttccacaattgcgtgaagttggtgcccgcatgctcttgcaggtccacgatgaactcttgttagaagcgccaaaagagcgtgcggaagaggtggcagccctcgcgaaagaggttatggaaggcgtgtggcccttagcggtgcctcttgaagtcgaagttggtattggcgaggattggttggctgccaaaggataatga

SEQ ID NO: 70 - protein, 841 aa, synthetic construct
  REGION 1..841: note = Variant of DNA polymerase I from Thermus sp. strain 2.9
MHHHHHHGGSGMLPLFEPKGRVLLVDGHHLAYRNFFALKGLTTSRGEPVQGVYGFAKSLLKALKEDGDVVIVVFDAKAPSFRHEAYEAYKAGRAPTPEDFPRQLALMKELVDLLGLERLEVPGFEADDVLATLAKKAEREGYEVQILTADRDLFQLLSPRISVLHPEGHRITPEWLWEKYGLRPEQWVDFRALAGDPSDNIPGVKGIGEKTALKLLKEWGSLENLLKNLDQVKPASVREKILAHLEDLKLSRELSRVRTDLPLEVDFRGRREPDWEGLKAFLERLEFGSLLHEFGLLESPLPAEEAPWPPPEGAFLGYRLSRPEPMWAELLALAASAQGRVYRAEDPHGALRGLKEVRGLLAKDLAVVALREGLDLPPTDDPMLLAYLLDPSNTTPEGVARRYGGEWTEDAGERALLAERLHANLLGRLQGEERLLWLYEEVEKPLSRVLAHMEATGVKLDVAYLEALSLEVAAEMRRLEEEVFRLAGHSFNLNSRDQLERVLFDELGLPPITKTEKTGKRSTSAAVLEALREVHPIVDKILQYRELAKLKGTYIDRLPALVHPKTGRLHTRFNQTATATGRLSSSDPNLQNIPVRTPLGQKIRKAFVAEEGWRLVALDYSQIELRVLAHLSGDENLIRVFQEGRDIHTQTASWMFGLSAEAIDPLMRRAAKTINFGVLYGMSAHRLSQELGIPYEEAAAFIQRYFQSYPKVKAWIEKTLEEGRTRGYVETLFGRRRYVPDLNARVKSVREAAERMAWNMPVQGTAADLMKLAMVRLFPQLREVGARMLLQVHDELLLEAPKERAEEVAALAKEVMEGVWPLAVPLEVEVGIGEDWLAAKG

SEQ ID NO: 71 - DNA, 2529 bp, synthetic construct
  misc_feature 1..2529: note = Variant of DNA polymerase I from Thermus sp. strain 2.9
  source 1..2529: mol_type = other DNA
atgcaccatcatcatcatcatggcggtagcggcatgttaccgttgttcgaacctaaaggtcgcgtgcttctggttgatggccatcatctcgcgtatcgtaacttctttgccctgaaaggattaaccaccagccgtggcgagccggtacagggtgtctacggctttgcaaagtcgctcctgaaagctctgaaagaagacggtgatgtggtgattgttgtctttgatgcgaaagcgccaagttttcgccacgaagcgtacgaagcttacaaagccgggcgtgctccaacgccggaagactttcctcgccaattggcgcttatgaaggaattagtggatttgcttggcctcgaacgcttggaagttcccggtttcgaggcagacgacgtattagcgactctcgcaaagaaagccgaacgtgagggctatgaagtccagatcttgacagcagatcgcgatcttttccagcttttatctccgcgcatttccgtgttacacccggaagggcatcgtatcaccccggaatggctctgggagaaatatggtttgcgtcccgaacaatgggtggattttcgcgccttagcgggcgatccgagcgacaatattccgggagttaaaggtatcggcgagaagacggcgctcaagctccttaaagaatgggggtcgttggagaacttgcttaagaatttagatcaggtcaaaccagcttcagtgcgtgagaagattcttgcacacctcgaagacctcaaattaagccgcgaattgtcgcgtgtacgcaccgatttgccgctcgaagttgatttccgtggccgccgcgaacctgactgggagggtcttaaagcgtttttagagcgtcttgaatttggttcgctcttgcatgaattcggccttttagaaagcccgttaccagccgaagaagcaccttggccaccgcccgaaggcgcgtttttaggttaccgtttgagtcgcccggaaccgatgtgggccgaattattggctcttgcagcgtctgcccagggacgtgtgtatcgcgcggaagaccctcatggtgcgctccgtggcctcaaagaagtccgtggactccttgccaaagacttagctgttgttgcattgcgcgaaggtcttgatttacctccgactgatgatccaatgcttcttgcgtacctcttggactcgtcaaacacgacgcccgaaggcgtagcccgtcgttacggcggcgagtggaccgaagatgcaggtgagcgcgcgttattggccgaacgtttgcacgccaatttattaggacgtttgcaaggcgaggaacgtctcctctggctttacgaagaagtggagaaaccattgagtcgcgtgctcgcgcatatggaagctaccggtgtcaaattagacgtggcgtatttggaggcactcagccttgaagccgctgccgaaatgcgccgcttggaggaagaagtattccgtttagcaggccactcctttaaccttaattctcgcgatcagttagaacgtgtgttgttcgatgaacttggtctccctcctatcaccaagacagagaagaccggtaaacgtagcacttcagcggcggttttagaagctcttcgcgaagtccatcccattgtggacaagatcttgcagtaccgcgaactcgcgaaattgaaaggcacctatattgaccgtcttccggcattagtccacccgaaaacgggacgcctccatacccgcttcaaccaaacagccacggcgaccggtcgtttgtcctcctctgatccaaaccttcagaatattccagtacgtaccccattgggccagcatatccgcaaagcgtttgtagctgaggagggttggcgtttagtggccctcgattatagccaaattgaattacgtgtccttgcccatctttctggcgatgagaacctcatccgcgtgtttcaggaaggccgcgacattcacactcaaacggcaagctggatgtttggagtgtcagcggaagcgatcgatcctttgatgcgtcgtgcagcgaagaccatcaatttcggtgttctctacggtatgagtgcccatcgtttgtcgcaggaattaggcattccctatgaagaagctgcggcgttcattcagcgctactttcaaagctatcccaaagttaaagcatggatcgagaagactctcgaagaaggccgcacacgtggttacgtagagaccttatttggacgtcgccgctatgttcccgatttaaatgctcgcgtgaaatctgtccgtgaagccgccgaacgcatggcgtttaacatgcctgtacagggcacggcagctgacctcatgaaacttgcaatggtgcgcctttttccacaattgcgtgaagttggtgcccgcatgctcttgcaggtccacgatgaactcttgttagaagcgccaaaagagcgtgcggaagaggtggcagccctcgcgaaagaggttatggaaggcgtgtggcccttagcggtgcctcttgaagtcgaagttggtattggcgaggattggttggctgccaaaggataatga

SEQ ID NO: 72 - protein, 841 aa, synthetic construct
  REGION 1..841: note = Variant of DNA polymerase I from Thermus sp. strain 2.9
MHHHHHHGGSGMLPLFEPKGRVLLVDGHHLAYRNFFALKGLTTSRGEPVQGVYGFAKSLLKALKEDGDVVIVVFDAKAPSFRHEAYEAYKAGRAPTPEDFPRQLALMKELVDLLGLERLEVPGFEADDVLATLAKKAEREGYEVQILTADRDLFQLLSPRISVLHPEGHRITPEWLWEKYGLRPEQWVDFRALAGDPSDNIPGVKGIGEKTALKLLKEWGSLENLLKNLDQVKPASVREKILAHLEDLKLSRELSRVRTDLPLEVDFRGRREPDWEGLKAFLERLEFGSLLHEFGLLESPLPAEEAPWPPPEGAFLGYRLSRPEPMWAELLALAASAQGRVYRAEDPHGALRGLKEVRGLLAKDLAVVALREGLDLPPTDDPMLLAYLLDSSNTTPEGVARRYGGEWTEDAGERALLAERLHANLLGRLQGEERLLWLYEEVEKPLSRVLAHMEATGVKLDVAYLEALSLEAAAEMRRLEEEVFRLAGHSFNLNSRDQLERVLFDELGLPPITKTEKTGKRSTSAAVLEALREVHPIVDKILQYRELAKLKGTYIDRLPALVHPKTGRLHTRFNQTATATGRLSSSDPNLQNIPVRTPLGQHIRKAFVAEEGWRLVALDYSQIELRVLAHLSGDENLIRVFQEGRDIHTQTASWMFGVSAEAIDPLMRRAAKTINFGVLYGMSAHRLSQELGIPYEEAAAFIQRYFQSYPKVKAWIEKTLEEGRTRGYVETLFGRRRYVPDLNARVKSVREAAERMAFNMPVQGTAADLMKLAMVRLFPQLREVGARMLLQVHDELLLEAPKERAEEVAALAKEVMEGVWPLAVPLEVEVGIGEDWLAAKG

SEQ ID NO: 73 - DNA, 2529 bp, synthetic construct
  misc_feature 1..2529: note = Variant of DNA polymerase I from Thermus sp. strain 2.9
  source 1..2529: mol_type = other DNA
atgcaccatcatcatcatcatggcggtagcggcatgttaccgttgttcgaacctaaaggtcgcgtgcttctggttgatggccatcatctcgcgtatcgtaacttctttgccctgaaaggattaaccaccagccgtggcgagccggtacagggtgtctacggctttgcaaagtcgctcctgaaagctctgaaagaagacggtgatgtggtgattgttgtctttgatgcgaaagcgccaagttttcgccacgaagcgtacgaagcttacaaagccgggcgtgctccaacgccggaagactttcctcgccaattggcgcttatgaaggaattagtggatttgcttggcctcgaacgcttggaagttcccggtttcgaggcagacgacgtattagcgactctcgcaaagaaagccgaacgtgagggctatgaagtccatatcttgacagcagatcgcgatcttttccagcttttatctccgcgcatttccgtgttacacccggaagggcatcgtatcaccccggaatggctctgggagaaatatggtttgcgtcccgaacaatgggtggattttcgcgccttagcgggcgatccgagcgacaatattccgggagttaaaggtatcggcgagaagacggcgctcaagctccttaaagaatgggggtcgttggagaacttgcttaagaatttagatcaggtcaaaccagcttcagtgcgtgagaagattcttgcacacctcgaagacctcaaattaagccgcgaattggtccgtgtacgcaccgatttgccgctcgaagttgatttccgtggccgccgcgaacctgactgggagggtcttaaagcgtttttagagcgtcttgaatttggttcgctcttgcatgaattcggccttttagaaagcccgttaccagccgaagaagcaccttggccaccgcccgaaggcgcgtttttaggttaccgtttgagtcgcccggaaccgatgtgggccgaattattggctcttgcagcgtctgcccagggacgtgtgtatcgcgcggaagaccctcatggtgcgctccgtggcctcaaagaagtccgtggactccttgccaaagacttagctgttgttgcattgcgcgaaggtcttgatttacctccgactgatgatccaatgcttcttgcgtacctcttggactcgtcaaacacgacgcccgaaggcgtagcccgtcgttacggcggcgagtggaccgaagatgcaggtgagcgcgcgttattggccgaacgtttgcacgccaatttattaggacgtttgcaaggcgaggaacgtctcctctggctttacgaagaagtggagaaaccattgagtcgcgtgctcgcgcatatggaagctaccggtgtcaaattagacgtggcgtatttggaggcactcagccttgaagccgctgccgaactgcgccgcttggaggaagaagtattccgtttagcaggccactcctttaaccttaattctcgcgatcagttagaacgtgtgttgttcgatgaacttggtctccctcctatcggcaagacagagaagaccggtaaacgtagcacttcagcggcggttttagaagctcttcgcgaagtccatcccattgtggacaagatcttgcagtaccgcgaactcgcgaaattgaaaggcacctatattgaccctcttccggcattagtccacccgaaaacgggacgcctccatacccgcttcaaccaaacagccacggcgaccggtcgtttgtcctcctctgatccaaaccttcagaatattccagtacgtaccccattgggccagaaaatccgcaaagcgtttgtagctgaggagggttggcgtttagtggccctcgattatagccaaattgaattacgtgtccttgcccatctttctggcgatgagaacctcatccgcgtgtttcaggaaggccgcgacattcacactcaaacggcaagctggatgtttggactgtcagcggaagcgatcgatcctttgatgcgtcgtgcagcgaagaccatcaatttcggtgttctctacggtatgagtgccgcgcgtttgtcgcaggaattaggcattccctatgaagaagctgcggcgttcattcagcgctactttcaaagctatcccaaagttaaagcatggatcgagaagactctcgaagaaggccgcacacgtggttacgtagagaccttatttggacgtcgccgctatgttcccgatttaactgctcgcgtgaaatctgtccgtgaagccgccgaacgcatggcgtttaacatgcctgtacagggcacggcagctgacctcatgaaacttgcaatggtgcgcctttttccacaattgcgtgaagttggtgcccgcatgctcttgcaggtccacgatgaactcttgttagaagcgccaaaagagcgtgcggaagaggtggcagccctcgcgaaagaggttatggaaggcgtgtggcccttagcggtgcctcttgaagtcgaagttggtattggcgaggattggttggctgccaaaggataatga

SEQ ID NO: 74 - protein, 841 aa, synthetic construct
  REGION 1..841: note = Variant of DNA polymerase I from Thermus sp. strain 2.9
MHHHHHHGGSGMLPLFEPKGRVLLVDGHHLAYRNFFALKGLTTSRGEPVQGVYGFAKSLLKALKEDGDVVIVVFDAKAPSFRHEAYEAYKAGRAPTPEDFPRQLALMKELVDLLGLERLEVPGFEADDVLATLAKKAEREGYEVHILTADRDLFQLLSPRISVLHPEGHRITPEWLWEKYGLRPEQWVDFRALAGDPSDNIPGVKGIGEKTALKLLKEWGSLENLLKNLDQVKPASVREKILAHLEDLKLSRELVRVRTDLPLEVDFRGRREPDWEGLKAFLERLEFGSLLHEFGLLESPLPAEEAPWPPPEGAFLGYRLSRPEPMWAELLALAASAQGRVYRAEDPHGALRGLKEVRGLLAKDLAVVALREGLDLPPTDDPMLLAYLLDSSNTTPEGVARRYGGEWTEDAGERALLAERLHANLLGRLQGEERLLWLYEEVEKPLSRVLAHMEATGVKLDVAYLEALSLEAAAELRRLEEEVFRLAGHSFNLNSRDQLERVLFDELGLPPIGKTEKTGKRSTSAAVLEALREVHPIVDKILQYRELAKLKGTYIDPLPALVHPKTGRLHTRFNQTATATGRLSSSDPNLQNIPVRTPLGQKIRKAFVAEEGWRLVALDYSQIELRVLAHLSGDENLIRVFQEGRDIHTQTASWMFGLSAEAIDPLMRRAAKTINFGVLYGMSAARLSQELGIPYEEAAAFIQRYFQSYPKVKAWIEKTLEEGRTRGYVETLFGRRRYVPDLTARVKSVREAAERMAFNMPVQGTAADLMKLAMVRLFPQLREVGARMLLQVHDELLLEAPKERAEEVAALAKEVMEGVWPLAVPLEVEVGIGEDWLAAKG

SEQ ID NO: 75 - DNA, 2529 bp, synthetic construct
  misc_feature 1..2529: note = Variant of DNA polymerase I from Thermus sp. strain 2.9
  source 1..2529: mol_type = other DNA
atgcaccatcatcatcatcatggcggtagcggcatgttaccgttgttcgaacctaaaggtcgcgtgcttctggttgatggccatcatctcgcgtatcgtaacttctttgccctgaaaggattaaccaccagccgtggcgagccggtacagggtgtctacggctttgcaaagtcgctcctgaaagctctgaaagaagacggtgatgtggtgattgttgtctttgatgcgaaagcgccaagttttcgccacgaagcgtacgaagcttacaaagccgggcgtgctccaacgccggaagactttcctcgccaattggcgcttatgaaggaattagtggatttgcttggcctcgaacgcttggaagttcccggtttcgaggcagacgacgtattagcgactctcgcaaagaaagccgaacgtgagggctatgaagtccatatcttgacagcagatcgcgatcttttccagcttttatctccgcgcatttccgtgttacacccggaagggcatcgtatcaccccggaatggctctgggagaaatatggtttgcgtcccgaacaatgggtggattttcgcgccttagcgggcgatccgagcgacaatattccgggagttaaaggtatcggcgagaagacggcgctcaagctccttaaagaatgggggtcgttggagaacttgcttaagaatttagatcaggtcaaaccagcttcagtgcgtgagaagattcttgcacacctcgaagacctcaaattaagccgcgaattgtcgcgtgtacgcaccgatttgccgctcgaagttgatttccgtggccgccgcgaacctgactgggagggtcttaaagcgtttttagagcgtcttgaatttggttcgctcttgcatgaattcggccttttagaaagcccgttaccagccgaagaagcaccttggccaccgcccgaaggcgcgtttttaggttaccgtttgagtcgcccggaaccgatgtgggccgaattattggctcttgcagcgtctgcccagggacgtgtgtatcgcgcggaagaccctcatggtgcgctccgtggcctcaaagaagtccgtggactccttgccaaagacttagctgttgttgcattgcgcgaaggtcttgatttacctccgactgatgatccaatgcttcttgcgtacctcttggactcgtcaaacacgacgcccgaacgcgtagcccgtcgttacggcggcgagtggaccgaagatgcaggtgagcgcgcgttattggccgaacgtttgcacgccaatttattaggacgtttgcaaggcgaggaacgtctcctctggctttacgaagaagtggagaaaccattgagtcgcgtgctcgcgcatatggaagctaccggtgtcaaattagacgtggcgtatttggaggcactcagccttgaagtcgctgccgaactgcgccgcttggaggaagaagtattccgtttagcaggccactcctttaaccttaattctcgcgatcagttagaacgtgtgttgttcgatgaacttggtctccctcctatcggtaagacagagaagaccggtaaacgtagcacttcagcggcggttttagaagctcttcgcgaagtccatcccattgtggacaagatcttgcagtaccgcgaactcgcgaaattgaaaggcacctatattgaccctcttccggcattagtccacccgaaaacgggacgcctccatacccgcttcaaccaaacagccacggcgaccggtcgtttgtcctcctctgatccaaaccttcagaatattccagtacgtaccccattgggccagaagatccgcaaagcgtttgtagctgaggagggttggcgtttagtggccctcgattatagccaaattgaattacgtgtccttgcccatctttctggcgatgagaacctcatccgcgtgtttcaggaaggccgcgacattcacactcaaacggcaagctggatgtttggattatcagctgaagcgatcgatcctttgatgcgtcgtgcagcgaagaccatcaatttcggtgttctctacggtatgagtgcccatcgtttgtcgcaggaattaggcattccctatgaagaagctgcggcgttcattcagcgctactttcaaagctatcccaaagttaaagcatggatcgagaagactctcgaagaaggccgcacacgtggttacgtagagaccttatttggacgtcgccgctatgttcccgatttaaatgctcgcgtgaaatctgtccgtgaagccgccgaacgcatggcgtggaacatgcctgtacagggcacggcagctgacctcatgaaacttgcaatggtgcgcctttttccacaattgcgtgaagttggtgcccgcatgctcttgcaggtccacgatgaactcttgttagaagcgccaaaagagcgtgcggaagaggtggcagccctcgcgaaagaggttatggaaggcgtgtggcccttagcggtgcctcttgaagtcgaagttggtattggcgaggattggttggctgccaaaggataatga

SEQ ID NO: 76 - protein, 841 aa, synthetic construct
  REGION 1..841: note = Variant of DNA polymerase I from Thermus sp. strain 2.9
MHHHHHHGGSGMLPLFEPKGRVLLVDGHHLAYRNFFALKGLTTSRGEPVQGVYGFAKSLLKALKEDGDVVIVVFDAKAPSFRHEAYEAYKAGRAPTPEDFPRQLALMKELVDLLGLERLEVPGFEADDVLATLAKKAEREGYEVHILTADRDLFQLLSPRISVLHPEGHRITPEWLWEKYGLRPEQWVDFRALAGDPSDNIPGVKGIGEKTALKLLKEWGSLENLLKNLDQVKPASVREKILAHLEDLKLSRELSRVRTDLPLEVDFRGRREPDWEGLKAFLERLEFGSLLHEFGLLESPLPAEEAPWPPPEGAFLGYRLSRPEPMWAELLALAASAQGRVYRAEDPHGALRGLKEVRGLLAKDLAVVALREGLDLPPTDDPMLLAYLLDSSNTTPERVARRYGGEWTEDAGERALLAERLHANLLGRLQGEERLLWLYEEVEKPLSRVLAHMEATGVKLDVAYLEALSLEVAAELRRLEEEVFRLAGHSFNLNSRDQLERVLFDELGLPPIGKTEKTGKRSTSAAVLEALREVHPIVDKILQYRELAKLKGTYIDPLPALVHPKTGRLHTRFNQTATATGRLSSSDPNLQNIPVRTPLGQKIRKAFVAEEGWRLVALDYSQIELRVLAHLSGDENLIRVFQEGRDIHTQTASWMFGLSAEAIDPLMRRAAKTINFGVLYGMSAHRLSQELGIPYEEAAAFIQRYFQSYPKVKAWIEKTLEEGRTRGYVETLFGRRRYVPDLNARVKSVREAAERMAWNMPVQGTAADLMKLAMVRLFPQLREVGARMLLQVHDELLLEAPKERAEEVAALAKEVMEGVWPLAVPLEVEVGIGEDWLAAKG

SEQ ID NO: 77 - DNA, 2529 bp, synthetic construct
  misc_feature 1..2529: note = Variant of DNA polymerase I from Thermus sp. strain 2.9
  source 1..2529: mol_type = other DNA
atgcaccatcatcatcatcatggcggtagcggcatgttaccgttgttcgaacctaaaggtcgcgtgcttctggttgatggccatcatctcgcgtatcgtaacttctttgccctgaaaggattaaccaccagccgtggcgagccggtacagggtgtctacggctttgcaaagtcgctcctgaaagctctgaaagaagacggtgatgtggtgattgttgtctttgatgcgaaagcgccaagttttcgccacgaagcgtacgaagcttacaaagccgggcgtgctccaacgccggaagactttcctcgccaattggcgcttatgaaggaattagtggatttgcttggcctcgaacgcttggaagttcccggtttcgaggcagacgacgtattagcgactctcgcaaagaaagccgaacgtgagggctatgaagtccagatcttgacagcagatcgcgatcttttccagcttttatctccgcgcatttccgtgttacacccggaagggcatcgtatcaccccggaatggctctgggagaaatatggtttgcgtcccgaacaatgggtggattttcgcgccttagcgggcgatccgagcgacaatattccgggagttaaaggtatcggcgagaagacggcgctcaagctccttaaagaatgggggtcgttggagaacttgcttaagaatttagatcaggtcaaaccagcttcagtgcgtgagaagattcttgcacacctcgaagacctcaaattaagccgcgaattggtccgtgtacgcaccgatttgccgctcgaagttgatttccgtggccgccgcgaacctgactgggagggtcttaaagcgtttttagagcgtcttgaatttggttcgctcttgcatgaattcggccttttagaaagcccgttaccagccgaagaagcaccttggccaccgcccgaaggcgcgtttttaggttaccgtttgagtcgcccggaaccgatgtgggccgaattattggctcttgcagcgtctgcccagggacgtgtgtatcgcgcggaagaccctcatggtgcgctccgtggcctcaaagaagtccgtggactccttgccaaagacttagctgttgttgcattgcgcgaaggtcttgatttacctccgactgatgatccaatgcttcttgcgtacctcttggactcgtcaaacacgacgcccgaacgcgtagcccgtcgttacggcggcgagtggaccgaagatgcaggtgagcgcgcgttattggccgaacgtttgcacgccaatttattaggacgtttgcaaggcgaggaacgtctcctctggctttacgaagaagtggagaaaccattgagtcgcgtgctcgcgcatatggaagctaccggtgtcaaattagacgtggcgtatttggaggcactcagccttgaagtcgctgccgaaatgcgccgcttggaggaagaagtattccgtttagcaggccactcctttaaccttaattctcgcgatcagttagaacgtgtgttgttcgatgaacttggtctccctcctatcaccaagacagagaagaccggtaaacgtagcacttcagcggcggttttagaagctcttcgcgaagtccatcccattgtggacaagatcttgcagtaccgcgaactcgcgaaattgaaaggcacctatattgaccgtcttccggcattagtccacccgaaaacgggacgcctccatacccgcttcaaccaaacagccacggcgaccggtcgtttgtcctcctctgatccaaaccttcagaatattccagtacgtaccccattgggccagaaaatccgcaaagcgtttgtagctgaggagggttggcgtttagtggccctcgattatagccaaattgaattacgtgtccttgcccatctttctggcgatgagaacctcatccgcgtgtttcaggaaggccgcgacattcacactcaaacggcaagctggatgtttggagtgtcagcggaagcgatcgatcctttgatgcgtcgtgcagcgaagaccatcaatttcggtgttctctacggtatgagtgcccatcgtttgtcgcaggaattaggcattccctatgaagaagctgcggcgttcattcagcgctactttcaaagctatcccaaagttaaagcatggatcgagaagactctcgaagaaggccgcacacgtggttacgtagagaccttatttggacgtcgccgctatgttcccgatttaactgctcgcgtgaaatctgtccgtgaagccgccgaacgcatggcgtggaacatgcctgtacagggcacggcagctgacctcatgaaacttgcaatggtgcgcctttttccacaattgcgtgaagttggtgcccgcatgctcttgcaggtccacgatgaactcttgttagaagcgccaaaagagcgtgcggaagaggtggcagccctcgcgaaagaggttatggaaggcgtgtggcccttagcggtgcctcttgaagtcgaagttggtattggcgaggattggttggctgccaaaggataatga

SEQ ID NO: 78 - protein, 841 aa, synthetic construct
  REGION 1..841: note = Variant of DNA polymerase I from Thermus sp. strain 2.9
MHHHHHHGGSGMLPLFEPKGRVLLVDGHHLAYRNFFALKGLTTSRGEPVQGVYGFAKSLLKALKEDGDVVIVVFDAKAPSFRHEAYEAYKAGRAPTPEDFPRQLALMKELVDLLGLERLEVPGFEADDVLATLAKKAEREGYEVQILTADRDLFQLLSPRISVLHPEGHRITPEWLWEKYGLRPEQWVDFRALAGDPSDNIPGVKGIGEKTALKLLKEWGSLENLLKNLDQVKPASVREKILAHLEDLKLSRELVRVRTDLPLEVDFRGRREPDWEGLKAFLERLEFGSLLHEFGLLESPLPAEEAPWPPPEGAFLGYRLSRPEPMWAELLALAASAQGRVYRAEDPHGALRGLKEVRGLLAKDLAVVALREGLDLPPTDDPMLLAYLLDSSNTTPERVARRYGGEWTEDAGERALLAERLHANLLGRLQGEERLLWLYEEVEKPLSRVLAHMEATGVKLDVAYLEALSLEVAAEMRRLEEEVFRLAGHSFNLNSRDQLERVLFDELGLPPITKTEKTGKRSTSAAVLEALREVHPIVDKILQYRELAKLKGTYIDRLPALVHPKTGRLHTRFNQTATATGRLSSSDPNLQNIPVRTPLGQKIRKAFVAEEGWRLVALDYSQIELRVLAHLSGDENLIRVFQEGRDIHTQTASWMFGVSAEAIDPLMRRAAKTINFGVLYGMSAHRLSQELGIPYEEAAAFIQRYFQSYPKVKAWIEKTLEEGRTRGYVETLFGRRRYVPDLTARVKSVREAAERMAWNMPVQGTAADLMKLAMVRLFPQLREVGARMLLQVHDELLLEAPKERAEEVAALAKEVMEGVWPLAVPLEVEVGIGEDWLAAKG

SEQ ID NO: 79 - DNA, 2529 bp, synthetic construct
  misc_feature 1..2529: note = Variant of DNA polymerase I from Thermus sp. strain 2.9
  source 1..2529: mol_type = other DNA
atgcaccatcatcatcatcatggcggtagcggcatgttaccgttgttcgaacctaaaggtcgcgtgcttctggttgatggccatcatctcgcgtatcgtaacttctttgccctgaaaggattaaccaccagccgtggcgagccggtacagggtgtctacggctttgcaaagtcgctcctgaaagctctgaaagaagacggtgatgtggtgattgttgtctttgatgcgaaagcgccaagttttcgccacgaagcgtacgaagcttacaaagccgggcgtgctccaacgccggaagactttcctcgccaattggcgcttatgaaggaattagtggatttgcttggcctcgaacgcttggaagttcccggtttcgaggcagacgacgtattagcgactctcgcaaagaaagccgaacgtgagggctatgaagtccagatcttgacagcagatcgcgatcttttccagcttttatctccgcgcgtctcggtgttacacccggaagggcatcgtatcaccccggaatggctctgggagaaatatggtttgcgtcccgaacaatgggtggattttcgcgccttagcgggcgatccgagcgacaatattccgggagttaaaggtatcggcgagaagacggcgctcaagctccttaaagaatgggggtcgttggagaacttgcttaagaatttagatcaggtcaaaccagagtcagtgcgtgagaagattcttgcacacctcgaagacctcaaattaagccgcgaattgtcccgtgtacgcaccgatttgccgctcgaagttgatttccgtggccgccgcgaacctgactgggagggtcttaaagcgtttttagagcgtcttgaatttggttcgctcttgcatgaattcggccttttagaaagcccgttaccagccgaagaagcaccttggccaccgcccgaaggcgcgtttttaggttaccgtttgagtcgcccggaaccgatgtgggccgaattattggctcttgcagcgtctgcccagggacgtgtgtatcgcgcggaagaccctcatggtgcgctccgtggcctcaaagaagtccgtggactccttgccaaagacttagctgttgttgcattgcgcgaaggtcttgatttacctccgactgatgatccaatgcttcttgcgtacctcttggacccgtcaaacacgacgcccgaaggcgtagcccgtcgttacggcggcgagtggaccgaagatgcaggcgagcgcgcgttattggccgaacgtttgcacgccaatttattaggacgtttgcaaggcgaggaacgtctcctctggctttacgaagaagtggagaaaccattgagtcgcgtgctcgcgcatatggaagctaccggtgtcaaattagacgtggcgtatttggaggcactcagccttgaagttgctgccgaaatgcgccgcttggaggaagaagtattccgtttagcaggccactcctttaaccttaattctcgcgatcagttagaacgtgtgttgttcgatgaacttggtctccctcctatcggcaagacagagaagaccggtaaacgtagcacttcagcggcggttttagaagctcttcgcgaagtccatcccattgtggacaagatcttgcagtaccgcgaactcgcgaaattgaaaggcacctatattgaccctcttccggcattagtccacccgaaaacgggacgcctccatacccgcttcaaccaaacagccacggcgaccggtcgtttgtcctcctctgatccaaaccttcagaatattccagtacgtaccccattgggccagaagatccgcaaagcgtttgtagctgaggagggttggcgtttagtggccctcgattatagccaaattgaattacgtgtccttgcccatctttctggcgatgagaacctcatccgcgtgtttcaggaaggcaaagacattcacactcaaacggcaagctggatgtttggattatcagctgaagcgatcgatcctttgatgcgtcgtgcagcgaagaccatcaatttcggtgttctctacggtatgagtgcccatcgtttgtcgcaggaattaggcattccctatgaagaagctgtggcgttcattcagcgctactttcaaagctatcccaaagttaaagcatggatcgagaagactctcgaagaaggccgcacacgtggttacgtagagaccttatttggacgtcgccgctatgttcccgatttaaacgctcgcgtgaaatctgtccgtgaagccgccgaacgcatggcgttcaacatgcctgtacagggcacggcagctgacctcatgaaacttgcaatggtgcgcctttttccacaattgcgtgaagttggtgcccgcatgctcttgcaggtccacgatgaactcttgttagaagcgccaaaagagcgtgcggaagaggtggcagccctcgcgaaagaggttatggaaggcgtgtggcccttagcggtgcctcttgaagtcgaagttggtattggcgaggattggttggctgccaaaggataatga

SEQ ID NO: 80 - protein, 841 aa, synthetic construct
  REGION 1..841: note = Variant of DNA polymerase I from Thermus sp. strain 2.9
MHHHHHHGGSGMLPLFEPKGRVLLVDGHHLAYRNFFALKGLTTSRGEPVQGVYGFAKSLLKALKEDGDVVIVVFDAKAPSFRHEAYEAYKAGRAPTPEDFPRQLALMKELVDLLGLERLEVPGFEADDVLATLAKKAEREGYEVQILTADRDLFQLLSPRVSVLHPEGHRITPEWLWEKYGLRPEQWVDFRALAGDPSDNIPGVKGIGEKTALKLLKEWGSLENLLKNLDQVKPESVREKILAHLEDLKLSRELSRVRTDLPLEVDFRGRREPDWEGLKAFLERLEFGSLLHEFGLLESPLPAEEAPWPPPEGAFLGYRLSRPEPMWAELLALAASAQGRVYRAEDPHGALRGLKEVRGLLAKDLAVVALREGLDLPPTDDPMLLAYLLDPSNTTPEGVARRYGGEWTEDAGERALLAERLHANLLGRLQGEERLLWLYEEVEKPLSRVLAHMEATGVKLDVAYLEALSLEVAAEMRRLEEEVFRLAGHSFNLNSRDQLERVLFDELGLPPIGKTEKTGKRSTSAAVLEALREVHPIVDKILQYRELAKLKGTYIDPLPALVHPKTGRLHTRFNQTATATGRLSSSDPNLQNIPVRTPLGQKIRKAFVAEEGWRLVALDYSQIELRVLAHLSGDENLIRVFQEGKDIHTQTASWMFGLSAEAIDPLMRRAAKTINFGVLYGMSAHRLSQELGIPYEEAVAFIQRYFQSYPKVKAWIEKTLEEGRTRGYVETLFGRRRYVPDLNARVKSVREAAERMAFNMPVQGTAADLMKLAMVRLFPQLREVGARMLLQVHDELLLEAPKERAEEVAALAKEVMEGVWPLAVPLEVEVGIGEDWLAAKG

SEQ ID NO: 81 - DNA, 2529 bp, synthetic construct
  misc_feature 1..2529: note = Variant of DNA polymerase I from Thermus sp. strain 2.9
  source 1..2529: mol_type = other DNA
atgcaccatcatcatcatcatggcggtagcggcatgttaccgttgttcgaacctaaaggtcgcgtgcttctggttgatggccatcatctcgcgtatcgtaacttctttgccctgaaaggattaaccaccagccgtggcgagccggtacagggtgtctacggctttgcaaagtcgctcctgaaagctctgaaagaagacggtgatgtggtgattgttgtctttgatgcgaaagcgccaagttttcgccacgaagcgtacgaagcttacaaagccgggcgtgctccaacgccggaagactttcctcgccaattggcgcttatgaaggaattagtggatttgcttggcctcgaacgcttggaagttcccggtttcgaggcagacgacgtattagcgactctcgcaaagaaagccgaacgtgagggctatgaagtccagatcttgacagcagatcgcgatcttttccagcttttatctccgcgcatttccgtgttacacccggaagggcatcgtatcaccccggaatggctctgggagaaatatggtttgcgtcccgaacaatgggtggattttcgcgccttagcgggcgatccgagcgacaatattccgggagttaaaggtatcggcgagaagacggcgctcaagctccttaaagaatgggggtcgttggagaacttgcttaagaatttagatcaggtcaaaccagcttcagtgcgtgagaagattcttgcacacctcgaagacctcaaattaagccgcgaattgtcccgtgtacgcaccgatttgccgctcgaagttgatttccgtggccgccgcgaacctgactgggagggtcttaaagcgtttttagagcgtcttgaatttggttcgctcttgcatgaattcggccttttagaaagcccgttaccagccgaagaagcaccttggccaccgcccgaaggcgcgtttttaggttaccgtttgagtcgcccggaaccgatgtgggccgaattattggctcttgcagcgtctgcccagggacgtgtgtatcgcgcggaagaccctcatggtgcgctccgtggcctcaaagaagtccgtggactccttgccaaagacttagctgttgttgcattgcgcgaaggtcttgatttacctccgactgatgatccaatgcttcttgcgtacctcttggacccgtcaaacacgacgcccgaaggcgtagcccgtcgttacggcggcgagtggaccgaagatgcaggtgagcgcgcgttattggccgaacgtttgcacgccaatttattaggacgtttgcaaggcgaggaacgtctcctctggctttacgaagaagtggagaaaccattgagtcgcgtgctcgcgcatatggaagctaccggtgtcaaattagacgtggcgtatttggaggcactcagccttgaagctgctgccgaaatgcgccgcttggaggaagaagtattccgtttagcaggccactcctttaaccttaattctcgcgatcagttagaacgtgtgttgttcgatgaacttggtctccctcctatcggcaagacagagaagaccggtaaacgtagcacttcagcggcggttttagaagctcttcgcgaagtccatcccattgtggacaagatcttgcagtaccgcgaactcgcgaaattgaaaggcacctatattgaccctcttccggcattagtccacccgaaaacgggacgcctccatacccgcttcaaccaaacagccacggcgaccggtcgtttgtcctcctctgatccaaaccttcagaatattccagtacgtaccccattgggccagaagatccgcaaagcgtttgtagctgaggagggttggcgtttagtggccctcgattatagccaaattgaattacgtgtccttgcccatctttctggcgatgagaacctcatccgcgtgtttcaggaaggccgcgacattcacactcaaacggcaagctggatgtttggattatcagctgaagcgatcgatcctttgatgcgtcgtgcagcgaagaccatcaatttcggtgttctctacggtatgagtgcccatcgtttgtcgcaggaattaggcattccctatgaagaagctgcggcgttcattcagcgctactttcaaagctatcccaaagttaaagcatggatcgagaagactctcgaagaaggccgcacacgtggttacgtagagaccttatttggacgtcgccgctatgttcccgatttaaacgctcgcgtgaaatctgtccgtgaagccgccgaacgcatggcgttcaacatgcctgtacagggcacggcagctgacctcatgaaacttgcaatggtgcgcctttttccacaattgcgtgaagttggtgcccgcatgctcttgcaggtccacgatgaactcttgttagaagcgccaaaagagcgtgcggaagaggtggcagccctcgcgaaagaggttatggaaggcgtgtggcccttagcggtgcctcttgaagtcgaagttggtattggcgaggattggttggctgccaaaggataatga

SEQ ID NO: 82 - protein, 841 aa, synthetic construct
  REGION 1..841: note = Variant of DNA polymerase I from Thermus sp. strain 2.9
MHHHHHHGGSGMLPLFEPKGRVLLVDGHHLAYRNFFALKGLTTSRGEPVQGVYGFAKSLLKALKEDGDVVIVVFDAKAPSFRHEAYEAYKAGRAPTPEDFPRQLALMKELVDLLGLERLEVPGFEADDVLATLAKKAEREGYEVQILTADRDLFQLLSPRISVLHPEGHRITPEWLWEKYGLRPEQWVDFRALAGDPSDNIPGVKGIGEKTALKLLKEWGSLENLLKNLDQVKPASVREKILAHLEDLKLSRELSRVRTDLPLEVDFRGRREPDWEGLKAFLERLEFGSLLHEFGLLESPLPAEEAPWPPPEGAFLGYRLSRPEPMWAELLALAASAQGRVYRAEDPHGALRGLKEVRGLLAKDLAVVALREGLDLPPTDDPMLLAYLLDPSNTTPEGVARRYGGEWTEDAGERALLAERLHANLLGRLQGEERLLWLYEEVEKPLSRVLAHMEATGVKLDVAYLEALSLEAAAEMRRLEEEVFRLAGHSFNLNSRDQLERVLFDELGLPPIGKTEKTGKRSTSAAVLEALREVHPIVDKILQYRELAKLKGTYIDPLPALVHPKTGRLHTRFNQTATATGRLSSSDPNLQNIPVRTPLGQKIRKAFVAEEGWRLVALDYSQIELRVLAHLSGDENLIRVFQEGRDIHTQTASWMFGLSAEAIDPLMRRAAKTINFGVLYGMSAHRLSQELGIPYEEAAAFIQRYFQSYPKVKAWIEKTLEEGRTRGYVETLFGRRRYVPDLNARVKSVREAAERMAFNMPVQGTAADLMKLAMVRLFPQLREVGARMLLQVHDELLLEAPKERAEEVAALAKEVMEGVWPLAVPLEVEVGIGEDWLAAKG

SEQ ID NO: 83 - DNA, 2529 bp, synthetic construct
  misc_feature 1..2529: note = Variant of DNA polymerase I from Thermus sp. strain 2.9
  source 1..2529: mol_type = other DNA
atgcaccatcatcatcatcatggcggtagcggcatgttaccgttgttcgaacctaaaggtcgcgtgcttctggttgatggccatcatctcgcgtatcgtaacttctttgccctgaaaggattaaccaccagccgtggcgagccggtacagggtgtctacggctttgcaaagtcgctcctgaaagctctgaaagaagacggtgatgtggtgattgttgtctttgatgcgaaagcgccaagttttcgccacgaagcgtacgaagcttacaaagccgggcgtgctccaacgccggaagactttcctcgccaattggcgcttatgaaggaattagtggatttgcttggcctcgaacgcttggaagttcccggtttcgaggcagacgacgtattagcgactctcgcaaagaaagccgaacgtgagggctatgaagtccagatcttgacagcagatcgcgatcttttccagcttttatctccgcgcatttccgtgttacacccggaagggcatcgtatcaccccggaatggctctgggagaaatatggtttgcgtcccgaacaatgggtggattttcgcgccttagcgggcgatccgagcgacaatattccgggagttaaaggtatcggcgagaagacggcgctcaagctccttaaagaatgggggtcgttggagaacttgcttaagaatttagatcaggtcaaaccagcttcagtgcgtgagaagattcttgcacacctcgaagacctcaaattaagccgcgaattggtccgtgtacgcaccgatttgccgctcgaagttgatttccgtggccgccgcgaacctgactgggagggtcttaaagcgtttttagagcgtcttgaactgggttcgctcttgcatgaattcggccttttagaaagcccgttaccagccgaagaagcaccttggccaccgcccgaaggcgcgtttttaggttaccgtttgagtcgcccggaaccgatgtgggccgaattattggctcttgcagcgtctgcccagggacgtgtgtatcgcgcggaagaccctcatggtgcgctccgtggcctcaaagaagtccgtggactccttgccaaagacttagctgttgttgcattgcgcgaaggtcttgatttacctccgactgatgatccaatgcttcttgcgtacctcttggactcgtcaaacacgacgcccgaaggcgtagcccgtcgttacggcggcgagtggaccgaagatgcaggtgagcgcgcgttattggccgaacgtttgcacgccaatttattaggacgtttgcaaggcgaggaacgtctcctctggctttacgaagaagtggagaaaccattgagtcgcgtgctcgcgcatatggaagctaccggtgtcaaattagacgtggcgtatttggaggcactcagccttgaagccgctgccgaaatgcgccgcttggaggaagaagtattccgtttagcaggccactcctttaaccttaattctcgcgatcagttagaacgtgtgttgttcgatgaacttggtctccctcctatcggtaagacagagaagaccggtaaacgtagcacttcagcggcggttttagaagctcttcgcgaagtccatcccattgtggacaagatcttgcagtaccgcgaactcgcgaaattgaaaggcacctatattgaccgtcttccggcattagtccacccgaaaacgggacgcctccatacccgcttcaaccaaacagccacggcgaccggtcgtttgtcctcctctgatccaaaccttcagaatattccagtacgtaccccattgggccagaaaatccgcaaagcgtttgtagctgaggagggttggcgtttagtggccctcgattatagccaaattgaattacgtgtccttgcccatctttctggcgatgagaacctcatccgcgtgtttcaggaaggccgcgacattcacactcaaacggcaagctggatgtttggagtgtcatcggaagcgatcgatcctttgatgcgtcgtgcagcgaagaccatcaatttcggtgttctctacggtatgagtgcccatcgtttgtcgcaggaattaggcattccctatgaagaagctgcggcgttcattcagcgctactttcaaagctatcccaaagttaaagcatggatcgagaagactctcgaagaaggccgcacacgtggttacgtagagaccttatttggacgtcgccgctatgttcccgatttaaatgctcgcgtgaaatctgtccgtgaagccgccgaacgcatggcgtttaacatgcctgtacagggcacggcagctgacctcatgaaacttgcaatggtgcgcctttttccacaattgcgtgaagttggtgcccgcatgctcttgcaggtccacgatgaactcttgttagaagcgccaaaagagcgtgcggaagaggtggcagccctcgcgaaagaggttatggaaggcgtgtggcccttagcggtgcctcttgaagtcgaagttggtattggcgaggattggttggctgccaaaggataatga

SEQ ID NO: 84 - protein, 841 aa, synthetic construct
  REGION 1..841: note = Variant of DNA polymerase I from Thermus sp. strain 2.9
MHHHHHHGGSGMLPLFEPKGRVLLVDGHHLAYRNFFALKGLTTSRGEPVQGVYGFAKSLLKALKEDGDVVIVVFDAKAPSFRHEAYEAYKAGRAPTPEDFPRQLALMKELVDLLGLERLEVPGFEADDVLATLAKKAEREGYEVQILTADRDLFQLLSPRISVLHPEGHRITPEWLWEKYGLRPEQWVDFRALAGDPSDNIPGVKGIGEKTALKLLKEWGSLENLLKNLDQVKPASVREKILAHLEDLKLSRELVRVRTDLPLEVDFRGRREPDWEGLKAFLERLELGSLLHEFGLLESPLPAEEAPWPPPEGAFLGYRLSRPEPMWAELLALAASAQGRVYRAEDPHGALRGLKEVRGLLAKDLAVVALREGLDLPPTDDPMLLAYLLDSSNTTPEGVARRYGGEWTEDAGERALLAERLHANLLGRLQGEERLLWLYEEVEKPLSRVLAHMEATGVKLDVAYLEALSLEAAAEMRRLEEEVFRLAGHSFNLNSRDQLERVLFDELGLPPIGKTEKTGKRSTSAAVLEALREVHPIVDKILQYRELAKLKGTYIDRLPALVHPKTGRLHTRFNQTATATGRLSSSDPNLQNIPVRTPLGQKIRKAFVAEEGWRLVALDYSQIELRVLAHLSGDENLIRVFQEGRDIHTQTASWMFGVSSEAIDPLMRRAAKTINFGVLYGMSAHRLSQELGIPYEEAAAFIQRYFQSYPKVKAWIEKTLEEGRTRGYVETLFGRRRYVPDLNARVKSVREAAERMAFNMPVQGTAADLMKLAMVRLFPQLREVGARMLLQVHDELLLEAPKERAEEVAALAKEVMEGVWPLAVPLEVEVGIGEDWLAAKG

SEQ ID NO: 85 - DNA, 2529 bp, synthetic construct
  misc_feature 1..2529: note = Variant of DNA polymerase I from Thermus sp. strain 2.9
  source 1..2529: mol_type = other DNA
atgcaccatcatcatcatcatggcggtagcggcatgttaccgttgttcgaacctaaaggtcgcgtgcttctggttgatggccatcatctcgcgtatcgtaacttctttgccctgaaaggattaaccaccagccgtggcgagccggtacagggtgtctacggctttgcaaagtcgctcctgaaagctctgaaagaagacggtgatgtggtgattgttgtctttgatgcgaaagcgccaagttttcgccacgaagcgtacgaagcttacaaagccgggcgtgctccaacgccggaagactttcctcgccaattggcgcttatgaaggaattagtggatttgcttggcctcgaacgcttggaagttcccggtttcgaggcagacgacgtattagcgactctcgcaaagaaagccgaacgtgagggctatgaagtccagatcttgacagcagatcgcgatcttttccagcttttatctccgcgcatttccgtgttacacccggaagggcatcgtatcaccccggaatggctctgggagaaatatggtttgcgtcccgaacaatgggtggattttcgcgccttagcgggcgatccgagcgacaatattccgggagttaaaggtatcggcgagaagacggcgctcaagctccttaaagaatgggggtcgttggagaacttgcttaagaatttagatcaggtcaaaccagcttcagtgcgtgagaagattcttgcacacctcgaagacctcaaattaagccgcgaattgtcccgtgtacgcaccgatttgccgctcgaagttgatttccgtggccgccacgaacctgactgggagggtcttaaagcgtttttagagcgtcttgaatttggttcgctcttgcatgaattcggccttttagaaagcccgttaccagccgaagaagcaccttggccaccgcccgaaggcgcgtttttaggttaccgtttgagtcgcccggaaccgatgtgggccgaattattggctcttgcagcgtctgcccagggacgtgtgtatcgcgcggaagaccctcatggtgcgctccgtggcctcaaagaagtccgtggactccttgccaaagacttagctgttgttgcattgcgcgaaggtcttgatttacctccgactgatgatccaatgcttcttgcgtacctcttggacccgtcaaacacgacgcccgaaggcgtagcccgtcgttacggcggcgagtggaccgaagatgcaggtgagcgcgcgttattggccgaacgtttgcacgccaatttattaggacgtttgcaaggcgaggaacgtctcctctggctttacgaagaagtggagaaaccattgagtcgcgtgctcgcgcatatggaagctaccggtgtcaaattagacgtggcgtatttggaggcactcagccttgaagctgctgccgaaatgcgccgcttggaggaagaagtattccgtttagcaggccactcctttaaccttaattctcgcgatcagttagaacgtgtgttgttcgatgaacttggtctccctcctatcggcaagacagagaagaccggtaaacgtagcacttcagcggcggttttagaagctcttcgcgaagtccatcccattgtggacaagatcttgcagtaccgcgaactcgcgaaattgaaaggcacctatattgaccctcttccggcattagtccacccgaaaacgggacgcctccatacccgcttcaaccaaacagccacggcgaccggtcgtttgtcctcctctgatccaaaccttcagaatattccagtacgtaccccattgggccagaagatccgcaaagcgtttgtagctgaggagggttggcgtttagtggccctcgattatagccaaattgaattacgtgtccttgcccatctttctggcgatgagaacctcatccgcgtgtttcaggaaggccgcgacattcacactcaaacggcaagctggatgtttggattatcagctgaagcgatcgatcctttgatgcgtcgtgcagcgaagaccatcaatttcggtgttctctacggtatgagtgcccatcgtttgtcgcaggaattaggcattccctatgaagaagctgcggcgttcattcagcgctactttcaaagctatcccaaagttaaagcatggatcgagaagactctcgaagaaggccgcacacgtggttacgtagagaccttatttggacgtcgccgctatgttcccgatttaaacgctcgcgtgaaatctgtccgtgaagccgccgaacgcatggcgttcaacatgcctgtacagggcacggcagctgacctcatgaaacttgcaatggtgcgcctttttccacaattgcgtgaagttggtgcccgcatgctcttgcaggtccacgatgaactcttgttagaagcgccaaaagagcgtgcggaagaggtggcagccctcgcgaaagaggttatggaaggcgtgtggcccttagcggtgcctcttgaagtcgaagttggtattggcgaggattggttggctgccaaaggataatga

SEQ ID NO: 86 - protein, 841 aa, synthetic construct
  REGION 1..841: note = Variant of DNA polymerase I from Thermus sp. strain 2.9
MHHHHHHGGSGMLPLFEPKGRVLLVDGHHLAYRNFFALKGLTTSRGEPVQGVYGFAKSLLKALKEDGDVVIVVFDAKAPSFRHEAYEAYKAGRAPTPEDFPRQLALMKELVDLLGLERLEVPGFEADDVLATLAKKAEREGYEVQILTADRDLFQLLSPRISVLHPEGHRITPEWLWEKYGLRPEQWVDFRALAGDPSDNIPGVKGIGEKTALKLLKEWGSLENLLKNLDQVKPASVREKILAHLEDLKLSRELSRVRTDLPLEVDFRGRHEPDWEGLKAFLERLEFGSLLHEFGLLESPLPAEEAPWPPPEGAFLGYRLSRPEPMWAELLALAASAQGRVYRAEDPHGALRGLKEVRGLLAKDLAVVALREGLDLPPTDDPMLLAYLLDPSNTTPEGVARRYGGEWTEDAGERALLAERLHANLLGRLQGEERLLWLYEEVEKPLSRVLAHMEATGVKLDVAYLEALSLEAAAEMRRLEEEVFRLAGHSFNLNSRDQLERVLFDELGLPPIGKTEKTGKRSTSAAVLEALREVHPIVDKILQYRELAKLKGTYIDPLPALVHPKTGRLHTRFNQTATATGRLSSSDPNLQNIPVRTPLGQKIRKAFVAEEGWRLVALDYSQIELRVLAHLSGDENLIRVFQEGRDIHTQTASWMFGLSAEAIDPLMRRAAKTINFGVLYGMSAHRLSQELGIPYEEAAAFIQRYFQSYPKVKAWIEKTLEEGRTRGYVETLFGRRRYVPDLNARVKSVREAAERMAFNMPVQGTAADLMKLAMVRLFPQLREVGARMLLQVHDELLLEAPKERAEEVAALAKEVMEGVWPLAVPLEVEVGIGEDWLAAKG

SEQ ID NO: 87 - DNA, 2529 bp, synthetic construct
  misc_feature 1..2529: note = Variant of DNA polymerase I from Thermus sp. strain 2.9
  source 1..2529: mol_type = other DNA
atgcaccatcatcatcatcatggcggtagcggcatgttaccgttgttcgaacctaaaggtcgcgtgcttctggttgatggccatcatctcgcgtatcgtaacttctttgccctgaaaggattaaccaccagccgtggcgagccggtacagggtgtctacggctttgcaaagtcgctcctgaaagctctgaaagaagacggtgatgtggtgattgttgtctttgatgcgaaagcgccaagttttcgccacgaagcgtacgaagcttacaaagccgggcgtgctccaacgccggaagactttcctcgccaattggcgcttatgaaggaattagtggatttgcttggcctcgaacgcttggaagttcccggtttcgaggcagacgacgtattagcgactctcgcaaagaaagccgaacgtgagggctatgaagtccagatcttgacagcagatcgcgatcttttccagcttttatctccgcgcatttccgtgttacacccggaagggcatcgtatcaccccggaatggctctgggagaaatatggtttgcgtcccgaacaatgggtggattttcgcgccttagcgggcgatccgagcgacaatattccgggagttaaaggtatcggcgagaagacggcgctcaagctccttaaagaatgggggtcgttggagaacttgcttaagaatttagatcaggtcaaaccagcttcagtgcgtgagaagattcttgcacacctcgaagacctcaaattaagccgcgaattgtcgcgtgtacgcaccgatttgccgctcgaagttgatttccgtggccgccgcgaacctgactgggagggtcttaaagcgtttttagagcgtcttgaatttggttcgctcttgcatgaattcggccttttagaaagcccgttaccagccgaagaagcaccttggccaccgcccgaaggcgcgtttttaggttaccgtttgagtcgcccggaaccgatgtgggccgaattattggctcttgcagcgtctgcccagggacgtgtgtatcgcgcggaagaccctcatggtgcgctccgtggcctcaaagaagtccgtggactccttgccaaagacttagctgttgttgcattgcgcgaaggtcttgatttacctccgactgatgatccaatgcttcttgcgtacctcttggacccgtcaaacacgacgcccgaaggcgtagcccgtcgttacggcggcgagtggaccgaagatgcaggtgagcgcgcgttattggccgaacgtttgcacgccaatttattaggacgtttgcaaggcgaggaacgtctcctctggctttacgaagaagtggagaaaccattgagtcgcgtgctcgcgcatatggaagctaccggtgtcaaattagacgtggcgtatttggaggcactcagccttgaagtcgctgccgaactgcgccgcttggaggaagaagtattccgtttagcaggccactcctttaaccttaattctcgcgatcagttagaacgtgtgttgttcgatgaacttggtctccctcctatcggtaagacagagaagaccggtaaacgtagcacttcagcggcggttttagaagctcttcgcgaagtccatcccattgtggacaagatcttgcagtaccgcgaactcgcgaaattgaaaggcacctatattgaccctcttccggcattagtccacccgaaaacgggacgcctccatacccgcttcaaccaaacagccacggcgaccggtcgtttgtcctcctctgatccaaaccttcagaatattccagtacgtaccccattgggccagaagatccgcaaagcgtttgtagctgaggagggttggcgtttagtggccctcgattatagccaaattgaattacgtgtccttgcccatctttctggcgatgagaacctcatccgcgtgtttcaggaaggccgcgacattcacactcaaacggcaagctggatgtttggattatcagctgaagcgatcgatcctttgatgcgtcgtgcagcgaagaccatcaatttcggtgttctctacggtatgagtgccgcgcgtttgtcgcaggaattaggcattccctatgaagaagctgcggcgttcattcagcgctactttcaaagctatcccaaagttaaagcatggatcgagaagactctcgaagaaggccgcacacgtggttacgtagagaccttatttggacgtcgccgctatgttcccgatttaaacgctcgcgtgaaatctgtccgtgaagccgccgaacgcatggcgttcaacatgcctgtacagggcacggcagctgacctcatgaaacttgcaatggtgcgcctttttccacaattgcgtgaagttggtgcccgcatgctcttgcaggtccacgatgaactcttgttagaagcgccaaaagagcgtgcggaagaggtggcagccctcgcgaaagaggttatggaaggcgtgtggcccttagcggtgcctcttgaagtcgaagttggtattggcgaggattggttggctgccaaaggataatga

SEQ ID NO: 88 - protein, 841 aa, synthetic construct
  REGION 1..841: note = Variant of DNA polymerase I from Thermus sp. strain 2.9
MHHHHHHGGSGMLPLFEPKGRVLLVDGHHLAYRNFFALKGLTTSRGEPVQGVYGFAKSLLKALKEDGDVVIVVFDAKAPSFRHEAYEAYKAGRAPTPEDFPRQLALMKELVDLLGLERLEVPGFEADDVLATLAKKAEREGYEVQILTADRDLFQLLSPRISVLHPEGHRITPEWLWEKYGLRPEQWVDFRALAGDPSDNIPGVKGIGEKTALKLLKEWGSLENLLKNLDQVKPASVREKILAHLEDLKLSRELSRVRTDLPLEVDFRGRREPDWEGLKAFLERLEFGSLLHEFGLLESPLPAEEAPWPPPEGAFLGYRLSRPEPMWAELLALAASAQGRVYRAEDPHGALRGLKEVRGLLAKDLAVVALREGLDLPPTDDPMLLAYLLDPSNTTPEGVARRYGGEWTEDAGERALLAERLHANLLGRLQGEERLLWLYEEVEKPLSRVLAHMEATGVKLDVAYLEALSLEVAAELRRLEEEVFRLAGHSFNLNSRDQLERVLFDELGLPPIGKTEKTGKRSTSAAVLEALREVHPIVDKILQYRELAKLKGTYIDPLPALVHPKTGRLHTRFNQTATATGRLSSSDPNLQNIPVRTPLGQKIRKAFVAEEGWRLVALDYSQIELRVLAHLSGDENLIRVFQEGRDIHTQTASWMFGLSAEAIDPLMRRAAKTINFGVLYGMSAARLSQELGIPYEEAAAFIQRYFQSYPKVKAWIEKTLEEGRTRGYVETLFGRRRYVPDLNARVKSVREAAERMAFNMPVQGTAADLMKLAMVRLFPQLREVGARMLLQVHDELLLEAPKERAEEVAALAKEVMEGVWPLAVPLEVEVGIGEDWLAAKG

SEQ ID NO: 89 - DNA, 2529 bp, synthetic construct
  misc_feature 1..2529: note = Variant of DNA polymerase I from Thermus sp. strain 2.9
  source 1..2529: mol_type = other DNA
atgcaccatcatcatcatcatggcggtagcggcatgttaccgttgttcgaacctaaaggtcgcgtgcttctggttgatggccatcatctcgcgtatcgtaacttctttgccctgaaaggattaaccaccagccgtggcgagccggtacagggtgtctacggctttgcaaagtcgctcctgaaagctctgaaagaagacggtgatgtggtgattgttgtctttgatgcgaaagcgccaagttttcgccacgaagcgtacgaagcttacaaagccgggcgtgctccaacgccggaagactttcctcgccaattggcgcttatgaaggaattagtggatttgcttggcctcgaacgcttggaagttcccggtttcgaggcagacgacgtattagcgactctcgcaaagaaagccgaacgtgagggctatgaagtccatatcttgacagcagatcgcgatcttttccagcttttatctccgcgcatttccgtgttacacccggaagggcatcgtatcaccccggaatggctctgggagaaatatggtttgcgtcccgaacaatgggtggattttcgcgccttagcgggcgatccgagcgacaatattccgggagttaaaggtatcggcgagaagacggcgctcaagctccttaaagaatgggggtcgttggagaacttgcttaagaatttagatcaggtcaaaccagcttcagtgcgtgagaagattcttgcacacctcgaagacctcaaattaagccgcgaattgtcgcgtgtacgcaccgatttgccgctcgaagttgatttccgtggccgccgcgaacctgactgggagggtcttaaagcgtttttagagcgtcttgaatttggttcgctcttgcatgaattcggccttttagaaagcccgttaccagccgaagaagcaccttggccaccgcccgaaggcgcgtttttaggttaccgtttgagtcgcccggaaccgatgtgggccgaattattggctcttgcagcgtctgcccagggacgtgtgtatcgcgcggaagaccctcatggtgcgctccgtggcctcaaagaagtccgtggactccttgccaaagacttagctgttgttgcattgcgcgaaggtcttgatttacctccgactgatgatccaatgcttcttgcgtacctcttggacccgtcaaacacgacgcccgaaggcgtagcccgtcgttacggcggcgagtggaccgaagatgcaggtgagcgcgcgttattggccgaacgtttgcacgccaatttattaggacgtttgcaaggcgaggaacgtctcctctggctttacgaagaagtggagaaaccattgagtcgcgtgctcgcgcatatggaagctaccggtgtcaaattagacgtggcgtatttggaggcactcagccttgaagttgctgccgaaatgcgccgcttggaggaagaagtattccgtttagcaggccactcctttaaccttaattctcgcgatcagttagaacgtgtgttgttcgatgaacttggtctccctcctatcaccaagacagagaagaccggtaaacgtagcacttcagcggcggttttagaagctcttcgcgaagtccatcccattgtggacaagatcttgcagtaccgcgaactcgcgaaattgaaaggcacctatattgaccctcttccggcattagtccacccgaaaacgggacgcctccatacccgcttcaaccaaacagccacggcgaccggtcgtttgtcctcctctgatccaaaccttcagaatattccagtacgtaccccattgggccagaagatccgcaaagcgtttgtagctgaggagggttggcgtttagtggccctcgattatagccaaattgaattacgtgtccttgcccatctttctggcgatgagaacctcatccgcgtgtttcaggaaggccgcgacattcacactcaaacggcaagctggatgtttggattatcagctgaagcgatcgatcctttgatgcgtcgtgcagcgaagaccatcaatttcggtgttctctacggtatgagtgccgcgcgtttgtcgcaggaattaggcattccctatgaagaagctgcggcgttcattcagcgctactttcaaagctatcccaaagttaaagcatggatcgagaagactctcgaagaaggccgcacacgtggttacgtagagaccttatttggacgtcgccgctatgttcccgatttaaacgctcgcgtgaaatctgtccgtgaagccgccgaacgcatggcgttcaacatgcctgtacagggcacggcagctgacctcatgaaacttgcaatggtgcgcctttttccacaattgcgtgaagttggtgcccgcatgctcttgcaggtccacgatgaactcttgttagaagcgccaaaagagcgtgcggaagaggtggcagccctcgcgaaagaggttatggaaggcgtgtggcccttagcggtgcctcttgaagtcgaagttggtattggcgaggattggttggctgccaaaggataatga

SEQ ID NO: 90 - protein, 841 aa, synthetic construct
  REGION 1..841: note = Variant of DNA polymerase I from Thermus sp. strain 2.9
MHHHHHHGGSGMLPLFEPKGRVLLVDGHHLAYRNFFALKGLTTSRGEPVQGVYGFAKSLLKALKEDGDVVIVVFDAKAPSFRHEAYEAYKAGRAPTPEDFPRQLALMKELVDLLGLERLEVPGFEADDVLATLAKKAEREGYEVHILTADRDLFQLLSPRISVLHPEGHRITPEWLWEKYGLRPEQWVDFRALAGDPSDNIPGVKGIGEKTALKLLKEWGSLENLLKNLDQVKPASVREKILAHLEDLKLSRELSRVRTDLPLEVDFRGRREPDWEGLKAFLERLEFGSLLHEFGLLESPLPAEEAPWPPPEGAFLGYRLSRPEPMWAELLALAASAQGRVYRAEDPHGALRGLKEVRGLLAKDLAVVALREGLDLPPTDDPMLLAYLLDPSNTTPEGVARRYGGEWTEDAGERALLAERLHANLLGRLQGEERLLWLYEEVEKPLSRVLAHMEATGVKLDVAYLEALSLEVAAEMRRLEEEVFRLAGHSFNLNSRDQLERVLFDELGLPPITKTEKTGKRSTSAAVLEALREVHPIVDKILQYRELAKLKGTYIDPLPALVHPKTGRLHTRFNQTATATGRLSSSDPNLQNIPVRTPLGQKIRKAFVAEEGWRLVALDYSQIELRVLAHLSGDENLIRVFQEGRDIHTQTASWMFGLSAEAIDPLMRRAAKTINFGVLYGMSAARLSQELGIPYEEAAAFIQRYFQSYPKVKAWIEKTLEEGRTRGYVETLFGRRRYVPDLNARVKSVREAAERMAFNMPVQGTAADLMKLAMVRLFPQLREVGARMLLQVHDELLLEAPKERAEEVAALAKEVMEGVWPLAVPLEVEVGIGEDWLAAKG

SEQ ID NO: 91 - DNA, 2529 bp, synthetic construct
  misc_feature 1..2529: note = Variant of DNA polymerase I from Thermus sp. strain 2.9
  source 1..2529: mol_type = other DNA
atgcaccatcatcatcatcatggcggtagcggcatgttaccgttgttcgaacctaaaggtcgcgtgcttctggttgatggccatcatctcgcgtatcgtaacttctttgccctgaaaggattaaccaccagccgtggcgagccggtacagggtgtctacggctttgcaaagtcgctcctgaaagctctgaaagaagacggtgatgtggtgattgttgtctttgatgcgaaagcgccaagttttcgccacgaagcgtacgaagcttacaaagccgggcgtgctccaacgccggaagactttcctcgccaattggcgcttatgaaggaattagtggatttgcttggcctcgaacgcttggaagttcccggtttcgaggcagacgacgtattagcgactctcgcaaagaaagccgaacgtgagggctatgaagtccagatcttgacagcagatcgcgatcttttccagcttttatctccgcgcatctcggtgttacacccggaagggcatcgcatcaccccggaatggctctgggagaaatatggtttgcgtcccgaacaatgggtggattttcgcgccttagcgggcgatccgagcgacaatattccgggagttaaaggtatcggcgagaagacggcgctcaagctccttaaagaatgggggtcgttggagaacttgcttaagaatttagatcaggtcaaaccagagtcagtgcgtgagaagattcttgcacacctcgaagacctcaaattaagcctggaattgtcccgtgtacgcaccgatttgccgctcgaagttgatttccgtcgccgccgcgaacctgactgggagggtcttaaagcgtttttagagcgtcttgaatttggttcgctcttgcatgaattcggccttttagaaagcccgttaccagccgaagaagcaccttggccaccgcccgaaggcgcgtttttaggttaccgtttgagtcgcccggaaccgatgtgggccgaattattggctcttgcagcgtctgcccagggacgtgtgtatcgcgcggaagaccctcatggtgcgctcaaaggcctcaaagaagtccgtggactccttgccaaagacttagctgttgttgcattgcgcgaaggtcttgatttacctccgactgatgatccaatgcttcttgcgtacctcttggacccgtcaaacacgacgcccgaaggcgtagcccgtcgttacggcggcgagtggaccgaagatgcaggcgagcgcgcgttattggccgaacgtttgcacgccaatttattaggacgtttgcaaggcgaggaacgtctcctctggctttacgaagaagtggagaaaccattgagtcgcgtgctcgcgcatatggaagctaccggtgtcaaattagacgtggcgtatttggaggcactcagccttgaagttgctgccgaaattcgccgcttggaggaagaagtattccgtttagcaggccactcctttaaccttaattctcgcgatcagttagaacgtgtgttgttcgatgaacttggtctccctcctatcggcaagacagagaagaccggtaaacgtagcacttcagcggcggttttagaagctcttcgcgaagtccatcccattgtggacaagatcttgcagtaccgcgaactcgcgaaattgaaaggcacctatattgaccctcttccggcattagtccacccgaaaacgggacgcctccatacccgcttcaaccaaacagccacggcgaccggtcgtttgtcctcctctgatccaaaccttcagaatattccagtacgtaccccattgggccagaagatccgcaaagcgtttgtagctgaggagggttggcgtttagtggccctcgattatagccaaattgaattacgtgtccttgcccatctttctggcgatgagaacctcatccgcgtgtttcaggaaggcaaagacattcacactcaaacggcaagctggatgtttggattatcagctgaagcgatcgatcctttgatgcgtcgtgcagcgaagaccgttaatttcggtgttctctacggtatgagtgcccatcgtttgtcgcaggaattaggcattccctatgaagaagctgcggcgttcattcagcgctactttcaaagctatcccaaagttaaagcatggatcgagaagactctcgaagaaggccgcacacgtggttacgtagagaccttatttggacgtcgccgctatgttcccgatttaaacgctcgcgtgaaatctgtccgtgaagccgccgaacgcatggcgttcaacatgcctgtacagggcacggcagctgacctcatgaaacttgcaatggtgcgcctttttccacaattgcgtgaagttggtgcccgcatgctcttgcaggtccacgatgaactcttgttagaagcgccaaaagagcgtgcggaagaggtggcagccctcgcgaaagaggttatggaaggcgtgtggcccttagcggtgcctcttgaagtcgaagttggtattggcgaggattggttggctgccaaaggataatga

SEQ ID NO: 92 - protein, 841 aa, synthetic construct
  REGION 1..841: note = Variant of DNA polymerase I from Thermus sp. strain 2.9
MHHHHHHGGSGMLPLFEPKGRVLLVDGHHLAYRNFFALKGLTTSRGEPVQGVYGFAKSLLKALKEDGDVVIVVFDAKAPSFRHEAYEAYKAGRAPTPEDFPRQLALMKELVDLLGLERLEVPGFEADDVLATLAKKAEREGYEVQILTADRDLFQLLSPRISVLHPEGHRITPEWLWEKYGLRPEQWVDFRALAGDPSDNIPGVKGIGEKTALKLLKEWGSLENLLKNLDQVKPESVREKILAHLEDLKLSLELSRVRTDLPLEVDFRRRREPDWEGLKAFLERLEFGSLLHEFGLLESPLPAEEAPWPPPEGAFLGYRLSRPEPMWAELLALAASAQGRVYRAEDPHGALKGLKEVRGLLAKDLAVVALREGLDLPPTDDPMLLAYLLDPSNTTPEGVARRYGGEWTEDAGERALLAERLHANLLGRLQGEERLLWLYEEVEKPLSRVLAHMEATGVKLDVAYLEALSLEVAAEIRRLEEEVFRLAGHSFNLNSRDQLERVLFDELGLPPIGKTEKTGKRSTSAAVLEALREVHPIVDKILQYRELAKLKGTYIDPLPALVHPKTGRLHTRFNQTATATGRLSSSDPNLQNIPVRTPLGQKIRKAFVAEEGWRLVALDYSQIELRVLAHLSGDENLIRVFQEGKDIHTQTASWMFGLSAEAIDPLMRRAAKTVNFGVLYGMSAHRLSQELGIPYEEAAAFIQRYFQSYPKVKAWIEKTLEEGRTRGYVETLFGRRRYVPDLNARVKSVREAAERMAFNMPVQGTAADLMKLAMVRLFPQLREVGARMLLQVHDELLLEAPKERAEEVAALAKEVMEGVWPLAVPLEVEVGIGEDWLAAKG

SEQ ID NO: 93 - DNA, 2529 bp, synthetic construct
  misc_feature 1..2529: note = Variant of DNA polymerase I from Thermus sp. strain 2.9
  source 1..2529: mol_type = other DNA
atgcaccatcatcatcatcatggcggtagcggcatgttaccgttgttcgaacctaaaggtcgcgtgcttctggttgatggccatcatctcgcgtatcgtaacttctttgccctgaaaggattaaccaccagccgtggcgagccggtacagggtgtctacggctttgcaaagtcgctcctgaaagctctgaaagaagacggtgatgtggtgattgttgtctttgatgcgaaagcgccaagttttcgccacgaagcgtacgaagcttacaaagccgggcgtgctccaacgccggaagactttcctcgccaattggcgcttatgaaggaattagtggatttgcttggcctcgaacgcttggaagttcccggtttcgaggcagacgacgtattagcgactctcgcaaagaaagccgaacgtgagggctatgaagtccatatcttgacagcagatcgcgatcttttccagcttttatctccgcgcatttccgtgttacacccggaagggcatcgtatcaccccggaatggctctgggagaaatatggtttgcgtcccgaacaatgggtggattttcgcgccttagcgggcgatccgagcgacaatattccgggagttaaaggtatcggcgagaagacggcgctcaagctccttaaagaatgggggtcgttggagaacttgcttaagaatttagatcaggtcaaaccagcttcagtgcgtgagaagattcttgcacacctcgaagacctcaaattaagccgcgaattgtcgcgtgtacgcaccgatttgccgctcgaagttgatttccgtggccgccgcgaacctgactgggagggtcttaaagcgtttttagagcgtcttgaactgggttcgctcttgcatgaattcggccttttagaaagcccgttaccagccgaagaagcaccttggccaccgcccgaaggcgcgtttttaggttaccgtttgagtcgcccggaaccgatgtgggccgaattattggctcttgcagcgtctgcccagggacgtgtgtatcgcgcggaagaccctcatggtgcgctccgtggcctcaaagaagtccgtggactccttgccaaagacttagctgttgttgcattgcgcgaaggtcttgatttacctccgactgatgatccaatgcttcttgcgtacctcttggactcgtcaaacacgacgcccgaaggcgtagcccgtcgttacggcggcgagtggaccgaagatgcaggtgagcgcgcgttattggccgaacgtttgcacgccaatttattaggacgtttgcaaggcgaggaacgtctcctctggctttacgaagaagtggagaaaccattgagtcgcgtgctcgcgcatatggaagctaccggtgtcaaattagacgtggcgtatttggaggcactcagccttgaagtcgctgccgaactgcgccgcttggaggaagaagtattccgtttagcaggccactcctttaaccttaattctcgcgatcagttagaacgtgtgttgttcgatgaacttggtctccctcctatcaccaagacagagaagaccggtaaacgtagcacttcagcggcggttttagaagctcttcgcgaagtccatcccattgtggacaagatcttgcagtaccgcgaactcgcgaaattgaaaggcacctatattgaccgtcttccggcattagtccacccgaaaacgggacgcctccatacccgcttcaaccaaacagccacggcgaccggtcgtttgtcctcctctgatccaaaccttcagaatattccagtacgtaccccattgggccagcatatccgcaaagcgtttgtagctgaggagggttggcgtttagtggccctcgattatagccaaattgaattacgtgtccttgcccatctttctggcgatgagaacctcatccgcgtgtttcaggaaggccgcgacattcacactcaaacggcaagctggatgtttggattatcagctgaagcgatcgatcctttgatgcgtcgtgcagcgaagaccatcaatttcggtgttctctacggtatgagtgcccatcgtttgtcgcaggaattaggcattccctatgaagaagctgcggcgttcattcagcgctactttcaaagctatcccaaagttaaagcatggatcgagaagactctcgaagaaggccgcacacgtggttacgtagagaccttatttggacgtcgccgctatgttcccgatttaaatgctcgcgtgaaatctgtccgtgaagccgccgaacgcatggcgtttaacatgcctgtacagggcacggcagctgacctcatgaaacttgcaatggtgcgcctttttccacaattgcgtgaagttggtgcccgcatgctcttgcaggtccacgatgaactcttgttagaagcgccaaaagagcgtgcggaagaggtggcagccctcgcgaaagaggttatggaaggcgtgtggcccttagcggtgcctcttgaagtcgaagttggtattggcgaggattggttggctgccaaaggataatga

SEQ ID NO: 94 - protein, 841 aa, synthetic construct
  REGION 1..841: note = Variant of DNA polymerase I from Thermus sp. strain 2.9
MHHHHHHGGSGMLPLFEPKGRVLLVDGHHLAYRNFFALKGLTTSRGEPVQGVYGFAKSLLKALKEDGDVVIVVFDAKAPSFRHEAYEAYKAGRAPTPEDFPRQLALMKELVDLLGLERLEVPGFEADDVLATLAKKAEREGYEVHILTADRDLFQLLSPRISVLHPEGHRITPEWLWEKYGLRPEQWVDFRALAGDPSDNIPGVKGIGEKTALKLLKEWGSLENLLKNLDQVKPASVREKILAHLEDLKLSRELSRVRTDLPLEVDFRGRREPDWEGLKAFLERLELGSLLHEFGLLESPLPAEEAPWPPPEGAFLGYRLSRPEPMWAELLALAASAQGRVYRAEDPHGALRGLKEVRGLLAKDLAVVALREGLDLPPTDDPMLLAYLLDSSNTTPEGVARRYGGEWTEDAGERALLAERLHANLLGRLQGEERLLWLYEEVEKPLSRVLAHMEATGVKLDVAYLEALSLEVAAELRRLEEEVFRLAGHSFNLNSRDQLERVLFDELGLPPITKTEKTGKRSTSAAVLEALREVHPIVDKILQYRELAKLKGTYIDRLPALVHPKTGRLHTRFNQTATATGRLSSSDPNLQNIPVRTPLGQHIRKAFVAEEGWRLVALDYSQIELRVLAHLSGDENLIRVFQEGRDIHTQTASWMFGLSAEAIDPLMRRAAKTINFGVLYGMSAHRLSQELGIPYEEAAAFIQRYFQSYPKVKAWIEKTLEEGRTRGYVETLFGRRRYVPDLNARVKSVREAAERMAFNMPVQGTAADLMKLAMVRLFPQLREVGARMLLQVHDELLLEAPKERAEEVAALAKEVMEGVWPLAVPLEVEVGIGEDWLAAKG

SEQ ID NO: 95 - DNA, 2529 bp, synthetic construct
  misc_feature 1..2529: note = Variant of DNA polymerase I from Thermus sp. strain 2.9
  source 1..2529: mol_type = other DNA
atgcaccatcatcatcatcatggcggtagcggcatgttaccgttgttcgaacctaaaggtcgcgtgcttctggttgatggccatcatctcgcgtatcgtaacttctttgccctgaaaggattaaccaccagccgtggcgagccggtacagggtgtctacggctttgcaaagtcgctcctgaaagctctgaaagaagacggtgatgtggtgattgttgtctttgatgcgaaagcgccaagttttcgccacgaagcgtacgaagcttacaaagccgggcgtgctccaacgccggaagactttcctcgccaattggcgcttatgaaggaattagtggatttgcttggcctcgaacgcttggaagttcccggtttcgaggcagacgacgtattagcgactctcgcaaagaaagccgaacgtgagggctatgaagtccagatcttgacagcagatcgcgatcttttccagcttttatctccgcgcatttccgtgttacacccggaagggcatcgtatcaccccggaatggctctgggagaaatatggtttgcgtcccgaacaatgggtggattttcgcgccttagcgggcgatccgagcgacaatattccgggagttaaaggtatcggcgagaagacggcgctcaagctccttaaagaatgggggtcgttggagaacttgcttaagaatttagatcaggtcaaaccagcttcagtgcgtgagaagattcttgcacacctcgaagacctcaaattaagccgcgaattgtcccgtgtacgcaccgatttgccgctcgaagttgatttccgtggccgccgcgaacctgactgggagggtcttaaagcgtttttagagcgtcttgaactgggttcgctcttgcatgaattcggccttttagaaagcccgttaccagccgaagaagcaccttggccaccgcccgaaggcgcgtttttaggttaccgtttgagtcgcccggaaccgatgtgggccgaattattggctcttgcagcgtctgcccagggacgtgtgtatcgcgcggaagaccctcatggtgcgctccgtggcctcaaagaagtccgtggactccttgccaaagacttagctgttgttgcattgcgcgaaggtcttgatttacctccgactgatgatccaatgcttcttgcgtacctcttggactcgtcaaacacgacgcccgaaggcgtagcccgtcgttacggcggcgagtggaccgaagatgcaggtgagcgcgcgttattggccgaacgtttgcacgccaatttattaggacgtttgcaaggcgaggaacgtctcctctggctttacgaagaagtggagaaaccattgagtcgcgtgctcgcgcatatggaagctaccggtgtcaaattagacgtggcgtatttggaggcactcagccttgaagttgctgccgaaatgcgccgcttggaggaagaagtattccgtttagcaggccactcctttaaccttaattctcgcgatcagttagaacgtgtgttgttcgatgaacttggtctccctcctatcggcaagacagagaagaccggtaaacgtagcacttcagcggcggttttagaagctcttcgcgaagtccatcccattgtggacaagatcttgcagtaccgcgaactcgcgaaattgaaaggcacctatattgaccgtcttccggcattagtccacccgaaaacgggacgcctccatacccgcttcaaccaaacagccacggcgaccggtcgtttgtcctcctctgatccaaaccttcagaatattccagtacgtaccccattgggccagaagatccgcaaagcgtttgtagctgaggagggttggcgtttagtggccctcgattatagccaaattgaattacgtgtccttgcccatctttctggcgatgagaacctcatccgcgtgtttcaggaaggccgcgacattcacactcaaacggcaagctggatgtttggattatcagctgaagcgatcgatcctttgatgcgtcgtgcagcgaagaccatcaatttcggtgttctctacggtatgagtgccgcgcgtttgtcgcaggaattaggcattccctatgaagaagctgcggcgttcattcagcgctactttcaaagctatcccaaagttaaagcatggatcgagaagactctcgaagaaggccgcacacgtggttacgtagagaccttatttggacgtcgccgctatgttcccgatttaaatgctcgcgtgaaatctgtccgtgaagccgccgaacgcatggcgttcaacatgcctgtacagggcacggcagctgacctcatgaaacttgcaatggtgcgcctttttccacaattgcgtgaagttggtgcccgcatgctcttgcaggtccacgatgaactcttgttagaagcgccaaaagagcgtgcggaagaggtggcagccctcgcgaaagaggttatggaaggcgtgtggcccttagcggtgcctcttgaagtcgaagttggtattggcgaggattggttggctgccaaaggataatga

SEQ ID NO: 96 - protein, 841 aa, synthetic construct
  REGION 1..841: note = Variant of DNA polymerase I from Thermus sp. strain 2.9
MHHHHHHGGSGMLPLFEPKGRVLLVDGHHLAYRNFFALKGLTTSRGEPVQGVYGFAKSLLKALKEDGDVVIVVFDAKAPSFRHEAYEAYKAGRAPTPEDFPRQLALMKELVDLLGLERLEVPGFEADDVLATLAKKAEREGYEVQILTADRDLFQLLSPRISVLHPEGHRITPEWLWEKYGLRPEQWVDFRALAGDPSDNIPGVKGIGEKTALKLLKEWGSLENLLKNLDQVKPASVREKILAHLEDLKLSRELSRVRTDLPLEVDFRGRREPDWEGLKAFLERLELGSLLHEFGLLESPLPAEEAPWPPPEGAFLGYRLSRPEPMWAELLALAASAQGRVYRAEDPHGALRGLKEVRGLLAKDLAVVALREGLDLPPTDDPMLLAYLLDSSNTTPEGVARRYGGEWTEDAGERALLAERLHANLLGRLQGEERLLWLYEEVEKPLSRVLAHMEATGVKLDVAYLEALSLEVAAEMRRLEEEVFRLAGHSFNLNSRDQLERVLFDELGLPPIGKTEKTGKRSTSAAVLEALREVHPIVDKILQYRELAKLKGTYIDRLPALVHPKTGRLHTRFNQTATATGRLSSSDPNLQNIPVRTPLGQKIRKAFVAEEGWRLVALDYSQIELRVLAHLSGDENLIRVFQEGRDIHTQTASWMFGLSAEAIDPLMRRAAKTINFGVLYGMSAARLSQELGIPYEEAAAFIQRYFQSYPKVKAWIEKTLEEGRTRGYVETLFGRRRYVPDLNARVKSVREAAERMAFNMPVQGTAADLMKLAMVRLFPQLREVGARMLLQVHDELLLEAPKERAEEVAALAKEVMEGVWPLAVPLEVEVGIGEDWLAAKG

SEQ ID NO: 97 - DNA, 2529 bp, synthetic construct
  misc_feature 1..2529: note = Variant of DNA polymerase I from Thermus sp. strain 2.9
  source 1..2529: mol_type = other DNA
atgcaccatcatcatcatcatggcggtagcggcatgttaccgttgttcgaacctaaaggtcgcgtgcttctggttgatggccatcatctcgcgtatcgtaacttctttgccctgaaaggattaaccaccagccgtggcgagccggtacagggtgtctacggctttgcaaagtcgctcctgaaagctctgaaagaagacggtgatgtggtgattgttgtctttgatgcgaaagcgccaagttttcgccacgaagcgtacgaagcttacaaagccgggcgtgctccaacgccggaagactttcctcgccaattggcgcttatgaaggaattagtggatttgcttggcctcgaacgcttggaagttcccggtttcgaggcagacgacgtattagcgactctcgcaaagaaagccgaacgtgagggctatgaagtccagatcttgacagcagatcgcgatcttttccagcttttatctccgcgcatctcggtgttacacccggaagggcatctgatcaccccggaatggctctgggagaaatatggtttgcgtcccgaacaatgggtggattttcgcgccttagtaggcgatccgagcgacaatattccgggagttaaaggtatcggcgagaagacggcgctcaagctccttaaagaatgggggtcgttggagaacttgcttaagaatttagatcaggtcaaaccagagtcagtgcgtgagaagattcttgcacacctcgaagacctcaaattaagcctggaattgtcccgtgtacgcaccgatttgccgctcgaagttgatttccgtcgccgccgcgaacctgactgggagggtcttaaagcgtttttagagcgtcttgaatttggttcgctcttgcatgaattcggccttttagaaagcccgttaccagccgaagaagcaccttggccaccgcccgaaggcgcgtttttaggttaccgtttgagtcgctcggaaccgatgtgggccgaattattggctcttgcagcgtctgcccagggacgtgtgtatcgcgcggaagaccctcatggtgcgctccgcggcctcaaagaagtccgtggactccttgccaaagacttagctgttgttgcattgcgcgaaggtcttgatttacctccgactgatgatccaatgcttcttgcgtacctcttggacccgtcaaacacgacgcccgaaggcgtagcccgtcgttacggcggcgagtggaccgaagatgcagccgagcgcgcgttattggccgaacgtttgcaccagaatttattaggacgtttgcaaggcgaggaacgcctcctctggctttacgaagaagtggagaaaccattgagtcgcgtgctcgcgcatatggaagctaccggtgtcaaattagacgtggcgtatttggaggcactcagccttgaagttgctgccgaaattcgccgcttggaggaagaagtattccgtttagcaggccactcctttaaccttaattctcgcgatcagttagaacgtgtgttgttcgatgaacttggtctccctcctatcggcaagacagagaagaccggtaaacgtagcacttcagcggcggttttagaagctcttcgcgaagtccatcccattgtggacaagatcttgcagtaccgcgaactcgcgaaattgaaaggcacctatattgaccctcttccggcattagtccacccgaaaacgggacgcctccatacccgcttcaaccaaacagccacggcgaccggtcgtttgtcctcctctgatccaaaccttcagaatattccagtacgtaccccattgggccagaagatccgccgcgcgtttgtagctgaggagggttggcgtttagtggccctcgattatagccaaattgaattacgtgtccttgcccatctttctggcgatgagaacctcatccgcgtgtttcaggaaggcaaagacattcacactcaaacggcaagctggatgtttggattatcgccggaagcgatcgatcctttgatgcgtcgtgcagcgaagaccgttaatttcggtgttctctacggtatgagtgcccatcgtttgtcgcaggaattaggcattccctatgaagaagctgcggcgttcattcagcgctactttcaaagctatcccaaagttaaagcatggatcgagaagactctcgaagaaggccgcacacgtggttacgtagagaccttatttggacgtcgccgctatgttcccgatttaaacgctcgcgtgaaatctgtccgtgaagccgccgaacgcatggcgttcaacatgcctgtacagggcacggcagctgacctcatgaaacttgcaatggtgcgcctttttccacaattgcgtgaagttggtgcccgcatgctcttgcaggtccacgatgaactcttgttagaagcgccaaaagagcgtgcggaagaggtggcagccctcgcgaaagaggttatggaaggcgtgtggcccttagcggtgcctcttgaagtcgaagttggtattggcgaggattggttggctgccaaaggataatga

SEQ ID NO: 98 - protein, 841 aa, synthetic construct
  REGION 1..841: note = Variant of DNA polymerase I from Thermus sp. strain 2.9
MHHHHHHGGSGMLPLFEPKGRVLLVDGHHLAYRNFFALKGLTTSRGEPVQGVYGFAKSLLKALKEDGDVVIVVFDAKAPSFRHEAYEAYKAGRAPTPEDFPRQLALMKELVDLLGLERLEVPGFEADDVLATLAKKAEREGYEVQILTADRDLFQLLSPRISVLHPEGHLITPEWLWEKYGLRPEQWVDFRALVGDPSDNIPGVKGIGEKTALKLLKEWGSLENLLKNLDQVKPESVREKILAHLEDLKLSLELSRVRTDLPLEVDFRRRREPDWEGLKAFLERLEFGSLLHEFGLLESPLPAEEAPWPPPEGAFLGYRLSRSEPMWAELLALAASAQGRVYRAEDPHGALRGLKEVRGLLAKDLAVVALREGLDLPPTDDPMLLAYLLDPSNTTPEGVARRYGGEWTEDAAERALLAERLHQNLLGRLQGEERLLWLYEEVEKPLSRVLAHMEATGVKLDVAYLEALSLEVAAEIRRLEEEVFRLAGHSFNLNSRDQLERVLFDELGLPPIGKTEKTGKRSTSAAVLEALREVHPIVDKILQYRELAKLKGTYIDPLPALVHPKTGRLHTRFNQTATATGRLSSSDPNLQNIPVRTPLGQKIRRAFVAEEGWRLVALDYSQIELRVLAHLSGDENLIRVFQEGKDIHTQTASWMFGLSPEAIDPLMRRAAKTVNFGVLYGMSAHRLSQELGIPYEEAAAFIQRYFQSYPKVKAWIEKTLEEGRTRGYVETLFGRRRYVPDLNARVKSVREAAERMAFNMPVQGTAADLMKLAMVRLFPQLREVGARMLLQVHDELLLEAPKERAEEVAALAKEVMEGVWPLAVPLEVEVGIGEDWLAAKG

SEQ ID NO: 99 - DNA, 2529 bp, synthetic construct
  misc_feature 1..2529: note = Variant of DNA polymerase I from Thermus sp. strain 2.9
  source 1..2529: mol_type = other DNA
atgcaccatcatcatcatcatggcggtagcggcatgttaccgttgttcgaacctaaaggtcgcgtgcttctggttgatggccatcatctcgcgtatcgtaacttctttgccctgaaaggattaaccaccagccgtggcgagccggtacagggtgtctacggctttgcaaagtcgctcctgaaagctctgaaagaagacggtgatgtggtgattgttgtctttgatgcgaaagcgccaagttttcgccacgaagcgtacgaagcttacaaagccgggcgtgctccaacgccggaagactttcctcgccaattggcgcttatgaaggaattagtggatttgcttggcctcgaacgcttggaagttcccggtttcgaggcagacgacgtattagcgactctcgcaaagaaagccgaacgtgagggctatgaagtccagatcttgacagcagatcgcgatcttttccagcttttatctccgcgcgtctcggtgttacacccggaagggcatctgatcaccccggaatggctctgggagaaatatggtttgcgtcccgaacaatgggtggattttcgcgccttagcaggcgatccgagcgacaatattccgggagttaaaggtatcggcgagaagacggcgctcaagctccttaaagaatgggggtcgttggagaacttgcttaagaatttagatcaggtcaaaccagagtcagtgcgtgagaagattcttgcacacctcgaagacctcaaattaagccgcgaattgtcccgtgtacgcaccgatttgccgctcgaagttgatttccgtggccgccgcgaacctgactgggagggtcttaaagcgtttttagagcgtcttgaatttggttcgctcttgcatgaattcggccttttagaaagcccgttaccagccgaagaagcaccttggccaccgcccgaaggcgcgtttttaggttacgttttgagtcgcccggaaccgatgtgggccgaattattggctcttgcagcgtctgcccagggacgtgtgtatcgcgcggaagaccctcatggtgcgctccgcggcctcaaagaagtccgtggactccttgccaaagacttagctgttgttgcattgcgcgaaggtcttgatttacctccgactgatgatccaatgcttcttgcgtacctcttggacccgtcaaacacgacgcccgaaggcgtagcccgtcgttacggcggcgagtggaccgaagatgcagccgagcgcgcgttattggccgaacgtttgcacgccaatttattaggacgtttgcaaggcgaggaacgtctcctctggctttacgaagaagtggagaaaccattgagtcgcgtgctcgcgcatatggaagctaccggtgtcaaattagacgtggcgtatttggaggcactcagccttgaagttgctgccgaaatgcgccgcttggaggaagaagtattccgtttagcaggccactcctttaaccttaattctcgcgatcagttagaacgtgtgttgttcgatgaacttggtctccctcctatcggcaagacagagaagaccggtaaacgtagcacttcagcggcggttttagaagctcttcgcgaagtccatcccattgtggacaagatcttgcagtaccgcgaactcgcgaaattgaaaggcacctatattgaccctcttccggcattagtccacccgaaaacgggacgcctccatacccgcttcaaccaaacagccacggcgaccggtcgtttgtcctcctctgatccaaaccttcagaatattccagtacgtaccccattgggccagaagatccgcaaagcgtttgtagctgaggagggttggcgtttagtggccctcgattatagccaaattgaattacgtgtccttgcccatctttctggcgatgagaacctcatccgcgtgtttcaggaaggccgcgacattcacactcaaacggcaagctggatgtttggattatcagctgaagcgatcgatcctttgatgcgtcgtgcagcgaagaccattaatttcggtgttctctacggtatgagtgcccatcgtttgtcgcaggaattaggcattccctatgaagaagctgcggcgttcattcagcgctactttcaaagctatcccaaagttaaagcatggatcgagaagactctcgaagaaggccgcacacgtggttacgtagagaccttatttggacgtcgccgctatgttcccgatttaaacgctcgcgtgaaatctgtccgtgaagccgccgaacgcatggcgttcaacatgcctgtacagggcacggcagctgacctcatgaaacttgcaatggtgcgcctttttccacaattgcgtgaagttggtgcccgcatgctcttgcaggtccacgatgaactcttgttagaagcgccaaaagagcgtgcggaagaggtggcagccctcgcgaaagaggttatggaaggcgtgtggcccttagcggtgcctcttgaagtcgaagttggtattggcgaggattggttggctgccaaaggataatga

SEQ ID NO: 100 - protein, 841 aa, synthetic construct
  REGION 1..841: note = Variant of DNA polymerase I from Thermus sp. strain 2.9
MHHHHHHGGSGMLPLFEPKGRVLLVDGHHLAYRNFFALKGLTTSRGEPVQGVYGFAKSLLKALKEDGDVVIVVFDAKAPSFRHEAYEAYKAGRAPTPEDFPRQLALMKELVDLLGLERLEVPGFEADDVLATLAKKAEREGYEVQILTADRDLFQLLSPRVSVLHPEGHLITPEWLWEKYGLRPEQWVDFRALAGDPSDNIPGVKGIGEKTALKLLKEWGSLENLLKNLDQVKPESVREKILAHLEDLKLSRELSRVRTDLPLEVDFRGRREPDWEGLKAFLERLEFGSLLHEFGLLESPLPAEEAPWPPPEGAFLGYVLSRPEPMWAELLALAASAQGRVYRAEDPHGALRGLKEVRGLLAKDLAVVALREGLDLPPTDDPMLLAYLLDPSNTTPEGVARRYGGEWTEDAAERALLAERLHANLLGRLQGEERLLWLYEEVEKPLSRVLAHMEATGVKLDVAYLEALSLEVAAEMRRLEEEVFRLAGHSFNLNSRDQLERVLFDELGLPPIGKTEKTGKRSTSAAVLEALREVHPIVDKILQYRELAKLKGTYIDPLPALVHPKTGRLHTRFNQTATATGRLSSSDPNLQNIPVRTPLGQKIRKAFVAEEGWRLVALDYSQIELRVLAHLSGDENLIRVFQEGRDIHTQTASWMFGLSAEAIDPLMRRAAKTINFGVLYGMSAHRLSQELGIPYEEAAAFIQRYFQSYPKVKAWIEKTLEEGRTRGYVETLFGRRRYVPDLNARVKSVREAAERMAFNMPVQGTAADLMKLAMVRLFPQLREVGARMLLQVHDELLLEAPKERAEEVAALAKEVMEGVWPLAVPLEVEVGIGEDWLAAKG

SEQ ID NO: 101 - DNA, 2529 bp, synthetic construct
  misc_feature 1..2529: note = Variant of DNA polymerase I from Thermus sp. strain 2.9
  source 1..2529: mol_type = other DNA
atgcaccatcatcatcatcatggcggtagcggcatgttaccgttgttcgaacctaaaggtcgcgtgcttctggttgatggccatcatctcgcgtatcgtaacttctttgccctgaaaggattaaccaccagccgtggcgagccggtacagggtgtctacggctttgcaaagtcgctcctgaaagctctgaaagaagacggtgatgtggtgattgttgtctttgatgcgaaagcgccaagttttcgccacgaagcgtacgaagcttacaaagccgggcgtgctccaacgccggaagactttcctcgccaattggcgcttatgaaggaattagtggatttgcttggcctcgaacgcttggaagttcccggtttcgaggcagacgacgtattagcgactctcgcaaagaaagccgaacgtgagggctatgaagtccagatcttgacagcagatcgcgatcttttccagcttttatctccgcgcatttccgtgttacacccggaagggcatctgatcaccccggaatggctctgggagaaatatggtttgcgtcccgaacaatgggtggattttcgcgccttagcgggcgatccgagcgacaatattccgggagttaaaggtatcggcgagaagacggcgctcaagctccttaaagaatgggggtcgttggagaacttgcttaagaatttagatcaggtcaaaccagagtcagtgcgtgagaagattcttgcacacctcgaagacctcaaattaagccgcgaattgtcccgtgtacgcaccgatttgccgctcgaagttgatttccgtggccgccgcgaacctgactgggagggtcttaaagcgtttttagagcgtcttgaatttggttcgctcttgcatgaattcggccttttagaaagcccgttaccagccgaagaagcaccttggccaccgcccgaaggcgcgtttttaggttaccgtttgagtcgcccggaaccgatgtgggccgaattattggctcttgcagcgtctgcccagggacgtgtgtatcgcgcggaagaccctcatggtgcgctcaaaggcctcaaagaagtccgtggactccttgccaaagacttagctgttgttgcattgcgcgaaggtcttgatttacctccgactgatgatccaatgcttcttgcgtacctcttggacccgtcaaacacgacgcccgaaggcgtagcccgtcgttacggcggcgagtggaccgaagatgcaggcgagcgcgcgttattggccgaacgtttgcacgccaatttattaggacgtttgcaaggcgaggaacgtctcctctggctttacgaagaagtggagaaaccattgagtcgcgtgctcgcgcatatggaagctaccggtgtcaaattagacgtggcgtatttggaggcactcagccttgaagttgctgccgaaatgcgccgcttggaggaagaagtattccgtttagcaggccactcctttaaccttaattctcgcgatcagttagaacgtgtgttgttcgatgaacttggtctccctcctatcggcaagacagagaagaccggtaaacgtagcacttcagcggcggttttagaagctcttcgcgaagtccatcccattgtggacaagatcttgcagtaccgcgaactcgcgaaattgaaaggcacctatattgaccctcttccggcattagtccacccgaaaacgggacgcctccatacccgcttcaaccaaacagccacggcgaccggtcgtttgtcctcctctgatccaaaccttcagaatattccagtacgtaccccattgggccagaagatccgcaaagcgtttgtagctgaggagggttggcgtttagtggccctcgattatagccaaattgaattacgtgtccttgcccatctttctggcgatgagaacctcatccgcgtgtttcaggaaggccgtgacattcacactcaaacggcaagctggatgtttggattatcagctgaagcgatcgatcctttgatgcgtcgtgcagcgaagaccatcaatttcggtgttctctacggtatgagtgcccatcgtttgtcgcaggaattaggcattccctatgaagaagctgtggcgttcattcagcgctactttcaaagctatcccaaagttaaagcatggatcgagaagactctcgaagaaggccgcacacgtggttacgtagagaccttatttggacgtcgccgctatgttcccgatttaaacgctcgcgtgaaatctgtccgtgaagccgccgaacgcatggcgttcaacatgcctgtacagggcacggcagctgacctcatgaaacttgcaatggtgcgcctttttccacaattgcgtgaagttggtgcccgcatgctcttgcaggtccacgatgaactcttgttagaagcgccaaaagagcgtgcggaagaggtggcagccctcgcgaaagaggttatggaaggcgtgtggcccttagcggtgcctcttgaagtcgaagttggtattggcgaggattggttggctgccaaaggataatga

SEQ ID NO: 102 - protein, 841 aa, synthetic construct
  REGION 1..841: note = Variant of DNA polymerase I from Thermus sp. strain 2.9
MHHHHHHGGSGMLPLFEPKGRVLLVDGHHLAYRNFFALKGLTTSRGEPVQGVYGFAKSLLKALKEDGDVVIVVFDAKAPSFRHEAYEAYKAGRAPTPEDFPRQLALMKELVDLLGLERLEVPGFEADDVLATLAKKAEREGYEVQILTADRDLFQLLSPRISVLHPEGHLITPEWLWEKYGLRPEQWVDFRALAGDPSDNIPGVKGIGEKTALKLLKEWGSLENLLKNLDQVKPESVREKILAHLEDLKLSRELSRVRTDLPLEVDFRGRREPDWEGLKAFLERLEFGSLLHEFGLLESPLPAEEAPWPPPEGAFLGYRLSRPEPMWAELLALAASAQGRVYRAEDPHGALKGLKEVRGLLAKDLAVVALREGLDLPPTDDPMLLAYLLDPSNTTPEGVARRYGGEWTEDAGERALLAERLHANLLGRLQGEERLLWLYEEVEKPLSRVLAHMEATGVKLDVAYLEALSLEVAAEMRRLEEEVFRLAGHSFNLNSRDQLERVLFDELGLPPIGKTEKTGKRSTSAAVLEALREVHPIVDKILQYRELAKLKGTYIDPLPALVHPKTGRLHTRFNQTATATGRLSSSDPNLQNIPVRTPLGQKIRKAFVAEEGWRLVALDYSQIELRVLAHLSGDENLIRVFQEGRDIHTQTASWMFGLSAEAIDPLMRRAAKTINFGVLYGMSAHRLSQELGIPYEEAVAFIQRYFQSYPKVKAWIEKTLEEGRTRGYVETLFGRRRYVPDLNARVKSVREAAERMAFNMPVQGTAADLMKLAMVRLFPQLREVGARMLLQVHDELLLEAPKERAEEVAALAKEVMEGVWPLAVPLEVEVGIGEDWLAAKG

SEQ ID NO: 103 - DNA, 2529 bp, synthetic construct
  misc_feature 1..2529: note = Variant of DNA polymerase I from Thermus sp. strain 2.9
  source 1..2529: mol_type = other DNA
atgcaccatcatcatcatcatggcggtagcggcatgttaccgttgttcgaacctaaaggtcgcgtgcttctggttgatggccatcatctcgcgtatcgtaacttctttgccctgaaaggattaaccaccagccgtggcgagccggtacagggtgtctacggctttgcaaagtcgctcctgaaagctctgaaagaagacggtgatgtggtgattgttgtctttgatgcgaaagcgccaagttttcgccacgaagcgtacgaagcttacaaagccgggcgtgctccaacgccggaagactttcctcgccaattggcgcttatgaaggaattagtggatttgcttggcctcgaacgcttggaagttcccggtttcgaggcagacgacgtattagcgactctcgcaaagaaagccgaacgtgagggctatgaagtccagatcttgacagcagatcgcgatcttttccagcttttatctccgcgcgtctcggtgttacacccggaagggcatcgtatcaccccggaatggctctgggagaaatatggtttgcgtcccgaacaatgggtggattttcgcgccttagcgggcgatccgagcgacaatattccgggagttaaaggtatcggcgagaagacggcgctcaagctccttaaagaatgggggtcgttggagaacttgcttaagaatttagatcaggtcaaaccagagtcagtgcgtgagaagattcttgcacacctcgaagacctcaaattaagccgcgaattgtcccgtgtacgcaccgatttgccgctcgaagttgatttccgtggccgccgcgaacctgactgggagggtcttaaagcgtttttagagcgtcttgaatttggttcgctcttgcatgaattcggccttttagaaagcccgttaccagccgaagaagcaccttggccaccgcccgaaggcgcgtttttaggttaccgtttgagtcgcccggaaccgatgtgggccgaattattggctcttgcagcgtctgcccagggacgtgtgtatcgcgcggaagaccctcatggtgcgctcaaaggcctcaaagaagtccgtggactccttgccaaagacttagctgttgttgcattgcgcgaaggtcttgatttacctccgactgatgatccaatgcttcttgcgtacctcttggacccgtcaaacacgacgcccgaaggcgtagcccgtcgttacggcggcgagtggaccgaagatgcaggtgagcgcgcgttattggccgaacgtttgcaccagaatttattaggacgtttgcaaggcgaggaacgtctcctctggctttacgaagaagtggagaaaccattgagtcgcgtgctcgcgcatatggaagctaccggtgtcaaattagacgtggcgtatttggaggcactcagccttgaagttgctgccgaaatgcgccgcttggaggaagaagtattccgtttagcaggccactcctttaaccttaattctcgcgatcagttagaacgtgtgttgttcgatgaacttggtctccctcctatcggcaagacagagaagaccggtaaacgtagcacttcagcggcggttttagaagctcttcgcgaagtccatcccattgtggacaagatcttgcagtaccgcgaactcgcgaaattgaaaggcacctatattgaccctcttccggcattagtccacccgaaaacgggacgcctccatacccgcttcaaccaaacagccacggcgaccggtcgtttgtcctcctctgatccaaaccttcagaatattccagtacgtaccccattgggccagaagatccgcaaagcgtttgtagctgaggagggttggcgtttagtggccctcgattatagccaaattgaattacgtgtccttgcccatctttctggcgatgagaacctcatccgcgtgtttcaggaaggcaaagacattcacactcaaacggcaagctggatgtttggattatcggcggaagcgatcgatcctttgatgcgtcgtgcagcgaagaccgttaatttcggtgttctctacggtatgagtgcccatcgtttgtcgcaggaattaggcattccctatgaagaagctgcggcgttcattcagcgctactttcaaagctatcccaaagttaaagcatggatcgagaagactctcgaagaaggccgcacacgtggttacgtagagaccttatttggacgtcgccgctatgttcccgatttaaacgctcgcgtgaaatctgtccgtgaagccgccgaacgcatggcgttcaacatgcctgtacagggcacggcagctgacctcatgaaacttgcaatggtgcgcctttttccacaattgcgtgaagttggtgcccgcatgctcttgcaggtccacgatgaactcttgttagaagcgccaaaagagcgtgcggaagaggtggcagccctcgcgaaagaggttatggaaggcgtgtggcccttagcggtgcctcttgaagtcgaagttggtattggcgaggattggttggctgccaaaggataatga

SEQ ID NO: 104 - protein, 841 aa, synthetic construct
  REGION 1..841: note = Variant of DNA polymerase I from Thermus sp. strain 2.9
MHHHHHHGGSGMLPLFEPKGRVLLVDGHHLAYRNFFALKGLTTSRGEPVQGVYGFAKSLLKALKEDGDVVIVVFDAKAPSFRHEAYEAYKAGRAPTPEDFPRQLALMKELVDLLGLERLEVPGFEADDVLATLAKKAEREGYEVQILTADRDLFQLLSPRVSVLHPEGHRITPEWLWEKYGLRPEQWVDFRALAGDPSDNIPGVKGIGEKTALKLLKEWGSLENLLKNLDQVKPESVREKILAHLEDLKLSRELSRVRTDLPLEVDFRGRREPDWEGLKAFLERLEFGSLLHEFGLLESPLPAEEAPWPPPEGAFLGYRLSRPEPMWAELLALAASAQGRVYRAEDPHGALKGLKEVRGLLAKDLAVVALREGLDLPPTDDPMLLAYLLDPSNTTPEGVARRYGGEWTEDAGERALLAERLHQNLLGRLQGEERLLWLYEEVEKPLSRVLAHMEATGVKLDVAYLEALSLEVAAEMRRLEEEVFRLAGHSFNLNSRDQLERVLFDELGLPPIGKTEKTGKRSTSAAVLEALREVHPIVDKILQYRELAKLKGTYIDPLPALVHPKTGRLHTRFNQTATATGRLSSSDPNLQNIPVRTPLGQKIRKAFVAEEGWRLVALDYSQIELRVLAHLSGDENLIRVFQEGKDIHTQTASWMFGLSAEAIDPLMRRAAKTVNFGVLYGMSAHRLSQELGIPYEEAAAFIQRYFQSYPKVKAWIEKTLEEGRTRGYVETLFGRRRYVPDLNARVKSVREAAERMAFNMPVQGTAADLMKLAMVRLFPQLREVGARMLLQVHDELLLEAPKERAEEVAALAKEVMEGVWPLAVPLEVEVGIGEDWLAAKG

SEQ ID NO: 105 - DNA, 2529 bp, synthetic construct
  misc_feature 1..2529: note = Variant of DNA polymerase I from Thermus sp. strain 2.9
  source 1..2529: mol_type = other DNA
atgcaccatcatcatcatcatggcggtagcggcatgttaccgttgttcgaacctaaaggtcgcgtgcttctggttgatggccatcatctcgcgtatcgtaacttctttgccctgaaaggattaaccaccagccgtggcgagccggtacagggtgtctacggctttgcaaagtcgctcctgaaagctctgaaagaagacggtgatgtggtgattgttgtctttgatgcgaaagcgccaagttttcgccacgaagcgtacgaagcttacaaagccgggcgtgctccaacgccggaagactttcctcgccaattggcgcttatgaaggaattagtggatttgcttggcctcgaacgcttggaagttcccggtttcgaggcagacgacgtattagcgactctcgcaaagaaagccgaacgtgagggctatgaagtccagatcttgacagcagatcgcgatcttttccagcttttatctccgcgcatttccgtgttacacccggaagggcatcgtatcaccccggaatggctctgggagaaatatggtttgcgtcccgaacaatgggtggattttcgcgccttagcgggcgatccgagcgacaatattccgggagttaaaggtatcggcgagaagacggcgctcaagctccttaaagaatgggggtcgttggagaacttgcttaagaatttagatcaggtcaaaccagcttcagtgcgtgagaagattcttgcacacctcgaagacctcaaattaagccgcgaattgtcccgtgtacgcaccgatttgccgctcgaagttgatttccgtggccgccgcgaacctgactgggagggtcttaaagcgtttttagagcgtcttgaatttggttcgctcttgcatgaattcggccttttagaaagcccgttaccagccgaagaagcaccttggccaccgcccgaaggcgcgtttttaggttaccgtttgagtcgcccggaaccgatgtgggccgaattattggctcttgcagcgtctgcccagggacgtgtgtatcgcgcggaagaccctcatggtgcgctccgtggcctcaaagaagtccgtggactccttgccaaagacttagctgttgttgcattgcgcgaaggtcttgatttacctccgactgatgatccaatgcttcttgcgtacctcttggacccgtcaaacacgacgcccgaaggcgtagcccgtcgttacggcggcgagtggaccgaagatgcaggtgagcgcgcgttattggccgaacgtttgcacgccaatttattaggacgtttgcaaggcgaggaacgtctcctctggctttacgaagaagtggagaaaccattgagtcgcgtgctcgcgcatatggaagctaccggtgtcaaattagacgtggcgtatttggaggcactcagccttgaagttgctgccgaaatgcgccgcttggaggaagaagtattccgtttagcaggccactcctttaaccttaattctcgcgatcagttagaacgtgtgttgttcgatgaacttggtctccctcctatcaccaagacagagaagaccggtaaacgtagcacttcagcggcggttttagaagctcttcgcgaagtccatcccattgtggacaagatcttgcagtaccgcgaactcgcgaaattgaaaggcacctatattgaccctcttccggcattagtccacccgaaaacgggacgcctccatacccgcttcaaccaaacagccacggcgaccggtcgtttgtcctcctctgatccaaaccttcagaatattccagtacgtaccccattgggccagaagatccgcaaagcgtttgtagctgaggagggttggcgtttagtggccctcgattatagccaaattgaattacgtgtccttgcccatctttctggcgatgagaacctcatccgcgtgtttcaggaaggccgcgacattcacactcaaacggcaagctggatgtttggattatcagctgaagcgatcgatcctttgatgcgtcgtgcagcgaagaccatcaatttcggtgttctctacggtatgagtgcccatcgtttgtcgcaggaattaggcattccctatgaagaagctgcggcgttcattcagcgctactttcaaagctatcccaaagttaaagcatggatcgagaagactctcgaagaaggccgcacacgtggttacgtagagaccttatttggacgtcgccgctatgttcccgatttaaacgctcgcgtgaaatctgtccgtgaagccgccgaacgcatggcgttcaacatgcctgtacagggcacggcagctgacctcatgaaacttgcaatggtgcgcctttttccacaattgcgtgaagttggtgcccgcatgctcttgcaggtccacgatgaactcttgttagaagcgccaaaagagcgtgcggaagaggtggcagccctcgcgaaagaggttatggaaggcgtgtggcccttagcggtgcctcttgaagtcgaagttggtattggcgaggattggttggctgccaaaggataatga

SEQ ID NO: 106 - protein, 841 aa, synthetic construct
  REGION 1..841: note = Variant of DNA polymerase I from Thermus sp. strain 2.9
MHHHHHHGGSGMLPLFEPKGRVLLVDGHHLAYRNFFALKGLTTSRGEPVQGVYGFAKSLLKALKEDGDVVIVVFDAKAPSFRHEAYEAYKAGRAPTPEDFPRQLALMKELVDLLGLERLEVPGFEADDVLATLAKKAEREGYEVQILTADRDLFQLLSPRISVLHPEGHRITPEWLWEKYGLRPEQWVDFRALAGDPSDNIPGVKGIGEKTALKLLKEWGSLENLLKNLDQVKPASVREKILAHLEDLKLSRELSRVRTDLPLEVDFRGRREPDWEGLKAFLERLEFGSLLHEFGLLESPLPAEEAPWPPPEGAFLGYRLSRPEPMWAELLALAASAQGRVYRAEDPHGALRGLKEVRGLLAKDLAVVALREGLDLPPTDDPMLLAYLLDPSNTTPEGVARRYGGEWTEDAGERALLAERLHANLLGRLQGEERLLWLYEEVEKPLSRVLAHMEATGVKLDVAYLEALSLEVAAEMRRLEEEVFRLAGHSFNLNSRDQLERVLFDELGLPPITKTEKTGKRSTSAAVLEALREVHPIVDKILQYRELAKLKGTYIDPLPALVHPKTGRLHTRFNQTATATGRLSSSDPNLQNIPVRTPLGQKIRKAFVAEEGWRLVALDYSQIELRVLAHLSGDENLIRVFQEGRDIHTQTASWMFGLSAEAIDPLMRRAAKTINFGVLYGMSAHRLSQELGIPYEEAAAFIQRYFQSYPKVKAWIEKTLEEGRTRGYVETLFGRRRYVPDLNARVKSVREAAERMAFNMPVQGTAADLMKLAMVRLFPQLREVGARMLLQVHDELLLEAPKERAEEVAALAKEVMEGVWPLAVPLEVEVGIGEDWLAAKG

SEQ ID NO: 107 - DNA, 2529 bp, synthetic construct
  misc_feature 1..2529: note = Variant of DNA polymerase I from Thermus sp. strain 2.9
  source 1..2529: mol_type = other DNA
atgcaccatcatcatcatcatggcggtagcggcatgttaccgttgttcgaacctaaaggtcgcgtgcttctggttgatggccatcatctcgcgtatcgtaacttctttgccctgaaaggattaaccaccagccgtggcgagccggtacagggtgtctacggctttgcaaagtcgctcctgaaagctctgaaagaagacggtgatgtggtgattgttgtctttgatgcgaaagcgccaagttttcgccacgaagcgtacgaagcttacaaagccgggcgtgctccaacgccggaagactttcctcgccaattggcgcttatgaaggaattagtggatttgcttggcctcgaacgcttggaagttcccggtttcgaggcagacgacgtattagcgactctcgcaaagaaagccgaacgtgagggctatgaagtccagatcttgacagcagatcgcgatcttttccagcttttatctccgcgcatttccgtgttacacccggaagggcatcgtatcaccccggaatggctctgggagaaatatggtttgcgtcccgaacaatgggtggattttcgcgccttagcgggcgatccgagcgacaatattccgggagttaaaggtatcggcgagaagacggcgctcaagctccttaaagaatgggggtcgttggagaacttgcttaagaatttagatcaggtcaaaccagcttcagtgcgtgagaagattcttgcacacctcgaagacctcaaattaagccgcgaattgtcccgtgtacgcaccgatttgccgctcgaagttgatttccgtggccgccgcgaacctgactgggagggtcttaaagcgtttttagagcgtcttgaatttggttcgctcttgcatgaattcggccttttagaaagcccgttaccagccgaagaagcaccttggccaccgcccgaaggcgcgtttttaggttaccgtttgagtcgcccggaaccgatgtgggccgaattattggctcttgcagcgtctgcccagggacgtgtgtatcgcgcggaagaccctcatggtgcgctccgtggcctcaaagaagtccgtggactccttgccaaagacttagctgttgttgcattgcgcgaaggtcttgatttacctccgactgatgatccaatgcttcttgcgtacctcttggacccgtcaaacacgacgcccgaaggcgtagcccgtcgttacggcggcgagtggaccgaagatgcaggtgagcgcgcgttattggccgaacgtttgcacgccaatttattaggacgtttgcaaggcgaggaacgtctcctctggctttacgaagaagtggagaaaccattgagtcgcgtgctcgcgcatatggaagctaccggtgtcaaattagacgtggcgtatttggaggcactcagccttgaagttgctgccgaaatgcgccgcttggaggaagaagtattccgtttagcaggccactcctttaaccttaattctcgcgatcagttagaacgtgtgttgttcgatgaacttggtctccctcctatcggcaagacagagaagaccggtaaacgtagcacttcagcggcggttttagaagctcttcgcgaagtccatcccattgtggacaagatcttgcagtaccgcgaactcgcgaaattgaaaggcacctatattgaccctcttccggcattagtccacccgaaaacgggacgcctccatacccgcttcaaccaaacagccacggcgaccggtcgtttgtcctcctctgatccaaaccttcagaatattccagtacgtaccccattgggccagaagatccgcaaagcgtttgtagctgaggagggttggcgtttagtggccctcgattatagccaaattgaattacgtgtccttgcccatctttctggcgatgagaacctcatccgcgtgtttcaggaaggccgcgacattcacactcaaacggcaagctggatgtttggagtctcagctgaagcgatcgatcctttgatgcgtcgtgcagcgaagaccatcaatttcggtgttctctacggtatgagtgcccatcgtttgtcgcaggaattaggcattccctatgaagaagctgcggcgttcattcagcgctactttcaaagctatcccaaagttaaagcatggatcgagaagactctcgaagaaggccgcacacgtggttacgtagagaccttatttggacgtcgccgctatgttcccgatttaaacgctcgcgtgaaatctgtccgtgaagccgccgaacgcatggcgttcaacatgcctgtacagggcacggcagctgacctcatgaaacttgcaatggtgcgcctttttccacaattgcgtgaagttggtgcccgcatgctcttgcaggtccacgatgaactcttgttagaagcgccaaaagagcgtgcggaagaggtggcagccctcgcgaaagaggttatggaaggcgtgtggcccttagcggtgcctcttgaagtcgaagttggtattggcgaggattggttggctgccaaaggataatga

SEQ ID NO: 108 - protein, 841 aa, synthetic construct
  REGION 1..841: note = Variant of DNA polymerase I from Thermus sp. strain 2.9
MHHHHHHGGSGMLPLFEPKGRVLLVDGHHLAYRNFFALKGLTTSRGEPVQGVYGFAKSLLKALKEDGDVVIVVFDAKAPSFRHEAYEAYKAGRAPTPEDFPRQLALMKELVDLLGLERLEVPGFEADDVLATLAKKAEREGYEVQILTADRDLFQLLSPRISVLHPEGHRITPEWLWEKYGLRPEQWVDFRALAGDPSDNIPGVKGIGEKTALKLLKEWGSLENLLKNLDQVKPASVREKILAHLEDLKLSRELSRVRTDLPLEVDFRGRREPDWEGLKAFLERLEFGSLLHEFGLLESPLPAEEAPWPPPEGAFLGYRLSRPEPMWAELLALAASAQGRVYRAEDPHGALRGLKEVRGLLAKDLAVVALREGLDLPPTDDPMLLAYLLDPSNTTPEGVARRYGGEWTEDAGERALLAERLHANLLGRLQGEERLLWLYEEVEKPLSRVLAHMEATGVKLDVAYLEALSLEVAAEMRRLEEEVFRLAGHSFNLNSRDQLERVLFDELGLPPIGKTEKTGKRSTSAAVLEALREVHPIVDKILQYRELAKLKGTYIDPLPALVHPKTGRLHTRFNQTATATGRLSSSDPNLQNIPVRTPLGQKIRKAFVAEEGWRLVALDYSQIELRVLAHLSGDENLIRVFQEGRDIHTQTASWMFGVSAEAIDPLMRRAAKTINFGVLYGMSAHRLSQELGIPYEEAAAFIQRYFQSYPKVKAWIEKTLEEGRTRGYVETLFGRRRYVPDLNARVKSVREAAERMAFNMPVQGTAADLMKLAMVRLFPQLREVGARMLLQVHDELLLEAPKERAEEVAALAKEVMEGVWPLAVPLEVEVGIGEDWLAAKG

SEQ ID NO: 109 - DNA, 2529 bp, synthetic construct
  misc_feature 1..2529: note = Variant of DNA polymerase I from Thermus sp. strain 2.9
  source 1..2529: mol_type = other DNA
atgcaccatcatcatcatcatggcggtagcggcatgttaccgttgttcgaacctaaaggtcgcgtgcttctggttgatggccatcatctcgcgtatcgtaacttctttgccctgaaaggattaaccaccagccgtggcgagccggtacagggtgtctacggctttgcaaagtcgctcctgaaagctctgaaagaagacggtgatgtggtgattgttgtctttgatgcgaaagcgccaagttttcgccacgaagcgtacgaagcttacaaagccgggcgtgctccaacgccggaagactttcctcgccaattggcgcttatgaaggaattagtggatttgcttggcctcgaacgcttggaagttcccggtttcgaggcagacgacgtattagcgactctcgcaaagaaagccgaacgtgagggctatgaagtccatatcttgacagcagatcgcgatcttttccagcttttatctccgcgcatttccgtgttacacccggaagggcatcgtatcaccccggaatggctctgggagaaatatggtttgcgtcccgaacaatgggtggattttcgcgccttagcgggcgatccgagcgacaatattccgggagttaaaggtatcggcgagaagacggcgctcaagctccttaaagaatgggggtcgttggagaacttgcttaagaatttagatcaggtcaaaccagcttcagtgcgtgagaagattcttgcacacctcgaagacctcaaattaagccgcgaattgtcgcgtgtacgcaccgatttgccgctcgaagttgattcccgtggccgccgcgaacctgactgggagggtcttaaagcgtttttagagcgtcttgaatttggttcgctcttgcatgaattcggccttttagaaagcccgttaccagccgaagaagcaccttggccaccgcccgaaggcgcgtttttaggttaccgtttgagtcgcccggaaccgatgtgggccgaattattggctcttgcagcgtctgcccagggacgtgtgtatcgcgcggaagaccctcatggtgcgctccgtggcctcaaagaagtccgtggactccttgccaaagacttagctgttgttgcattgcgcgaaggtcttgatttacctccgactgatgatccaatgcttcttgcgtacctcttggactcgtcaaacacgacgcccgaacgcgtagcccgtcgttacggcggcgagtggaccgaagatgcaggtgagcgcgcgttattggccgaacgtttgcacgccaatttattaggacgtttgcaaggcgaggaacgtctcctctggctttacgaagaagtggagaaaccattgagtcgcgtgctcgcgcatatggaagctaccggtgtcaaattagacgtggcgtatttggaggcactcagccttgaagtcgctgccgaaatgcgccgcttggaggaagaagtattccgtttagcaggccactcctttaaccttaattctcgcgatcagttagaacgtgtgttgttcgatgaacttggtctccctcctatcaccaagacagagaagaccggtaaacgtagcacttcagcggcggttttagaagctcttcgcgaagtccatcccattgtggacaagatcttgcagtaccgcgaactcgcgaaattgaaaggcacctatattgaccgtcttccggcattagtccacccgaaaacgggacgcctccatacccgcttcaaccaaacagccacggcgaccggtcgtttgtcctcctctgatccaaaccttcagaatattccagtacgtaccccattgggccagaagatccgcaaagcgtttgtagctgaggagggttggcgtttagtggccctcgattatagccaaattgaattacgtgtccttgcccatctttctggcgatgagaacctcatccgcgtgtttcaggaaggccgcgacattcacactcaaacggcaagctggatgtttggagtgtcagcggaagcgatcgatcctttgatgcgtcgtgcagcgaagaccatcaatttcggtgttctctacggtatgagtgccgcgcgtttgtcgcaggaattaggcattccctatgaagaagctgcggcgttcattcagcgctactttcaaagctatcccaaagttaaagcatggatcgagaagactctcgaagaaggccgcacacgtggttacgtagagaccttatttggacgtcgccgctatgttcccgatttaactgctcgcgtgaaatctgtccgtgaagccgccgaacgcatggcgttcaacatgcctgtacagggcacggcagctgacctcatgaaacttgcaatggtgcgcctttttccacaattgcgtgaagttggtgcccgcatgctcttgcaggtccacgatgaactcttgttagaagcgccaaaagagcgtgcggaagaggtggcagccctcgcgaaagaggttatggaaggcgtgtggcccttagcggtgcctcttgaagtcgaagttggtattggcgaggattggttggctgccaaaggataatga

SEQ ID NO: 110 - protein, 841 aa, synthetic construct
  REGION 1..841: note = Variant of DNA polymerase I from Thermus sp. strain 2.9
MHHHHHHGGSGMLPLFEPKGRVLLVDGHHLAYRNFFALKGLTTSRGEPVQGVYGFAKSLLKALKEDGDVVIVVFDAKAPSFRHEAYEAYKAGRAPTPEDFPRQLALMKELVDLLGLERLEVPGFEADDVLATLAKKAEREGYEVHILTADRDLFQLLSPRISVLHPEGHRITPEWLWEKYGLRPEQWVDFRALAGDPSDNIPGVKGIGEKTALKLLKEWGSLENLLKNLDQVKPASVREKILAHLEDLKLSRELSRVRTDLPLEVDSRGRREPDWEGLKAFLERLEFGSLLHEFGLLESPLPAEEAPWPPPEGAFLGYRLSRPEPMWAELLALAASAQGRVYRAEDPHGALRGLKEVRGLLAKDLAVVALREGLDLPPTDDPMLLAYLLDSSNTTPERVARRYGGEWTEDAGERALLAERLHANLLGRLQGEERLLWLYEEVEKPLSRVLAHMEATGVKLDVAYLEALSLEVAAEMRRLEEEVFRLAGHSFNLNSRDQLERVLFDELGLPPITKTEKTGKRSTSAAVLEALREVHPIVDKILQYRELAKLKGTYIDRLPALVHPKTGRLHTRFNQTATATGRLSSSDPNLQNIPVRTPLGQKIRKAFVAEEGWRLVALDYSQIELRVLAHLSGDENLIRVFQEGRDIHTQTASWMFGVSAEAIDPLMRRAAKTINFGVLYGMSAARLSQELGIPYEEAAAFIQRYFQSYPKVKAWIEKTLEEGRTRGYVETLFGRRRYVPDLTARVKSVREAAERMAFNMPVQGTAADLMKLAMVRLFPQLREVGARMLLQVHDELLLEAPKERAEEVAALAKEVMEGVWPLAVPLEVEVGIGEDWLAAKG

SEQ ID NO: 111 - DNA, 2529 bp, synthetic construct
  misc_feature 1..2529: note = Variant of DNA polymerase I from Thermus sp. strain 2.9
  source 1..2529: mol_type = other DNA
atgcaccatcatcatcatcatggcggtagcggcatgttaccgttgttcgaacctaaaggtcgcgtgcttctggttgatggccatcatctcgcgtatcgtaacttctttgccctgaaaggattaaccaccagccgtggcgagccggtacagggtgtctacggctttgcaaagtcgctcctgaaagctctgaaagaagacggtgatgtggtgattgttgtctttgatgcgaaagcgccaagttttcgccacgaagcgtacgaagcttacaaagccgggcgtgctccaacgccggaagactttcctcgccaattggcgcttatgaaggaattagtggatttgcttggcctcgaacgcttggaagttcccggtttcgaggcagacgacgtattagcgactctcgcaaagaaagccgaacgtgagggctatgaagtccagatcttgacagcagatcgcgatcttttccagcttttatctccgcgcatttccgtgttacacccggaagggcatcgtatcaccccggaatggctctgggagaaatatggtttgcgtcccgaacaatgggtggattttcgcgccttagcgggcgatccgagcgacaatattccgggagttaaaggtatcggcgagaagacggcgctcaagctccttaaagaatgggggtcgttggagaacttgcttaagaatttagatcaggtcaaaccagcttcagtgcgtgagaagattcttgcacacctcgaagacctcaaattaagccgcgaattgtcgcgtgtacgcaccgatttgccgctcgaagttgatttccgtggccgccgcgaacctgactgggagggtcttaaagcgtttttagagcgtcttgaatttggttcgctcttgcatgaattcggccttttagaaagcccgttaccagccgaagaagcaccttggccaccgcccgaaggcgcgtttttaggttaccgtttgagtcgcccggaaccgatgtgggccgaattattggctcttgcagcgtctgcccagggacgtgtgtatcgcgcggaagaccctcatggtgcgctccgtggcctcaaagaagtccgtggactccttgccaaagacttagctgttgttgcattgcgcgaaggtcttgatttacctccgactgatgatccaatgcttcttgcgtacctcttggactcgtcaaacacgacgcccgaacgcgtagcccgtcgttacggcggcgagtggaccgaagatgcaggtgagcgcgcgttattggccgaacgtttgcacgccaatttattaggacgtttgcaaggcgaggaacgtctcctctggctttacgaagaagtggagaaaccattgagtcgcgtgctcgcgcatatggaagctaccggtgtcaaattagacgtggcgtatttggaggcactcagccttgaagtcgctgccgaactgcgccgcttggaggaagaagtattccgtttagcaggccactcctttaaccttaattctcgcgatcagttagaacgtgtgttgttcgatgaacttggtctccctcctatcggcaagacagagaagaccggtaaacgtagcacttcagcggcggttttagaagctcttcgcgaagtccatcccattgtggacaagatcttgcagtaccgcgaactcgcgaaattgaaaggcacctatattgaccctcttccggcattagtccacccgaaaacgggacgcctccatacccgcttcaaccaaacagccacggcgaccggtcgtttgtcctcctctgatccaaaccttcagaatattccagtacgtaccccattgggccagaaaatccgcaaagcgtttgtagctgaggagggttggcgtttagtggccctcgattatagccaaattgaattacgtgtccttgcccatctttctggcgatgagaacctcatccgcgtgtttcaggaaggccgcgacattcacactcaaacggcaagctggatgtttggattatcagctgaagcgatcgatcctttgatgcgtcgtgcagcgaagaccatcaatttcggtgttctctacggtatgagtgccgcgcgtttgtcgcaggaattaggcattccctatgaagaagctgcggcgttcattcagcgctactttcaaagctatcccaaagttaaagcatggatcgagaagactctcgaagaaggccgcacacgtggttacgtagagaccttatttggacgtcgccgctatgttcccgatttaaatgctcgcgtgaaatctgtccgtgaagccgccgaacgcatggcgtttaacatgcctgtacagggcacggcagctgacctcatgaaacttgcaatggtgcgcctttttccacaattgcgtgaagttggtgcccgcatgctcttgcaggtccacgatgaactcttgttagaagcgccaaaagagcgtgcggaagaggtggcagccctcgcgaaagaggttatggaaggcgtgtggcccttagcggtgcctcttgaagtcgaagttggtattggcgaggattggttggctgccaaaggataatga

SEQ ID NO: 112 - protein, 841 aa, synthetic construct
  REGION 1..841: note = Variant of DNA polymerase I from Thermus sp. strain 2.9
MHHHHHHGGSGMLPLFEPKGRVLLVDGHHLAYRNFFALKGLTTSRGEPVQGVYGFAKSLLKALKEDGDVVIVVFDAKAPSFRHEAYEAYKAGRAPTPEDFPRQLALMKELVDLLGLERLEVPGFEADDVLATLAKKAEREGYEVQILTADRDLFQLLSPRISVLHPEGHRITPEWLWEKYGLRPEQWVDFRALAGDPSDNIPGVKGIGEKTALKLLKEWGSLENLLKNLDQVKPASVREKILAHLEDLKLSRELSRVRTDLPLEVDFRGRREPDWEGLKAFLERLEFGSLLHEFGLLESPLPAEEAPWPPPEGAFLGYRLSRPEPMWAELLALAASAQGRVYRAEDPHGALRGLKEVRGLLAKDLAVVALREGLDLPPTDDPMLLAYLLDSSNTTPERVARRYGGEWTEDAGERALLAERLHANLLGRLQGEERLLWLYEEVEKPLSRVLAHMEATGVKLDVAYLEALSLEVAAELRRLEEEVFRLAGHSFNLNSRDQLERVLFDELGLPPIGKTEKTGKRSTSAAVLEALREVHPIVDKILQYRELAKLKGTYIDPLPALVHPKTGRLHTRFNQTATATGRLSSSDPNLQNIPVRTPLGQKIRKAFVAEEGWRLVALDYSQIELRVLAHLSGDENLIRVFQEGRDIHTQTASWMFGLSAEAIDPLMRRAAKTINFGVLYGMSAARLSQELGIPYEEAAAFIQRYFQSYPKVKAWIEKTLEEGRTRGYVETLFGRRRYVPDLNARVKSVREAAERMAFNMPVQGTAADLMKLAMVRLFPQLREVGARMLLQVHDELLLEAPKERAEEVAALAKEVMEGVWPLAVPLEVEVGIGEDWLAAKG

SEQ ID NO: 113 - DNA, 2529 bp, synthetic construct
  misc_feature 1..2529: note = Variant of DNA polymerase I from Thermus sp. strain 2.9
  source 1..2529: mol_type = other DNA
atgcaccatcatcatcatcatggcggtagcggcatgttaccgttgttcgaacctaaaggtcgcgtgcttctggttgatggccatcatctcgcgtatcgtaacttctttgccctgaaaggattaaccaccagccgtggcgagccggtacagggtgtctacggctttgcaaagtcgctcctgaaagctctgaaagaagacggtgatgtggtgattgttgtctttgatgcgaaagcgccaagttttcgccacgaagcgtacgaagcttacaaagccgggcgtgctccaacgccggaagactttcctcgccaattggcgcttatgaaggaattagtggatttgcttggcctcgaacgcttggaagttcccggtttcgaggcagacgacgtattagcgactctcgcaaagaaagccgaacgtgagggctatgaagtccatatcttgacagcagatcgcgatcttttccagcttttatctccgcgcatttccgtgttacacccggaagggcatcgtatcaccccggaatggctctgggagaaatatggtttgcgtcccgaacaatgggtggattttcgcgccttagcgggcgatccgagcgacaatattccgggagttaaaggtatcggcgagaagacggcgctcaagctccttaaagaatgggggtcgttggagaacttgcttaagaatttagatcaggtcaaaccagcttcagtgcgtgagaagattcttgcacacctcgaagacctcaaattaagccgcgaattgtcccgtgtacgcaccgatttgccgctcgaagttgatttccgtggccgccgcgaacctgactgggagggtcttaaagcgtttttagagcgtcttgaatttggttcgctcttgcatgaattcggccttttagaaagcccgttaccagccgaagaagcaccttggccaccgcccgaaggcgcgtttttaggttaccgtttgagtcgcccggaaccgatgtgggccgaattattggctcttgcagcgtctgcccagggacgtgtgtatcgcgcggaagaccctcatggtgcgctccgtggcctcaaagaagtccgtggactccttgccaaagacttagctgttgttgcattgcgcgaaggtcttgatttacctccgactgatgatccaatgcttcttgcgtacctcttggactcgtcaaacacgacgcccgaaggcgtagcccgtcgttacggcggcgagtggaccgaagatgcaggtgagcgcgcgttattggccgaacgtttgcacgccaatttattaggacgtttgcaaggcgaggaacgtctcctctggctttacgaagaagtggagaaaccattgagtcgcgtgctcgcgcatatggaagctaccggtgtcaaattagacgtggcgtatttggaggcactcagccttgaagttgctgccgaaatgcgccgcttggaggaagaagtattccgtttagcaggccactcctttaaccttaattctcgcgatcagttagaacgtgtgttgttcgatgaacttggtctccctcctatcggcaagacagagaagaccggtaaacgtagcacttcagcggcggttttagaagctcttcgcgaagtccatcccattgtggacaagatcttgcagtaccgcgaactcgcgaaattgaaaggcacctatattgaccgtcttccggcattagtccacccgaaaacgggacgcctccatacccgcttcaaccaaacagccacggcgaccggtcgtttgtcctcctctgatccaaaccttcagaatattccagtacgtaccccattgggccagaagatccgcaaagcgtttgtagctgaggagggttggcgtttagtggccctcgattatagccaaattgaattacgtgtccttgcccatctttctggcgatgagaacctcatccgcgtgtttcaggaaggccgcgacattcacactcaaacggcaagctggatgtttggactgtcagcggaagcgatcgatcctttgatgcgtcgtgcagcgaagaccatcaatttcggtgttctctacggtatgagtgcccatcgtttgtcgcaggaattaggcattccctatgaagaagctgcggcgttcattcagcgctactttcaaagctatcccaaagttaaagcatggatcgagaagactctcgaagaaggccgcacacgtggttacgtagagaccttatttggacgtcgccgctatgttcccgatttaactgctcgcgtgaaatctgtccgtgaagccgccgaacgcatggcgtttaacatgcctgtacagggcacggcagctgacctcatgaaacttgcaatggtgcgcctttttccacaattgcgtgaagttggtgcccgcatgctcttgcaggtccacgatgaactcttgttagaagcgccaaaagagcgtgcggaagaggtggcagccctcgcgaaagaggttatggaaggcgtgtggcccttagcggtgcctcttgaagtcgaagttggtattggcgaggattggttggctgccaaaggataatga

SEQ ID NO: 114 - protein, 841 aa, synthetic construct
  REGION 1..841: note = Variant of DNA polymerase I from Thermus sp. strain 2.9
MHHHHHHGGSGMLPLFEPKGRVLLVDGHHLAYRNFFALKGLTTSRGEPVQGVYGFAKSLLKALKEDGDVVIVVFDAKAPSFRHEAYEAYKAGRAPTPEDFPRQLALMKELVDLLGLERLEVPGFEADDVLATLAKKAEREGYEVHILTADRDLFQLLSPRISVLHPEGHRITPEWLWEKYGLRPEQWVDFRALAGDPSDNIPGVKGIGEKTALKLLKEWGSLENLLKNLDQVKPASVREKILAHLEDLKLSRELSRVRTDLPLEVDFRGRREPDWEGLKAFLERLEFGSLLHEFGLLESPLPAEEAPWPPPEGAFLGYRLSRPEPMWAELLALAASAQGRVYRAEDPHGALRGLKEVRGLLAKDLAVVALREGLDLPPTDDPMLLAYLLDSSNTTPEGVARRYGGEWTEDAGERALLAERLHANLLGRLQGEERLLWLYEEVEKPLSRVLAHMEATGVKLDVAYLEALSLEVAAEMRRLEEEVFRLAGHSFNLNSRDQLERVLFDELGLPPIGKTEKTGKRSTSAAVLEALREVHPIVDKILQYRELAKLKGTYIDRLPALVHPKTGRLHTRFNQTATATGRLSSSDPNLQNIPVRTPLGQKIRKAFVAEEGWRLVALDYSQIELRVLAHLSGDENLIRVFQEGRDIHTQTASWMFGLSAEAIDPLMRRAAKTINFGVLYGMSAHRLSQELGIPYEEAAAFIQRYFQSYPKVKAWIEKTLEEGRTRGYVETLFGRRRYVPDLTARVKSVREAAERMAFNMPVQGTAADLMKLAMVRLFPQLREVGARMLLQVHDELLLEAPKERAEEVAALAKEVMEGVWPLAVPLEVEVGIGEDWLAAKG

SEQ ID NO: 115 - DNA, 2529 bp, synthetic construct
  misc_feature 1..2529: note = Variant of DNA polymerase I from Thermus sp. strain 2.9
  source 1..2529: mol_type = other DNA
atgcaccatcatcatcatcatggcggtagcggcatgttaccgttgttcgaacctaaaggtcgcgtgcttctggttgatggccatcatctcgcgtatcgtaacttctttgccctgaaaggattaaccaccagccgtggcgagccggtacagggtgtctacggctttgcaaagtcgctcctgaaagctctgaaagaagacggtgatgtggtgattgttgtctttgatgcgaaagcgccaagttttcgccacgaagcgtacgaagcttacaaagccgggcgtgctccaacgccggaagactttcctcgccaattggcgcttatgaaggaattagtggatttgcttggcctcgaacgcttggaagttcccggtttcgaggcagacgacgtattagcgactctcgcaaagaaagccgaacgtgagggctatgaagtccatatcttgacagcagatcgcgatcttttccagcttttatctccgcgcatttccgtgttacacccggaagggcatcgtatcaccccggaatggctctgggagaaatatggtttgcgtcccgaacaatgggtggattttcgcgccttagcgggcgatccgagcgacaatattccgggagttaaaggtatcggcgagaagacggcgctcaagctccttaaagaatgggggtcgttggagaacttgcttaagaatttagatcaggtcaaaccagcttcagtgcgtgagaagattcttgcacacctcgaagacctcaaattaagccgcgaattggtccgtgtacgcaccgatttgccgctcgaagttgatttccgtggccgccgcgaacctgactgggagggtcttaaagcgtttttagagcgtcttgaactgggttcgctcttgcatgaattcggccttttagaaagcccgttaccagccgaagaagcaccttggccaccgcccgaaggcgcgtttttaggttaccgtttgagtcgcccggaaccgatgtgggccgaattattggctcttgcagcgtctgcccagggacgtgtgtatcgcgcggaagaccctcatggtgcgctccgtggcctcaaagaagtccgtggactccttgccaaagacttagctgttgttgcattgcgcgaaggtcttgatttacctccgactgatgatccaatgcttcttgcgtacctcttggactcgtcaaacacgacgcccgaaggcgtagcccgtcgttacggcggcgagtggaccgaagatgcaggtgagcgcgcgttattggccgaacgtttgcacgccaatttattaggacgtttgcaaggcgaggaacgtctcctctggctttacgaagaagtggagaaaccattgagtcgcgtgctcgcgcatatggaagctaccggtgtcaaattagacgtggcgtatttggaggcactcagccttgaagccgctgccgaactgcgccgcttggaggaagaagtattccgtttagcaggccactcctttaaccttaattctcgcgatcagttagaacgtgtgttgttcgatgaacttggtctccctcctatcggtaagacagagaagaccggtaaacgtagcacttcagcggcggttttagaagctcttcgcgaagtccatcccattgtggacaagatcttgcagtaccgcgaactcgcgaaattgaaaggcacctatattgaccgtcttccggcattagtccacccgaaaacgggacgcctccatacccgcttcaaccaaacagccacggcgaccggtcgtttgtcctcctctgatccaaaccttcagaatattccagtacgtaccccattgggccagaaaatccgcaaagcgtttgtagctgaggagggttggcgtttagtggccctcgattatagccaaattgaattacgtgtccttgcccatctttctggcgatgagaacctcatccgcgtgtttcaggaaggccgcgacattcacactcaaacggcaagctggatgtttggattatcagctgaagcgatcgatcctttgatgcgtcgtgcagcgaagaccatcaatttcggtgttctctacggtatgagtgcccatcgtttgtcgcaggaattaggcattccctatgaagaagctgcggcgttcattcagcgctactttcaaagctatcccaaagttaaagcatggatcgagaagactctcgaagaaggccgcacacgtggttacgtagagaccttatttggacgtcgccgctatgttcccgatttaaatgctcgcgtgaaatctgtccgtgaagccgccgaacgcatggcgtttaacatgcctgtacagggcacggcagctgacctcatgaaacttgcaatggtgcgcctttttccacaattgcgtgaagttggtgcccgcatgctcttgcaggtccacgatgaactcttgttagaagcgccaaaagagcgtgcggaagaggtggcagccctcgcgaaagaggttatggaaggcgtgtggcccttagcggtgcctcttgaagtcgaagttggtattggcgaggattggttggctgccaaaggataatga

SEQ ID NO: 116 - protein, 841 aa, synthetic construct
  REGION 1..841: note = Variant of DNA polymerase I from Thermus sp. strain 2.9
MHHHHHHGGSGMLPLFEPKGRVLLVDGHHLAYRNFFALKGLTTSRGEPVQGVYGFAKSLLKALKEDGDVVIVVFDAKAPSFRHEAYEAYKAGRAPTPEDFPRQLALMKELVDLLGLERLEVPGFEADDVLATLAKKAEREGYEVHILTADRDLFQLLSPRISVLHPEGHRITPEWLWEKYGLRPEQWVDFRALAGDPSDNIPGVKGIGEKTALKLLKEWGSLENLLKNLDQVKPASVREKILAHLEDLKLSRELVRVRTDLPLEVDFRGRREPDWEGLKAFLERLELGSLLHEFGLLESPLPAEEAPWPPPEGAFLGYRLSRPEPMWAELLALAASAQGRVYRAEDPHGALRGLKEVRGLLAKDLAVVALREGLDLPPTDDPMLLAYLLDSSNTTPEGVARRYGGEWTEDAGERALLAERLHANLLGRLQGEERLLWLYEEVEKPLSRVLAHMEATGVKLDVAYLEALSLEAAAELRRLEEEVFRLAGHSFNLNSRDQLERVLFDELGLPPIGKTEKTGKRSTSAAVLEALREVHPIVDKILQYRELAKLKGTYIDRLPALVHPKTGRLHTRFNQTATATGRLSSSDPNLQNIPVRTPLGQKIRKAFVAEEGWRLVALDYSQIELRVLAHLSGDENLIRVFQEGRDIHTQTASWMFGLSAEAIDPLMRRAAKTINFGVLYGMSAHRLSQELGIPYEEAAAFIQRYFQSYPKVKAWIEKTLEEGRTRGYVETLFGRRRYVPDLNARVKSVREAAERMAFNMPVQGTAADLMKLAMVRLFPQLREVGARMLLQVHDELLLEAPKERAEEVAALAKEVMEGVWPLAVPLEVEVGIGEDWLAAKG

SEQ ID NO: 117 - DNA, 2529 bp, synthetic construct
  misc_feature 1..2529: note = Variant of DNA polymerase I from Thermus sp. strain 2.9
  source 1..2529: mol_type = other DNA
atgcaccatcatcatcatcatggcggtagcggcatgttaccgttgttcgaacctaaaggtcgcgtgcttctggttgatggccatcatctcgcgtatcgtaacttctttgccctgaaaggattaaccaccagccgtggcgagccggtacagggtgtctacggctttgcaaagtcgctcctgaaagctctgaaagaagacggtgatgtggtgattgttgtctttgatgcgaaagcgccaagttttcgccacgaagcgtacgaagcttacaaagccgggcgtgctccaacgccggaagactttcctcgccaattggcgcttatgaaggaattagtggatttgcttggcctcgaacgcttggaagttcccggtttcgaggcagacgacgtattagcgactctcgcaaagaaagccgaacgtgagggctatgaagtccagatcttgacagcagatcgcgatcttttccagcttttatctccgcgcgtctcggtgttacacccggaagggcatcgtatcaccccggaatggctctgggagaaatatggtttgcgtcccgaacaatgggtggattttcgcgccttagtaggcgatccgagcgacaatattccgggagttaaaggtatcggcgagaagacggcgctcaagctccttaaagaatgggggtcgttggagaacttgcttaagaatttagatcaggtcaaaccagcttcagtgcgtgagaagattcttgcacacctcgaagacctcaaattaagccgcgaattgtcccgtgtacgcaccgatttgccgctcgaagttgatttccgtggccgccgcgaacctgactgggagggtcttaaagcgtttttagagcgtcttgaatttggttcgctcttgcatgaattcggccttttagaaagcccgttaccagccgaagaagcaccttggccaccgcccgaaggcgcgtttttaggttaccgtttgagtcgcccggaaccgatgtgggccgaattattggctcttgcagcgtctgcccagggacgtgtgtatcgcgcggaagaccctcatggtgcgctccgcggcctcaaagaagtccgtggactccttgccaaagacttagctgttgttgcattgcgcgaaggtcttgatttacctccgactgatgatccaatgcttcttgcgtacctcttggacccgtcaaacacgacgcccgaaggcgtagcccgtcgttacggcggcgagtggaccgaagatgcaggcgagcgcgcgttattggccgaacgtttgcacgccaatttattaggacgtttgcaaggcgaggaaaagctcctctggctttacgaagaagtggagaaaccattgagtcgcgtgctcgcgcatatggaagctaccggtgtcaaattagacgtggcgtatttggaggcactcagccttgaagttgctgccgaaatgcgccgcttggaggaagaagtattccgtttagcaggccactcctttaaccttaattctcgcgatcagttagaacgtgtgttgttcgatgaacttggtctccctcctatcggcaagacagagaagaccggtaaacgtagcacttcagcggcggttttagaagctcttcgcgaagtccatcccattgtggacaagatcttgcagtaccgcgaactcgcgaaattgaaaggcacctatattgaccctcttccggcattagtccacccgaaaacgggacgcctccatacccgcttcaaccaaacagccacggcgaccggtcgtttgtcctcctctgatccaaaccttcagaatattccagtacgtaccccattgggccagaagatccgcaaagcgtttgtagctgaggagggttggcgtttagtggccctcgattatagccaaattgaattacgtgtccttgcccatctttctggcgatgagaacctcatccgcgtgtttcaggaaggccgcgacattcacactcaaacggcaagctggatgtttggattatcagctgaagcgatcgatcctttgatgcgtcgtgcagcgaagaccatcaatttcggtgttctctacggtatgagtgcccatcgtttgtcgcaggaattaggcattccctatgaagaagctgcggcgttcattcagcgctactttcaaagctatcccaaagttaaagcatggatcgagaagactctcgaagaaggccgcacacgtggttacgtagagaccttatttggacgtcgccgctatgttcccgatttaaacgctcgcgtgaaatctgtccgtgaagccgccgaacgcatggcgttcaacatgcctgtacagggcacggcagctgacctcatgaaacttgcaatggtgcgcctttttccacaattgcgtgaagttggtgcccgcatgctcttgcaggtccacgatgaactcttgttagaagcgccaaaagagcgtgcggaagaggtggcagccctcgcgaaagaggttatggaaggcgtgtggcccttagcggtgcctcttgaagtcgaagttggtattggcgaggattggttggctgccaaaggataatga

SEQ ID NO: 118 - protein, 841 aa, synthetic construct
  REGION 1..841: note = Variant of DNA polymerase I from Thermus sp. strain 2.9
MHHHHHHGGSGMLPLFEPKGRVLLVDGHHLAYRNFFALKGLTTSRGEPVQGVYGFAKSLLKALKEDGDVVIVVFDAKAPSFRHEAYEAYKAGRAPTPEDFPRQLALMKELVDLLGLERLEVPGFEADDVLATLAKKAEREGYEVQILTADRDLFQLLSPRVSVLHPEGHRITPEWLWEKYGLRPEQWVDFRALVGDPSDNIPGVKGIGEKTALKLLKEWGSLENLLKNLDQVKPASVREKILAHLEDLKLSRELSRVRTDLPLEVDFRGRREPDWEGLKAFLERLEFGSLLHEFGLLESPLPAEEAPWPPPEGAFLGYRLSRPEPMWAELLALAASAQGRVYRAEDPHGALRGLKEVRGLLAKDLAVVALREGLDLPPTDDPMLLAYLLDPSNTTPEGVARRYGGEWTEDAGERALLAERLHANLLGRLQGEEKLLWLYEEVEKPLSRVLAHMEATGVKLDVAYLEALSLEVAAEMRRLEEEVFRLAGHSFNLNSRDQLERVLFDELGLPPIGKTEKTGKRSTSAAVLEALREVHPIVDKILQYRELAKLKGTYIDPLPALVHPKTGRLHTRFNQTATATGRLSSSDPNLQNIPVRTPLGQKIRKAFVAEEGWRLVALDYSQIELRVLAHLSGDENLIRVFQEGRDIHTQTASWMFGLSAEAIDPLMRRAAKTINFGVLYGMSAHRLSQELGIPYEEAAAFIQRYFQSYPKVKAWIEKTLEEGRTRGYVETLFGRRRYVPDLNARVKSVREAAERMAFNMPVQGTAADLMKLAMVRLFPQLREVGARMLLQVHDELLLEAPKERAEEVAALAKEVMEGVWPLAVPLEVEVGIGEDWLAAKG

SEQ ID NO: 119 - DNA, 2529 bp, synthetic construct
  misc_feature 1..2529: note = Variant of DNA polymerase I from Thermus sp. strain 2.9
  source 1..2529: mol_type = other DNA
atgcaccatcatcatcatcatggcggtagcggcatgttaccgttgttcgaacctaaaggtcgcgtgcttctggttgatggccatcatctcgcgtatcgtaacttctttgccctgaaaggattaaccaccagccgtggcgagccggtacagggtgtctacggctttgcaaagtcgctcctgaaagctctgaaagaagacggtgatgtggtgattgttgtctttgatgcgaaagcgccaagttttcgccacgaagcgtacgaagcttacaaagccgggcgtgctccaacgccggaagactttcctcgccaattggcgcttatgaaggaattagtggatttgcttggcctcgaacgcttggaagttcccggtttcgaggcagacgacgtattagcgactctcgcaaagaaagccgaacgtgagggctatgaagtccagatcttgacagcagatcgcgatcttttccagcttttatctccgcgcatttccgtgttacacccggaagggcatcgtatcaccccggaatggctctgggagaaatatggtttgcgtcccgaacaatgggtggattttcgcgccttagcgggcgatccgagcgacaatattccgggagttaaaggtatcggcgagaagacggcgctcaagctccttaaagaatgggggtcgttggagaacttgcttaagaatttagatcaggtcaaaccagcttcagtgcgtgagaagattcttgcacacctcgaagacctcaaattaagccgcgaattgtcgcgtgtacgcaccgatttgccgctcgaagttgatttccgtggccgccgcgaacctgactgggagggtcttaaagcgtttttagagcgtcttgaatttggttcgctcttgcatgaattcggccttttagaaagcccgttaccagccgaagaagcaccttggccaccgcccgaaggcgcgtttttaggttaccgtttgagtcgcccggaaccgatgtgggccgaattattggctcttgcagcgtctgcccagggacgtgtgtatcgcgcggaagaccctcatggtgcgctccgtggcctcaaagaagtccgtggactccttgccaaagacttagctgttgttgcattgcgcgaaggtcttgatttacctccgactgatgatccaatgcttcttgcgtacctcttggacccgtcaaacacgacgcccgaaggcgtagcccgtcgttacggcggcgagtggaccgaagatgcaggtgagcgcgcgttattggccgaacgtttgcacgccaatttattaggacgtttgcaaggcgaggaacgtctcctctggctttacgaagaagtggagaaaccattgagtcgcgtgctcgcgcatatggaagctaccggtgtcaaattagacgtggcgtatttggaggcactcagccttgaagtcgctgccgaactgcgccgcttggaggaagaagtattccgtttagcaggccactcctttaaccttaattctcgcgatcagttagaacgtgtgttgttcgatgaacttggtctccctcctatcggtaagacagagaagaccggtaaacgtagcacttcagcggcggttttagaagctcttcgcgaagtccatcccattgtggacaagatcttgcagtaccgcgaactcgcgaaattgaaaggcacctatattgaccgtcttccggcattagtccacccgaaaacgggacgcctccatacccgcttcaaccaaacagccacggcgaccggtcgtttgtcctcctctgatccaaaccttcagaatattccagtacgtaccccattgggccagaaaatccgcaaagcgtttgtagctgaggagggttggcgtttagtggccctcgattatagccaaattgaattacgtgtccttgcccatctttctggcgatgagaacctcatccgcgtgtttcaggaaggccgcgacattcacactcaaacggcaagctggatgtttggattatcagctgaagcgatcgatcctttgatgcgtcgtgcagcgaagaccatcaatttcggtgttctctacggtatgagtgcccatcgtttgtcgcaggaattaggcattccctatgaagaagctgcggcgttcattcagcgctactttcaaagctatcccaaagttaaagcatggatcgagaagactctcgaagaaggccgcacacgtggttacgtagagaccttatttggacgtcgccgctatgttcccgatttaaatgctcgcgtgaaatctgtccgtgaagccgccgaacgcatggcgtggaacatgcctgtacagggcacggcagctgacctcatgaaacttgcaatggtgcgcctttttccacaattgcgtgaagttggtgcccgcatgctcttgcaggtccacgatgaactcttgttagaagcgccaaaagagcgtgcggaagaggtggcagccctcgcgaaagaggttatggaaggcgtgtggcccttagcggtgcctcttgaagtcgaagttggtattggcgaggattggttggctgccaaaggataatga

SEQ ID NO: 120 - protein, 841 aa, synthetic construct
  REGION 1..841: note = Variant of DNA polymerase I from Thermus sp. strain 2.9
MHHHHHHGGSGMLPLFEPKGRVLLVDGHHLAYRNFFALKGLTTSRGEPVQGVYGFAKSLLKALKEDGDVVIVVFDAKAPSFRHEAYEAYKAGRAPTPEDFPRQLALMKELVDLLGLERLEVPGFEADDVLATLAKKAEREGYEVQILTADRDLFQLLSPRISVLHPEGHRITPEWLWEKYGLRPEQWVDFRALAGDPSDNIPGVKGIGEKTALKLLKEWGSLENLLKNLDQVKPASVREKILAHLEDLKLSRELSRVRTDLPLEVDFRGRREPDWEGLKAFLERLEFGSLLHEFGLLESPLPAEEAPWPPPEGAFLGYRLSRPEPMWAELLALAASAQGRVYRAEDPHGALRGLKEVRGLLAKDLAVVALREGLDLPPTDDPMLLAYLLDPSNTTPEGVARRYGGEWTEDAGERALLAERLHANLLGRLQGEERLLWLYEEVEKPLSRVLAHMEATGVKLDVAYLEALSLEVAAELRRLEEEVFRLAGHSFNLNSRDQLERVLFDELGLPPIGKTEKTGKRSTSAAVLEALREVHPIVDKILQYRELAKLKGTYIDRLPALVHPKTGRLHTRFNQTATATGRLSSSDPNLQNIPVRTPLGQKIRKAFVAEEGWRLVALDYSQIELRVLAHLSGDENLIRVFQEGRDIHTQTASWMFGLSAEAIDPLMRRAAKTINFGVLYGMSAHRLSQELGIPYEEAAAFIQRYFQSYPKVKAWIEKTLEEGRTRGYVETLFGRRRYVPDLNARVKSVREAAERMAWNMPVQGTAADLMKLAMVRLFPQLREVGARMLLQVHDELLLEAPKERAEEVAALAKEVMEGVWPLAVPLEVEVGIGEDWLAAKG

SEQ ID NO: 121 - DNA, 2529 bp, synthetic construct
  misc_feature 1..2529: note = Variant of DNA polymerase I from Thermus sp. strain 2.9
  source 1..2529: mol_type = other DNA
atgcaccatcatcatcatcatggcggtagcggcatgttaccgttgttcgaacctaaaggtcgcgtgcttctggttgatggccatcatctcgcgtatcgtaacttctttgccctgaaaggattaaccaccagccgtggcgagccggtacagggtgtctacggctttgcaaagtcgctcctgaaagctctgaaagaagacggtgatgtggtgattgttgtctttgatgcgaaagcgccaagttttcgccacgaagcgtacgaagcttacaaagccgggcgtgctccaacgccggaagactttcctcgccaattggcgcttatgaaggaattagtggatttgcttggcctcgaacgcttggaagttcccggtttcgaggcagacgacgtattagcgactctcgcaaagaaagccgaacgtgagggctatgaagtccagatcttgacagcagatcgcgatcttttccagcttttatctccgcgcatttccgtgttacacccggaagggcatcgtatcaccccggaatggctctgggagaaatatggtttgcgtcccgaacaatgggtggattttcgcgccttagcgggcgatccgagcgacaatattccgggagttaaaggtatcggcgagaagacggcgctcaagctccttaaagaatgggggtcgttggagaacttgcttaagaatttagatcaggtcaaaccagcttcagtgcgtgagaagattcttgcacacctcgaagacctcaaattaagccgcgaattggtccgtgtacgcaccgatttgccgctcgaagttgatttccgtggccgccgcgaacctgactgggagggtcttaaagcgtttttagagcgtcttgaatttggttcgctcttgcatgaattcggccttttagaaagcccgttaccagccgaagaagcaccttggccaccgcccgaaggcgcgtttttaggttaccgtttgagtcgcccggaaccgatgtgggccgaattattggctcttgcagcgtctgcccagggacgtgtgtatcgcgcggaagaccctcatggtgcgctccgtggcctcaaagaagtccgtggactccttgccaaagacttagctgttgttgcattgcgcgaaggtcttgatttacctccgactgatgatccaatgcttcttgcgtacctcttggactcgtcaaacacgacgcccgaaggcgtagcccgtcgttacggcggcgagtggaccgaagatgcaggtgagcgcgcgttattggccgaacgtttgcacgccaatttattaggacgtttgcaaggcgaggaacgtctcctctggctttacgaagaagtggagaaaccattgagtcgcgtgctcgcgcatatggaagctaccggtgtcaaattagacgtggcgtatttggaggcactcagccttgaagttgctgccgaaatgcgccgcttggaggaagaagtattccgtttagcaggccactcctttaaccttaattctcgcgatcagttagaacgtgtgttgttcgatgaacttggtctccctcctatcggtaagacagagaagaccggtaaacgtagcacttcagcggcggttttagaagctcttcgcgaagtccatcccattgtggacaagatcttgcagtaccgcgaactcgcgaaattgaaaggcacctatattgaccctcttccggcattagtccacccgaaaacgggacgcctccatacccgcttcaaccaaacagccacggcgaccggtcgtttgtcctcctctgatccaaaccttcagaatattccagtacgtaccccattgggccagcatatccgcaaagcgtttgtagctgaggagggttggcgtttagtggccctcgattatagccaaattgaattacgtgtccttgcccatctttctggcgatgagaacctcatccgcgtgtttcaggaaggccgcgacattcacactcaaacggcaagctggatgtttggattatcagctgaagcgatcgatcctttgatgcgtcgtgcagcgaagaccatcaatttcggtgttctctacggtatgagtgcccatcgtttgtcgcaggaattaggcattccctatgaagaagctgcggcgttcattcagcgctactttcaaagctatcccaaagttaaagcatggatcgagaagactctcgaagaaggccgcacacgtggttacgtagagaccttatttggacgtcgccgctatgttcccgatttaaacgctcgcgtgaaatctgtccgtgaagccgccgaacgcatggcgtttaacatgcctgtacagggcacggcagctgacctcatgaaacttgcaatggtgcgcctttttccacaattgcgtgaagttggtgcccgcatgctcttgcaggtccacgatgaactcttgttagaagcgccaaaagagcgtgcggaagaggtggcagccctcgcgaaagaggttatggaaggcgtgtggcccttagcggtgcctcttgaagtcgaagttggtattggcgaggattggttggctgccaaaggataatga

SEQ ID NO: 122 - protein, 841 aa, synthetic construct
  REGION 1..841: note = Variant of DNA polymerase I from Thermus sp. strain 2.9
MHHHHHHGGSGMLPLFEPKGRVLLVDGHHLAYRNFFALKGLTTSRGEPVQGVYGFAKSLLKALKEDGDVVIVVFDAKAPSFRHEAYEAYKAGRAPTPEDFPRQLALMKELVDLLGLERLEVPGFEADDVLATLAKKAEREGYEVQILTADRDLFQLLSPRISVLHPEGHRITPEWLWEKYGLRPEQWVDFRALAGDPSDNIPGVKGIGEKTALKLLKEWGSLENLLKNLDQVKPASVREKILAHLEDLKLSRELVRVRTDLPLEVDFRGRREPDWEGLKAFLERLEFGSLLHEFGLLESPLPAEEAPWPPPEGAFLGYRLSRPEPMWAELLALAASAQGRVYRAEDPHGALRGLKEVRGLLAKDLAVVALREGLDLPPTDDPMLLAYLLDSSNTTPEGVARRYGGEWTEDAGERALLAERLHANLLGRLQGEERLLWLYEEVEKPLSRVLAHMEATGVKLDVAYLEALSLEVAAEMRRLEEEVFRLAGHSFNLNSRDQLERVLFDELGLPPIGKTEKTGKRSTSAAVLEALREVHPIVDKILQYRELAKLKGTYIDPLPALVHPKTGRLHTRFNQTATATGRLSSSDPNLQNIPVRTPLGQHIRKAFVAEEGWRLVALDYSQIELRVLAHLSGDENLIRVFQEGRDIHTQTASWMFGLSAEAIDPLMRRAAKTINFGVLYGMSAHRLSQELGIPYEEAAAFIQRYFQSYPKVKAWIEKTLEEGRTRGYVETLFGRRRYVPDLNARVKSVREAAERMAFNMPVQGTAADLMKLAMVRLFPQLREVGARMLLQVHDELLLEAPKERAEEVAALAKEVMEGVWPLAVPLEVEVGIGEDWLAAKG

SEQ ID NO: 123 - DNA, 2529 bp, synthetic construct
  misc_feature 1..2529: note = Variant of DNA polymerase I from Thermus sp. strain 2.9
  source 1..2529: mol_type = other DNA
atgcaccatcatcatcatcatggcggtagcggcatgttaccgttgttcgaacctaaaggtcgcgtgcttctggttgatggccatcatctcgcgtatcgtaacttctttgccctgaaaggattaaccaccagccgtggcgagccggtacagggtgtctacggctttgcaaagtcgctcctgaaagctctgaaagaagacggtgatgtggtgattgttgtctttgatgcgaaagcgccaagttttcgccacgaagcgtacgaagcttacaaagccgggcgtgctccaacgccggaagactttcctcgccaattggcgcttatgaaggaattagtggatttgcttggcctcgaacgcttggaagttcccggtttcgaggcagacgacgtattagcgactctcgcaaagaaagccgaacgtgagggctatgaagtccatatcttgacagcagatcgcgatcttttccagcttttatctccgcgcatttccgtgttacacccggaagggcatcgtatcaccccggaatggctctgggagaaatatggtttgcgtcccgaacaatgggtggattttcgcgccttagcgggcgatccgagcgacaatattccgggagttaaaggtatcggcgagaagacggcgctcaagctccttaaagaatgggggtcgttggagaacttgcttaagaatttagatcaggtcaaaccagcttcagtgcgtgagaagattcttgcacacctcgaagacctcaaattaagccgcgaattgtcgcgtgtacgcaccgatttgccgctcgaagttgatttccgtggccgccgcgaacctgactgggagggtcttaaagcgtttttagagcgtcttgaatttggttcgctcttgcatgaattcggccttttagaaagcccgttaccagccgaagaagcaccttggccaccgcccgaaggcgcgtttttaggttaccgtttgagtcgcccggaaccgatgtgggccgaattattggctcttgcagcgtctgcccagggacgtgtgtatcgcgcggaagaccctcatggtgcgctccgtggcctcaaagaagtccgtggactccttgccaaagacttagctgttgttgcattgcgcgaaggtcttgatttacctccgactgatgatccaatgcttcttgcgtacctcttggacccgtcaaacacgacgcccgaacgcgtagcccgtcgttacggcggcgagtggaccgaagatgcaggtgagcgcgcgttattggccgaacgtttgcacgccaatttattaggacgtttgcaaggcgaggaacgtctcctctggctttacgaagaagtggagaaaccattgagtcgcgtgctcgcgcatatggaagctaccggtgtcaaattagacgtggcgtatttggaggcactcagccttgaagccgctgccgaaatgcgccgcttggaggaagaagtattccgtttagcaggccactcctttaaccttaattctcgcgatcagttagaacgtgtgttgttcgatgaacttggtctccctcctatcggcaagacagagaagaccggtaaacgtagcacttcagcggcggttttagaagctcttcgcgaagtccatcccattgtggacaagatcttgcagtaccgcgaactcgcgaaattgaaaggcacctatattgaccgtcttccggcattagtccacccgaaaacgggacgcctccatacccgcttcaaccaaacagccacggcgaccggtcgtttgtcctcctctgatccaaaccttcagaatattccagtacgtaccccattgggccagaagatccgcaaagcgtttgtagctgaggagggttggcgtttagtggccctcgattatagccaaattgaattacgtgtccttgcccatctttctggcgatgagaacctcatccgcgtgtttcaggaaggccgcgacattcacactcaaacggcaagctggatgtttggactgtcatcggaagcgatcgatcctttgatgcgtcgtgcagcgaagaccatcaatttcggtgttctctacggtatgagtgcccatcgtttgtcgcaggaattaggcattccctatgaagaagctgcggcgttcattcagcgctactttcaaagctatcccaaagttaaagcatggatcgagaagactctcgaagaaggccgcacacgtggttacgtagagaccttatttggacgtcgccgctatgttcccgatttaaacgctcgcgtgaaatctgtccgtgaagccgccgaacgcatggcgttcaacatgcctgtacagggcacggcagctgacctcatgaaacttgcaatggtgcgcctttttccacaattgcgtgaagttggtgcccgcatgctcttgcaggtccacgatgaactcttgttagaagcgccaaaagagcgtgcggaagaggtggcagccctcgcgaaagaggttatggaaggcgtgtggcccttagcggtgcctcttgaagtcgaagttggtattggcgaggattggttggctgccaaaggataatga

SEQ ID NO: 124 - protein, 841 aa, synthetic construct
  REGION 1..841: note = Variant of DNA polymerase I from Thermus sp. strain 2.9
MHHHHHHGGSGMLPLFEPKGRVLLVDGHHLAYRNFFALKGLTTSRGEPVQGVYGFAKSLLKALKEDGDVVIVVFDAKAPSFRHEAYEAYKAGRAPTPEDFPRQLALMKELVDLLGLERLEVPGFEADDVLATLAKKAEREGYEVHILTADRDLFQLLSPRISVLHPEGHRITPEWLWEKYGLRPEQWVDFRALAGDPSDNIPGVKGIGEKTALKLLKEWGSLENLLKNLDQVKPASVREKILAHLEDLKLSRELSRVRTDLPLEVDFRGRREPDWEGLKAFLERLEFGSLLHEFGLLESPLPAEEAPWPPPEGAFLGYRLSRPEPMWAELLALAASAQGRVYRAEDPHGALRGLKEVRGLLAKDLAVVALREGLDLPPTDDPMLLAYLLDPSNTTPERVARRYGGEWTEDAGERALLAERLHANLLGRLQGEERLLWLYEEVEKPLSRVLAHMEATGVKLDVAYLEALSLEAAAEMRRLEEEVFRLAGHSFNLNSRDQLERVLFDELGLPPIGKTEKTGKRSTSAAVLEALREVHPIVDKILQYRELAKLKGTYIDRLPALVHPKTGRLHTRFNQTATATGRLSSSDPNLQNIPVRTPLGQKIRKAFVAEEGWRLVALDYSQIELRVLAHLSGDENLIRVFQEGRDIHTQTASWMFGLSSEAIDPLMRRAAKTINFGVLYGMSAHRLSQELGIPYEEAAAFIQRYFQSYPKVKAWIEKTLEEGRTRGYVETLFGRRRYVPDLNARVKSVREAAERMAFNMPVQGTAADLMKLAMVRLFPQLREVGARMLLQVHDELLLEAPKERAEEVAALAKEVMEGVWPLAVPLEVEVGIGEDWLAAKG

SEQ ID NO: 125 - DNA, 2529 bp, synthetic construct
  misc_feature 1..2529: note = Variant of DNA polymerase I from Thermus sp. strain 2.9
  source 1..2529: mol_type = other DNA
atgcaccatcatcatcatcatggcggtagcggcatgttaccgttgttcgaacctaaaggtcgcgtgcttctggttgatggccatcatctcgcgtatcgtaacttctttgccctgaaaggattaaccaccagccgtggcgagccggtacagggtgtctacggctttgcaaagtcgctcctgaaagctctgaaagaagacggtgatgtggtgattgttgtctttgatgcgaaagcgccaagttttcgccacgaagcgtacgaagcttacaaagccgggcgtgctccaacgccggaagactttcctcgccaattggcgcttatgaaggaattagtggatttgcttggcctcgaacgcttggaagttcccggtttcgaggcagacgacgtattagcgactctcgcaaagaaagccgaacgtgagggctatgaagtccagatcttgacagcagatcgcgatcttttccagcttttatctccgcgcgtctcggtgttacacccggaagggcatcgtatcaccccggaatggctctgggagaaatatggtttgcgtcccgaacaatgggtggattttcgcgccttagcaggcgatccgagcgacaatattccgggagttaaaggtatcggcgagaagacggcgctcaagctccttaaagaatgggggtcgttggagaacttgcttaagaatttagatcaggtcaaaccagcttcagtgcgtgagaagattcttgcacacctcgaagacctcaaattaagccgcgaattgtcccgtgtacgcaccgatttgccgctcgaagttgatttccgtggccgccgcgaacctgactgggagggtcttaaagcgtttttagagcgtcttgaatttggttcgctcttgcatgaattcggccttttagaaagcccgttaccagccgaagaagcaccttggccaccgcccgaaggcgcgtttttaggttaccgtttgagtcgcccggaaccgatgtgggccgaattattggctcttgcagcgtctgcccagggacgtgtgtatcgcgcggaagaccctcatggtgcgctcaaaggcctcaaagaagtccgtggactccttgccaaagacttagctgttgttgcattgcgcgaaggtcttgatttacctccgactgatgatccaatgcttcttgcgtacctcttggacccgtcaaacacgacgcccgaaggcgtagcccgtcgttacggcggcgagtggaccgaagatgcaggtgagcgcgcgttattggccgaacgtttgcacgccaatttattaggacgtttgcaaggcgaggaacgtctcctctggctttacgaagaagtggagaaaccattgagtcgcgtgctcgcgcatatggaagctaccggtgtcaaattagacgtggcgtatttggaggcactcagccttgaagttgctgccgaaatgcgccgcttggaggaagaagtattccgtttagcaggccactcctttaaccttaattctcgcgatcagttagaacgtgtgttgttcgatgaacttggtctccctcctatcggcaagacagagaagaccggtaaacgtagcacttcagcggcggttttagaagctcttcgcgaagtccatcccattgtggacaagatcttgcagtaccgcgaactcgcgaaattgaaaggcacctatattgaccctcttccggcattagtccacccgaaaacgggacgcctccatacccgcttcaaccaaacagccacggcgaccggtcgtttgtcctcctctgatccaaaccttcagaatattccagtacgtaccccattgggccagaagatccgcaaagcgtttgtagctgaggagggttggcgtttagtggccctcgattatagccaaattgaattacgtgtccttgcccatctttctggcgatgagaacctcatccgcgtgtttcaggaaggccgcgacattcacactcaaacggcaagctggatgtttggattatcagctgaagcgatcgatcctttgatgcgtcgtgcagcgaagaccatcaatttcggtgttctctacggtatgagtgcccatcgtttgtcgcaggaattaggcattccctatgaagaagctgcggcgttcattcagcgctactttcaaagctatcccaaagttaaagcatggatcgagaagactctcgaagaaggccgcacacgtggttacgtagagaccttatttggacgtcgccgctatgttcccgatttaaacgctcgcgtgaaatctgtccgtgaagccgccgaacgcatggcgttcaacatgcctgtacagggcacggcagctgacctcatgaaacttgcaatggtgcgcctttttccacaattgcgtgaagttggtgcccgcatgctcttgcaggtccacgatgaactcttgttagaagcgccaaaagagcgtgcggaagaggtggcagccctcgcgaaagaggttatggaaggcgtgtggcccttagcggtgcctcttgaagtcgaagttggtattggcgaggattggttggctgccaaaggataatga

SEQ ID NO: 126 - protein, 841 aa, synthetic construct
  REGION 1..841: note = Variant of DNA polymerase I from Thermus sp. strain 2.9
MHHHHHHGGSGMLPLFEPKGRVLLVDGHHLAYRNFFALKGLTTSRGEPVQGVYGFAKSLLKALKEDGDVVIVVFDAKAPSFRHEAYEAYKAGRAPTPEDFPRQLALMKELVDLLGLERLEVPGFEADDVLATLAKKAEREGYEVQILTADRDLFQLLSPRVSVLHPEGHRITPEWLWEKYGLRPEQWVDFRALAGDPSDNIPGVKGIGEKTALKLLKEWGSLENLLKNLDQVKPASVREKILAHLEDLKLSRELSRVRTDLPLEVDFRGRREPDWEGLKAFLERLEFGSLLHEFGLLESPLPAEEAPWPPPEGAFLGYRLSRPEPMWAELLALAASAQGRVYRAEDPHGALKGLKEVRGLLAKDLAVVALREGLDLPPTDDPMLLAYLLDPSNTTPEGVARRYGGEWTEDAGERALLAERLHANLLGRLQGEERLLWLYEEVEKPLSRVLAHMEATGVKLDVAYLEALSLEVAAEMRRLEEEVFRLAGHSFNLNSRDQLERVLFDELGLPPIGKTEKTGKRSTSAAVLEALREVHPIVDKILQYRELAKLKGTYIDPLPALVHPKTGRLHTRFNQTATATGRLSSSDPNLQNIPVRTPLGQKIRKAFVAEEGWRLVALDYSQIELRVLAHLSGDENLIRVFQEGRDIHTQTASWMFGLSAEAIDPLMRRAAKTINFGVLYGMSAHRLSQELGIPYEEAAAFIQRYFQSYPKVKAWIEKTLEEGRTRGYVETLFGRRRYVPDLNARVKSVREAAERMAFNMPVQGTAADLMKLAMVRLFPQLREVGARMLLQVHDELLLEAPKERAEEVAALAKEVMEGVWPLAVPLEVEVGIGEDWLAAKG

SEQ ID NO: 127 - DNA, 2529 bp, synthetic construct
  misc_feature 1..2529: note = Variant of DNA polymerase I from Thermus sp. strain 2.9
  source 1..2529: mol_type = other DNA
atgcaccatcatcatcatcatggcggtagcggcatgttaccgttgttcgaacctaaaggtcgcgtgcttctggttgatggccatcatctcgcgtatcgtaacttctttgccctgaaaggattaaccaccagccgtggcgagccggtacagggtgtctacggctttgcaaagtcgctcctgaaagctctgaaagaagacggtgatgtggtgattgttgtctttgatgcgaaagcgccaagttttcgccacgaagcgtacgaagcttacaaagccgggcgtgctccaacgccggaagactttcctcgccaattggcgcttatgaaggaattagtggatttgcttggcctcgaacgcttggaagttcccggtttcgaggcagacgacgtattagcgactctcgcaaagaaagccgaacgtgagggctatgaagtccagatcttgacagcagatcgcgatcttttccagcttttatctccgcgcatttccgtgttacacccggaagggcatcgtatcaccccggaatggctctgggagaaatatggtttgcgtcccgaacaatgggtggattttcgcgccttagcgggcgatccgagcgacaatattccgggagttaaaggtatcggcgagaagacggcgctcaagctccttaaagaatgggggtcgttggagaacttgcttaagaatttagatcaggtcaaaccagcttcagtgcgtgagaagattcttgcacacctcgaagacctcaaattaagccgcgaattgtcgcgtgtacgcaccgatttgccgctcgaagttgatttccgtggccgccgcgaacctgactgggagggtcttaaagcgtttttagagcgtcttgaatttggttcgctcttgcatgaattcggccttttagaaagcccgttaccagccgaagaagcaccttggccaccgcccgaaggcgcgtttttaggttaccgtttgagtcgcccggaaccgatgtgggccgaattattggctcttgcagcgtctgcccagggacgtgtgtatcgcgcggaagaccctcatggtgcgctccgtggcctcaaagaagtccgtggactccttgccaaagacttagctgttgttgcattgcgcgaaggtcttgatttacctccgactgatgatccaatgcttcttgcgtacctcttggacccgtcaaacacgacgcccgaaggcgtagcccgtcgttacggcggcgagtggaccgaagatgcaggtgagcgcgcgttattggccgaacgtttgcacgccaatttattaggacgtttgcaaggcgaggaacgtctcctctggctttacgaagaagtggagaaaccattgagtcgcgtgctcgcgcatatggaagctaccggtgtcaaattagacgtggcgtatttggaggcactcagccttgaagccgctgccgaaatgcgccgcttggaggaagaagtattccgtttagcaggccactcctttaaccttaattctcgcgatcagttagaacgtgtgttgttcgatgaacttggtctccctcctatcaccaagacagagaagaccggtaaacgtagcacttcagcggcggttttagaagctcttcgcgaagtccatcccattgtggacaagatcttgcagtaccgcgaactcgcgaaattgaaaggcacctatattgaccgtcttccggcattagtccacccgaaaacgggacgcctccatacccgcttcaaccaaacagccacggcgaccggtcgtttgtcctcctctgatccaaaccttcagaatattccagtacgtaccccattgggccagaagatccgcaaagcgtttgtagctgaggagggttggcgtttagtggccctcgattatagccaaattgaattacgtgtccttgcccatctttctggcgatgagaacctcatccgcgtgtttcaggaaggccgcgacattcacactcaaacggcaagctggatgtttggagtgtcagcggaagcgatcgatcctttgatgcgtcgtgcagcgaagaccatcaatttcggtgttctctacggtatgagtgcccatcgtttgtcgcaggaattaggcattccctatgaagaagctgcggcgttcattcagcgctactttcaaagctatcccaaagttaaagcatggatcgagaagactctcgaagaaggccgcacacgtggttacgtagagaccttatttggacgtcgccgctatgttcccgatttaactgctcgcgtgaaatctgtccgtgaagccgccgaacgcatggcgtggaacatgcctgtacagggcacggcagctgacctcatgaaacttgcaatggtgcgcctttttccacaattgcgtgaagttggtgcccgcatgctcttgcaggtccacgatgaactcttgttagaagcgccaaaagagcgtgcggaagaggtggcagccctcgcgaaagaggttatggaaggcgtgtggcccttagcggtgcctcttgaagtcgaagttggtattggcgaggattggttggctgccaaaggataatga

SEQ ID NO: 128 - protein, 841 aa, synthetic construct
  REGION 1..841: note = Variant of DNA polymerase I from Thermus sp. strain 2.9
MHHHHHHGGSGMLPLFEPKGRVLLVDGHHLAYRNFFALKGLTTSRGEPVQGVYGFAKSLLKALKEDGDVVIVVFDAKAPSFRHEAYEAYKAGRAPTPEDFPRQLALMKELVDLLGLERLEVPGFEADDVLATLAKKAEREGYEVQILTADRDLFQLLSPRISVLHPEGHRITPEWLWEKYGLRPEQWVDFRALAGDPSDNIPGVKGIGEKTALKLLKEWGSLENLLKNLDQVKPASVREKILAHLEDLKLSRELSRVRTDLPLEVDFRGRREPDWEGLKAFLERLEFGSLLHEFGLLESPLPAEEAPWPPPEGAFLGYRLSRPEPMWAELLALAASAQGRVYRAEDPHGALRGLKEVRGLLAKDLAVVALREGLDLPPTDDPMLLAYLLDPSNTTPEGVARRYGGEWTEDAGERALLAERLHANLLGRLQGEERLLWLYEEVEKPLSRVLAHMEATGVKLDVAYLEALSLEAAAEMRRLEEEVFRLAGHSFNLNSRDQLERVLFDELGLPPITKTEKTGKRSTSAAVLEALREVHPIVDKILQYRELAKLKGTYIDRLPALVHPKTGRLHTRFNQTATATGRLSSSDPNLQNIPVRTPLGQKIRKAFVAEEGWRLVALDYSQIELRVLAHLSGDENLIRVFQEGRDIHTQTASWMFGVSAEAIDPLMRRAAKTINFGVLYGMSAHRLSQELGIPYEEAAAFIQRYFQSYPKVKAWIEKTLEEGRTRGYVETLFGRRRYVPDLTARVKSVREAAERMAWNMPVQGTAADLMKLAMVRLFPQLREVGARMLLQVHDELLLEAPKERAEEVAALAKEVMEGVWPLAVPLEVEVGIGEDWLAAKG

SEQ ID NO: 129 - DNA, 2529 bp, synthetic construct
  misc_feature 1..2529: note = Variant of DNA polymerase I from Thermus sp. strain 2.9
  source 1..2529: mol_type = other DNA
atgcaccatcatcatcatcatggcggtagcggcatgttaccgttgttcgaacctaaaggtcgcgtgcttctggttgatggccatcatctcgcgtatcgtaacttctttgccctgaaaggattaaccaccagccgtggcgagccggtacagggtgtctacggctttgcaaagtcgctcctgaaagctctgaaagaagacggtgatgtggtgattgttgtctttgatgcgaaagcgccaagttttcgccacgaagcgtacgaagcttacaaagccgggcgtgctccaacgccggaagactttcctcgccaattggcgcttatgaaggaattagtggatttgcttggcctcgaacgcttggaagttcccggtttcgaggcagacgacgtattagcgactctcgcaaagaaagccgaacgtgagggctatgaagtccagatcttgacagcagatcgcgatcttttccagcttttatctccgcgcatttccgtgttacacccggaagggcatcgtatcaccccggaatggctctgggagaaatatggtttgcgtcccgaacaatgggtggattttcgcgccttagcgggcgatccgagcgacaatattccgggagttaaaggtatcggcgagaagacggcgctcaagctccttaaagaatgggggtcgttggagaacttgcttaagaatttagatcaggtcaaaccagcttcagtgcgtgagaagattcttgcacacctcgaagacctcaaattaagccgcgaattggtccgtgtacgcaccgatttgccgctcgaagttgatttccgtggccgccgcgaacctgactgggagggtcttaaagcgtttttagagcgtcttgaatttggttcgctcttgcatgaattcggccttttagaaagcccgttaccagccgaagaagcaccttggccaccgcccgaaggcgcgtttttaggttaccgtttgagtcgcccggaaccgatgtgggccgaattattggctcttgcagcgtctgcccagggacgtgtgtatcgcgcggaagaccctcatggtgcgctccgtggcctcaaagaagtccgtggactccttgccaaagacttagctgttgttgcattgcgcgaaggtcttgatttacctccgactgatgatccaatgcttcttgcgtacctcttggacccgtcaaacacgacgcccgaaggcgtagcccgtcgttacggcggcgagtggaccgaagatgcaggtgagcgcgcgttattggccgaacgtttgcacgccaatttattaggacgtttgcaaggcgaggaacgtctcctctggctttacgaagaagtggagaaaccattgagtcgcgtgctcgcgcatatggaagctaccggtgtcaaattagacgtggcgtatttggaggcactcagccttgaagtcgctgccgaaatgcgccgcttggaggaagaagtattccgtttagcaggccactcctttaaccttaattctcgcgatcagttagaacgtgtgttgttcgatgaacttggtctccctcctatcaccaagacagagaagaccggtaaacgtagcacttcagcggcggttttagaagctcttcgcgaagtccatcccattgtggacaagatcttgcagtaccgcgaactcgcgaaattgaaaggcacctatattgaccgtcttccggcattagtccacccgaaaacgggacgcctccatacccgcttcaaccaaacagccacggcgaccggtcgtttgtcctcctctgatccaaaccttcagaatattccagtacgtaccccattgggccagaagatccgcaaagcgtttgtagctgaggagggttggcgtttagtggccctcgattatagccaaattgaattacgtgtccttgcccatctttctggcgatgagaacctcatccgcgtgtttcaggaaggccgcgacattcacactcaaacggcaagctggatgtttggattatcagctgaagcgatcgatcctttgatgcgtcgtgcagcgaagaccatcaatttcggtgttctctacggtatgagtgccgcgcgtttgtcgcaggaattaggcattccctatgaagaagctgcggcgttcattcagcgctactttcaaagctatcccaaagttaaagcatggatcgagaagactctcgaagaaggccgcacacgtggttacgtagagaccttatttggacgtcgccgctatgttcccgatttaaacgctcgcgtgaaatctgtccgtgaagccgccgaacgcatggcgtggaacatgcctgtacagggcacggcagctgacctcatgaaacttgcaatggtgcgcctttttccacaattgcgtgaagttggtgcccgcatgctcttgcaggtccacgatgaactcttgttagaagcgccaaaagagcgtgcggaagaggtggcagccctcgcgaaagaggttatggaaggcgtgtggcccttagcggtgcctcttgaagtcgaagttggtattggcgaggattggttggctgccaaaggataatga

SEQ ID NO: 130 - protein, 841 aa, synthetic construct
  REGION 1..841: note = Variant of DNA polymerase I from Thermus sp. strain 2.9
MHHHHHHGGSGMLPLFEPKGRVLLVDGHHLAYRNFFALKGLTTSRGEPVQGVYGFAKSLLKALKEDGDVVIVVFDAKAPSFRHEAYEAYKAGRAPTPEDFPRQLALMKELVDLLGLERLEVPGFEADDVLATLAKKAEREGYEVQILTADRDLFQLLSPRISVLHPEGHRITPEWLWEKYGLRPEQWVDFRALAGDPSDNIPGVKGIGEKTALKLLKEWGSLENLLKNLDQVKPASVREKILAHLEDLKLSRELVRVRTDLPLEVDFRGRREPDWEGLKAFLERLEFGSLLHEFGLLESPLPAEEAPWPPPEGAFLGYRLSRPEPMWAELLALAASAQGRVYRAEDPHGALRGLKEVRGLLAKDLAVVALREGLDLPPTDDPMLLAYLLDPSNTTPEGVARRYGGEWTEDAGERALLAERLHANLLGRLQGEERLLWLYEEVEKPLSRVLAHMEATGVKLDVAYLEALSLEVAAEMRRLEEEVFRLAGHSFNLNSRDQLERVLFDELGLPPITKTEKTGKRSTSAAVLEALREVHPIVDKILQYRELAKLKGTYIDRLPALVHPKTGRLHTRFNQTATATGRLSSSDPNLQNIPVRTPLGQKIRKAFVAEEGWRLVALDYSQIELRVLAHLSGDENLIRVFQEGRDIHTQTASWMFGLSAEAIDPLMRRAAKTINFGVLYGMSAARLSQELGIPYEEAAAFIQRYFQSYPKVKAWIEKTLEEGRTRGYVETLFGRRRYVPDLNARVKSVREAAERMAWNMPVQGTAADLMKLAMVRLFPQLREVGARMLLQVHDELLLEAPKERAEEVAALAKEVMEGVWPLAVPLEVEVGIGEDWLAAKG

SEQ ID NO: 131 - DNA, 2529 bp, synthetic construct
  misc_feature 1..2529: note = Variant of DNA polymerase I from Thermus sp. strain 2.9
  source 1..2529: mol_type = other DNA
atgcaccatcatcatcatcatggcggtagcggcatgttaccgttgttcgaacctaaaggtcgcgtgcttctggttgatggccatcatctcgcgtatcgtaacttctttgccctgaaaggattaaccaccagccgtggcgagccggtacagggtgtctacggctttgcaaagtcgctcctgaaagctctgaaagaagacggtgatgtggtgattgttgtctttgatgcgaaagcgccaagttttcgccacgaagcgtacgaagcttacaaagccgggcgtgctccaacgccggaagactttcctcgccaattggcgcttatgaaggaattagtggatttgcttggcctcgaacgcttggaagttcccggtttcgaggcagacgacgtattagcgactctcgcaaagaaagccgaacgtgagggctatgaagtccatatcttgacagcagatcgcgatcttttccagcttttatctccgcgcatttccgtgttacacccggaagggcatcgtatcaccccggaatggctctgggagaaatatggtttgcgtcccgaacaatgggtggattttcgcgccttagcgggcgatccgagcgacaatattccgggagttaaaggtatcggcgagaagacggcgctcaagctccttaaagaatgggggtcgttggagaacttgcttaagaatttagatcaggtcaaaccagcttcagtgcgtgagaagattcttgcacacctcgaagacctcaaattaagccgcgaattggtccgtgtacgcaccgatttgccgctcgaagttgatttccgtggccgccgcgaacctgactgggagggtcttaaagcgtttttagagcgtcttgaatttggttcgctcttgcatgaattcggccttttagaaagcccgttaccagccgaagaagcaccttggccaccgcccgaaggcgcgtttttaggttaccgtttgagtcgcccggaaccgatgtgggccgaattattggctcttgcagcgtctgcccagggacgtgtgtatcgcgcggaagaccctcatggtgcgctccgtggcctcaaagaagtccgtggactccttgccaaagacttagctgttgttgcattgcgcgaaggtcttgatttacctccgactgatgatccaatgcttcttgcgtacctcttggactcgtcaaacacgacgcccgaaggcgtagcccgtcgttacggcggcgagtggaccgaagatgcaggtgagcgcgcgttattggccgaacgtttgcacgccaatttattaggacgtttgcaaggcgaggaacgtctcctctggctttacgaagaagtggagaaaccattgagtcgcgtgctcgcgcatatggaagctaccggtgtcaaattagacgtggcgtatttggaggcactcagccttgaagtcgctgccgaaatgcgccgcttggaggaagaagtattccgtttagcaggccactcctttaaccttaattctcgcgatcagttagaacgtgtgttgttcgatgaacttggtctccctcctatcaccaagacagagaagaccggtaaacgtagcacttcagcggcggttttagaagctcttcgcgaagtccatcccattgtggacaagatcttgcagtaccgcgaactcgcgaaattgaaaggcacctatattgaccgtcttccggcattagtccacccgaaaacgggacgcctccatacccgcttcaaccaaacagccacggcgaccggtcgtttgtcctcctctgatccaaaccttcagaatattccagtacgtaccccattgggccagaagatccgcaaagcgtttgtagctgaggagggttggcgtttagtggccctcgattatagccaaattgaattacgtgtccttgcccatctttctggcgatgagaacctcatccgcgtgtttcaggaaggccgcgacattcacactcaaacggcaagctggatgtttggattatcagctgaagcgatcgatcctttgatgcgtcgtgcagcgaagaccatcaatttcggtgttctctacggtatgagtgcccatcgtttgtcgcaggaattaggcattccctatgaagaagctgcggcgttcattcagcgctactttcaaagctatcccaaagttaaagcatggatcgagaagactctcgaagaaggccgcacacgtggttacgtagagaccttatttggacgtcgccgctatgttcccgatttaactgctcgcgtgaaatctgtccgtgaagccgccgaacgcatggcgtggaacatgcctgtacagggcacggcagctgacctcatgaaacttgcaatggtgcgcctttttccacaattgcgtgaagttggtgcccgcatgctcttgcaggtccacgatgaactcttgttagaagcgccaaaagagcgtgcggaagaggtggcagccctcgcgaaagaggttatggaaggcgtgtggcccttagcggtgcctcttgaagtcgaagttggtattggcgaggattggttggctgccaaaggataatga

SEQ ID NO: 132 - protein, 841 aa, synthetic construct
  REGION 1..841: note = Variant of DNA polymerase I from Thermus sp. strain 2.9
MHHHHHHGGSGMLPLFEPKGRVLLVDGHHLAYRNFFALKGLTTSRGEPVQGVYGFAKSLLKALKEDGDVVIVVFDAKAPSFRHEAYEAYKAGRAPTPEDFPRQLALMKELVDLLGLERLEVPGFEADDVLATLAKKAEREGYEVHILTADRDLFQLLSPRISVLHPEGHRITPEWLWEKYGLRPEQWVDFRALAGDPSDNIPGVKGIGEKTALKLLKEWGSLENLLKNLDQVKPASVREKILAHLEDLKLSRELVRVRTDLPLEVDFRGRREPDWEGLKAFLERLEFGSLLHEFGLLESPLPAEEAPWPPPEGAFLGYRLSRPEPMWAELLALAASAQGRVYRAEDPHGALRGLKEVRGLLAKDLAVVALREGLDLPPTDDPMLLAYLLDSSNTTPEGVARRYGGEWTEDAGERALLAERLHANLLGRLQGEERLLWLYEEVEKPLSRVLAHMEATGVKLDVAYLEALSLEVAAEMRRLEEEVFRLAGHSFNLNSRDQLERVLFDELGLPPITKTEKTGKRSTSAAVLEALREVHPIVDKILQYRELAKLKGTYIDRLPALVHPKTGRLHTRFNQTATATGRLSSSDPNLQNIPVRTPLGQKIRKAFVAEEGWRLVALDYSQIELRVLAHLSGDENLIRVFQEGRDIHTQTASWMFGLSAEAIDPLMRRAAKTINFGVLYGMSAHRLSQELGIPYEEAAAFIQRYFQSYPKVKAWIEKTLEEGRTRGYVETLFGRRRYVPDLTARVKSVREAAERMAWNMPVQGTAADLMKLAMVRLFPQLREVGARMLLQVHDELLLEAPKERAEEVAALAKEVMEGVWPLAVPLEVEVGIGEDWLAAKG

SEQ ID NO: 133 - DNA, 2529 bp, synthetic construct
  misc_feature 1..2529: note = Variant of DNA polymerase I from Thermus sp. strain 2.9
  source 1..2529: mol_type = other DNA
atgcaccatcatcatcatcatggcggtagcggcatgttaccgttgttcgaacctaaaggtcgcgtgcttctggttgatggccatcatctcgcgtatcgtaacttctttgccctgaaaggattaaccaccagccgtggcgagccggtacagggtgtctacggctttgcaaagtcgctcctgaaagctctgaaagaagacggtgatgtggtgattgttgtctttgatgcgaaagcgccaagttttcgccacgaagcgtacgaagcttacaaagccgggcgtgctccaacgccggaagactttcctcgccaattggcgcttatgaaggaattagtggatttgcttggcctcgaacgcttggaagttcccggtttcgaggcagacgacgtattagcgactctcgcaaagaaagccgaacgtgagggctatgaagtccatatcttgacagcagatcgcgatcttttccagcttttatctccgcgcatttccgtgttacacccggaagggcatcgtatcaccccggaatggctctgggagaaatatggtttgcgtcccgaacaatgggtggattttcgcgccttagcgggcgatccgagcgacaatattccgggagttaaaggtatcggcgagaagacggcgctcaagctccttaaagaatgggggtcgttggagaacttgcttaagaatttagatcaggtcaaaccagcttcagtgcgtgagaagattcttgcacacctcgaagacctcaaattaagccgcgaattggtccgtgtacgcaccgatttgccgctcgaagttgatttccgtggccgccgcgaacctgactgggagggtcttaaagcgtttttagagcgtcttgaactgggttcgctcttgcatgaattcggccttttagaaagcccgttaccagccgaagaagcaccttggccaccgcccgaaggcgcgtttttaggttaccgtttgagtcgcccggaaccgatgtgggccgaattattggctcttgcagcgtctgcccagggacgtgtgtatcgcgcggaagaccctcatggtgcgctccgtggcctcaaagaagtccgtggactccttgccaaagacttagctgttgttgcattgcgcgaaggtcttgatttacctccgactgatgatccaatgcttcttgcgtacctcttggactcgtcaaacacgacgcccgaaggcgtagcccgtcgttacggcggcgagtggaccgaagatgcaggtgagcgcgcgttattggccgaacgtttgcacgccaatttattaggacgtttgcaaggcgaggaacgtctcctctggctttacgaagaagtggagaaaccattgagtcgcgtgctcgcgcatatggaagctaccggtgtcaaattagacgtggcgtatttggaggcactcagccttgaagtcgctgccgaaatgcgccgcttggaggaagaagtattccgtttagcaggccactcctttaaccttaattctcgcgatcagttagaacgtgtgttgttcgatgaacttggtctccctcctatcggcaagacagagaagaccggtaaacgtagcacttcagcggcggttttagaagctcttcgcgaagtccatcccattgtggacaagatcttgcagtaccgcgaactcgcgaaattgaaaggcacctatattgaccgtcttccggcattagtccacccgaaaacgggacgcctccatacccgcttcaaccaaacagccacggcgaccggtcgtttgtcctcctctgatccaaaccttcagaatattccagtacgtaccccattgggccagaagatccgcaaagcgtttgtagctgaggagggttggcgtttagtggccctcgattatagccaaattgaattacgtgtccttgcccatctttctggcgatgagaacctcatccgcgtgtttcaggaaggccgcgacattcacactcaaacggcaagctggatgtttggattatcagctgaagcgatcgatcctttgatgcgtcgtgcagcgaagaccatcaatttcggtgttctctacggtatgagtgccgcgcgtttgtcgcaggaattaggcattccctatgaagaagctgcggcgttcattcagcgctactttcaaagctatcccaaagttaaagcatggatcgagaagactctcgaagaaggccgcacacgtggttacgtagagaccttatttggacgtcgccgctatgttcccgatttaactgctcgcgtgaaatctgtccgtgaagccgccgaacgcatggcgtggaacatgcctgtacagggcacggcagctgacctcatgaaacttgcaatggtgcgcctttttccacaattgcgtgaagttggtgcccgcatgctcttgcaggtccacgatgaactcttgttagaagcgccaaaagagcgtgcggaagaggtggcagccctcgcgaaagaggttatggaaggcgtgtggcccttagcggtgcctcttgaagtcgaagttggtattggcgaggattggttggctgccaaaggataatga

SEQ ID NO: 134 - protein, 841 aa, synthetic construct
  REGION 1..841: note = Variant of DNA polymerase I from Thermus sp. strain 2.9
MHHHHHHGGSGMLPLFEPKGRVLLVDGHHLAYRNFFALKGLTTSRGEPVQGVYGFAKSLLKALKEDGDVVIVVFDAKAPSFRHEAYEAYKAGRAPTPEDFPRQLALMKELVDLLGLERLEVPGFEADDVLATLAKKAEREGYEVHILTADRDLFQLLSPRISVLHPEGHRITPEWLWEKYGLRPEQWVDFRALAGDPSDNIPGVKGIGEKTALKLLKEWGSLENLLKNLDQVKPASVREKILAHLEDLKLSRELVRVRTDLPLEVDFRGRREPDWEGLKAFLERLELGSLLHEFGLLESPLPAEEAPWPPPEGAFLGYRLSRPEPMWAELLALAASAQGRVYRAEDPHGALRGLKEVRGLLAKDLAVVALREGLDLPPTDDPMLLAYLLDSSNTTPEGVARRYGGEWTEDAGERALLAERLHANLLGRLQGEERLLWLYEEVEKPLSRVLAHMEATGVKLDVAYLEALSLEVAAEMRRLEEEVFRLAGHSFNLNSRDQLERVLFDELGLPPIGKTEKTGKRSTSAAVLEALREVHPIVDKILQYRELAKLKGTYIDRLPALVHPKTGRLHTRFNQTATATGRLSSSDPNLQNIPVRTPLGQKIRKAFVAEEGWRLVALDYSQIELRVLAHLSGDENLIRVFQEGRDIHTQTASWMFGLSAEAIDPLMRRAAKTINFGVLYGMSAARLSQELGIPYEEAAAFIQRYFQSYPKVKAWIEKTLEEGRTRGYVETLFGRRRYVPDLTARVKSVREAAERMAWNMPVQGTAADLMKLAMVRLFPQLREVGARMLLQVHDELLLEAPKERAEEVAALAKEVMEGVWPLAVPLEVEVGIGEDWLAAKG

SEQ ID NO: 135 - DNA, 2529 bp, synthetic construct
  misc_feature 1..2529: note = Variant of DNA polymerase I from Thermus sp. strain 2.9
  source 1..2529: mol_type = other DNA
atgcaccatcatcatcatcatggcggtagcggcatgttaccgttgttcgaacctaaaggtcgcgtgcttctggttgatggccatcatctcgcgtatcgtaacttctttgccctgaaaggattaaccaccagccgtggcgagccggtacagggtgtctacggctttgcaaagtcgctcctgaaagctctgaaagaagacggtgatgtggtgattgttgtctttgatgcgaaagcgccaagttttcgccacgaagcgtacgaagcttacaaagccgggcgtgctccaacgccggaagactttcctcgccaattggcgcttatgaaggaattagtggatttgcttggcctcgaacgcttggaagttcccggtttcgaggcagacgacgtattagcgactctcgcaaagaaagccgaacgtgagggctatgaagtccagatcttgacagcagatcgcgatcttttccagcttttatctccgcgcgtctcggtgttacacccggaagggcatcgtatcaccccggaatggctctgggagaaatatggtttgcgtcccgaacaatgggtggattttcgcgccttagcgggcgatccgagcgacaatattccgggagttaaaggtatcggcgagaagacggcgctcaagctccttaaagaatgggggtcgttggagaacttgcttaagaatttagatcaggtcaaaccagagtcagtgcgtgagaagattcttgcacacctcgaagacctccgtttaagccgcgaattgtcccgtgtacgcaccgatttgccgctcgaagttgatttccgtggccgccgcgaacctgactgggagggtcttaaagcgtttttagagcgtcttgaatttggttcgctcttgcatgaattcggccttttagaaagcccgttaccagccgaagaagcaccttggccaccgcccgaaggcgcgtttttaggttacgttttgagtcgcccggaaccgatgtgggccgaattattggctcttgcagcgtctgcccagggacgtgtgtatcgcgcggaagaccctcatggtgcgctccgcggcctcaaagaagtccgtggactccttgccaaagacttagctgttgttgcattgcgcgaaggtcttgatttacctccgactgatgatccaatgcttcttgcgtacctcttggacccgtcaaacacgacgcccgaaggcgtagcccgtcgttacggcggcgagtggaccgaagatgcagccgagcgcgcgttattggccgaacgtttgcacgccaatttattaggacgtttgcaaggcgaggaacgcctcctctggctttacgaagaagtggagaaaccattgagtcgcgtgctcgcgcatatggaagctaccggtgtcaaattagacgtggcgtatttggaggcactcagccttgaagttgctgccgaaatgcgccgcttggaggaagaagtattccgtttagcaggccactcctttaaccttaattctcgcgatcagttagaacgtgtgttgttcgatgaacttggtctccctcctatcggcaagacagagaagaccggtaaacgtagcacttcagcggcggttttagaagctcttcgcgaagtccatcccattgtggacaagatcttgcagtaccgcgaactcgcgaaattgaaaggcacctatattgaccctcttccggcattagtccacccgaaaacgggacgcctccatacccgcttcaaccaaacagccacggcgaccggtcgtttgtcctcctctgatccaaaccttcagaatattccagtacgtaccccattgggccagaagatccgccgcgcgtttgtagctgaggagggttggcgtttagtggccctcgattatagccaaattgaattacgtgtccttgcccatctttctggcgatgagaacctcatccgcgtgtttcaggaaggccgtgacattcacactcaaacggcaagctggatgtttggattaccggcggaagcgatcgatcctttgatgcgtcgtgcagcgaagaccatcaatttcggtgttctctacggtatgagtgcccatcgtttgtcgcaggaattaggcattccctatgaagaagctgcggcgttcattcagcgctactttcaaagctatcccaaagttaaagcatggatcgagaagactctcgaagaaggccgcacacgtggttacgtagagaccttatttggacgtcgccgctatgttcccgatttaaacgctcgcgtgaaatctgtccgtgaagccgccgaacgcatggcgttcaacatgcctgtacagggcacggcagctgacctcatgaaacttgcaatggtgcgcctttttccacaattgcgtgaagttggtgcccgcatgctcttgcaggtccacgatgaactcttgttagaagcgccaaaagagcgtgcggaagaggtggcagccctcgcgaaagaggttatggaaggcgtgtggcccttagcggtgcctcttgaagtcgaagttggtattggcgaggattggttggctgccaaaggataatga

SEQ ID NO: 136 - protein, 841 aa, synthetic construct
  REGION 1..841: note = Variant of DNA polymerase I from Thermus sp. strain 2.9
MHHHHHHGGSGMLPLFEPKGRVLLVDGHHLAYRNFFALKGLTTSRGEPVQGVYGFAKSLLKALKEDGDVVIVVFDAKAPSFRHEAYEAYKAGRAPTPEDFPRQLALMKELVDLLGLERLEVPGFEADDVLATLAKKAEREGYEVQILTADRDLFQLLSPRVSVLHPEGHRITPEWLWEKYGLRPEQWVDFRALAGDPSDNIPGVKGIGEKTALKLLKEWGSLENLLKNLDQVKPESVREKILAHLEDLRLSRELSRVRTDLPLEVDFRGRREPDWEGLKAFLERLEFGSLLHEFGLLESPLPAEEAPWPPPEGAFLGYVLSRPEPMWAELLALAASAQGRVYRAEDPHGALRGLKEVRGLLAKDLAVVALREGLDLPPTDDPMLLAYLLDPSNTTPEGVARRYGGEWTEDAAERALLAERLHANLLGRLQGEERLLWLYEEVEKPLSRVLAHMEATGVKLDVAYLEALSLEVAAEMRRLEEEVFRLAGHSFNLNSRDQLERVLFDELGLPPIGKTEKTGKRSTSAAVLEALREVHPIVDKILQYRELAKLKGTYIDPLPALVHPKTGRLHTRFNQTATATGRLSSSDPNLQNIPVRTPLGQKIRRAFVAEEGWRLVALDYSQIELRVLAHLSGDENLIRVFQEGRDIHTQTASWMFGLPAEAIDPLMRRAAKTINFGVLYGMSAHRLSQELGIPYEEAAAFIQRYFQSYPKVKAWIEKTLEEGRTRGYVETLFGRRRYVPDLNARVKSVREAAERMAFNMPVQGTAADLMKLAMVRLFPQLREVGARMLLQVHDELLLEAPKERAEEVAALAKEVMEGVWPLAVPLEVEVGIGEDWLAAKG

SEQ ID NO: 137 - DNA, 2529 bp, synthetic construct
  misc_feature 1..2529: note = Variant of DNA polymerase I from Thermus sp. strain 2.9
  source 1..2529: mol_type = other DNA
atgcaccatcatcatcatcatggcggtagcggcatgttaccgttgttcgaacctaaaggtcgcgtgcttctggttgatggccatcatctcgcgtatcgtaacttctttgccctgaaaggattaaccaccagccgtggcgagccggtacagggtgtctacggctttgcaaagtcgctcctgaaagctctgaaagaagacggtgatgtggtgattgttgtctttgatgcgaaagcgccaagttttcgccacgaagcgtacgaagcttacaaagccgggcgtgctccaacgccggaagactttcctcgccaattggcgcttatgaaggaattagtggatttgcttggcctcgaacgcttggaagttcccggtttcgaggcagacgacgtattagcgactctcgcaaagaaagccgaacgtgagggctatgaagtccagatcttgacagcagatcgcgatcttttccagcttttatctccgcgcatctcggtgttacacccggaagggcatcgcatcaccccggaatggctctgggagaaatatggtttgcgtcccgaacaatgggtggattttcgcgccttagtaggcgatccgagcgacaatattccgggagttaaaggtatcggcgagaagacggcgctcaagctccttaaagaatgggggtcgttggagaacttgcttaagaatttagatcaggtcaaaccagcgtcagtgcgtgagaagattcttgcacacctcgaagacctcaaattaagcctggaattgtcccgtgtacgcaccgatttgccgctcgaagttgatttccgtcgccgccgcgaacctgactgggagggtcttaaagcgtttttagagcgtcttgaatttggttcgctcttgcatgaattcggccttttagaaagcccgttaccagccgaagaagcaccttggccaccgcccgaaggcgcgtttttaggttacgttttgagtcgcccggaaccgatgtgggccgaattattggctcttgcagcgtctgcccagggacgtgtgtatcgcgcggaagaccctcatggtgcgctccgcggcctcaaagaagtccgtggactccttgccaaagacttagctgttgttgcattgcgcgaaggtcttgatttacctccgactgatgatccaatgcttcttgcgtacctcttggacccgtcaaacacgacgcccgaaggcgtagcccgtcgttacggcggcgagtggaccgaagatgcaggcgagcgcgcgttattggccgaacgtttgcacgccaatttattaggacgtttgcaaggcgaggaaaagctcctctggctttacgaagaagtggagaaaccattgagtcgcgtgctcgcgcatatggaagctaccggtgtcaaattagacgtggcgtatttggaggcactcagccttgaagttgctgccgaaatgcgccgcttggaggaagaagtattccgtttagcaggccactcctttaaccttaattctcgcgatcagttagaacgtgtgttgttcgatgaacttggtctccctcctatcggcaagacagagaagaccggtaaacgtagcacttcagcggcggttttagaagctcttcgcgaagtccatcccattgtggacaagatcttgcagtaccgcgaactcgcgaaattgaaaggcacctatattgaccctcttccggcattagtccacccgaaaacgggacgcctccatacccgcttcaaccaaacagccacggcgaccggtcgtttgtcctcctctgatccaaaccttcagaatattccagtacgtaccccattgggccagaagatccgccgcgcgtttgtagctgaggagggttggcgtttagtggccctcgattatagccaaattgaattacgtgtccttgcccatctttctggcgatgagaacctcatccgcgtgtttcaggaaggcaaagacattcacactcaaacggcaagctggatgtttggattaccggcggaagcgatcgatcctttgatgcgtcgtgcagcgaagaccgttaatttcggtgttctctacggtatgagtgcccatcgtttgtcgcaggaattaggcattccctatgaagaagctgtggcgttcattcagcgctactttcaaagctatcccaaagttaaagcatggatcgagaagactctcgaagaaggccgcacacgtggttacgtagagaccttatttggacgtcgccgctatgttcccgatttaaacgctcgcgtgaaatctgtccgtgaagccgccgaacgcatggcgttcaacatgcctgtacagggcacggcagctgacctcatgaaacttgcaatggtgcgcctttttccacaattgcgtgaagttggtgcccgcatgctcttgcaggtccacgatgaactcttgttagaagcgccaaaagagcgtgcggaagaggtggcagccctcgcgaaagaggttatggaaggcgtgtggcccttagcggtgcctcttgaagtcgaagttggtattggcgaggattggttggctgccaaaggataatga

SEQ ID NO: 138 - protein, 841 aa, synthetic construct
  REGION 1..841: note = Variant of DNA polymerase I from Thermus sp. strain 2.9
MHHHHHHGGSGMLPLFEPKGRVLLVDGHHLAYRNFFALKGLTTSRGEPVQGVYGFAKSLLKALKEDGDVVIVVFDAKAPSFRHEAYEAYKAGRAPTPEDFPRQLALMKELVDLLGLERLEVPGFEADDVLATLAKKAEREGYEVQILTADRDLFQLLSPRISVLHPEGHRITPEWLWEKYGLRPEQWVDFRALVGDPSDNIPGVKGIGEKTALKLLKEWGSLENLLKNLDQVKPASVREKILAHLEDLKLSLELSRVRTDLPLEVDFRRRREPDWEGLKAFLERLEFGSLLHEFGLLESPLPAEEAPWPPPEGAFLGYVLSRPEPMWAELLALAASAQGRVYRAEDPHGALRGLKEVRGLLAKDLAVVALREGLDLPPTDDPMLLAYLLDPSNTTPEGVARRYGGEWTEDAGERALLAERLHANLLGRLQGEEKLLWLYEEVEKPLSRVLAHMEATGVKLDVAYLEALSLEVAAEMRRLEEEVFRLAGHSFNLNSRDQLERVLFDELGLPPIGKTEKTGKRSTSAAVLEALREVHPIVDKILQYRELAKLKGTYIDPLPALVHPKTGRLHTRFNQTATATGRLSSSDPNLQNIPVRTPLGQKIRRAFVAEEGWRLVALDYSQIELRVLAHLSGDENLIRVFQEGKDIHTQTASWMFGLPAEAIDPLMRRAAKTVNFGVLYGMSAHRLSQELGIPYEEAVAFIQRYFQSYPKVKAWIEKTLEEGRTRGYVETLFGRRRYVPDLNARVKSVREAAERMAFNMPVQGTAADLMKLAMVRLFPQLREVGARMLLQVHDELLLEAPKERAEEVAALAKEVMEGVWPLAVPLEVEVGIGEDWLAAKG

SEQ ID NO: 139 - DNA, 2529 bp, synthetic construct
  misc_feature 1..2529: note = Variant of DNA polymerase I from Thermus sp. strain 2.9
  source 1..2529: mol_type = other DNA
atgcaccatcatcatcatcatggcggtagcggcatgttaccgttgttcgaacctaaaggtcgcgtgcttctggttgatggccatcatctcgcgtatcgtaacttctttgccctgaaaggattaaccaccagccgtggcgagccggtacagggtgtctacggctttgcaaagtcgctcctgaaagctctgaaagaagacggtgatgtggtgattgttgtctttgatgcgaaagcgccaagttttcgccacgaagcgtacgaagcttacaaagccgggcgtgctccaacgccggaagactttcctcgccaattggcgcttatgaaggaattagtggatttgcttggcctcgaacgcttggaagttcccggtttcgaggcagacgacgtattagcgactctcgcaaagaaagccgaacgtgagggctatgaagtccatatcttgacagcagatcgcgatcttttccagcttttatctccgcgcatttccgtgttacacccggaagggcatcgtatcaccccggaatggctctgggagaaatatggtttgcgtcccgaacaatgggtggattttcgcgccttagcgggcgatccgagcgacaatattccgggagttaaaggtatcggcgagaagacggcgctcaagctccttaaagaatgggggtcgttggagaacttgcttaagaatttagatcaggtcaaaccagcttcagtgcgtgagaagattcttgcacacctcgaagacctcaaattaagccgcgaattggtccgtgtacgcaccgatttgccgctcgaagttgatttccgtggccgccgcgaacctgactgggagggtcttaaagcgtttttagagcgtcttgaatttggttcgctcttgcatgaattcggccttttagaaagcccgttaccagccgaagaagcaccttggccaccgcccgaaggcgcgtttttaggttaccgtttgagtcgcccggaaccgatgtgggccgaattattggctcttgcagcgtctgcccagggacgtgtgtatcgcgcggaagaccctcatggtgcgctccgtggcctcaaagaagtccgtggactccttgccaaagacttagctgttgttgcattgcgcgaaggtcttgatttacctccgactgatgatccaatgcttcttgcgtacctcttggacccgtcaaacacgacgcccgaaggcgtagcccgtcgttacggcggcgagtggaccgaagatgcaggtgagcgcgcgttattggccgaacgtttgcacgccaatttattaggacgtttgcaaggcgaggaacgtctcctctggctttacgaagaagtggagaaaccattgagtcgcgtgctcgcgcatatggaagctaccggtgtcaaattagacgtggcgtatttggaggcactcagccttgaagttgctgccgaaatgcgccgcttggaggaagaagtattccgtttagcaggccactcctttaaccttaattctcgcgatcagttagaacgtgtgttgttcgatgaacttggtctccctcctatcggcaagacagagaagaccggtaaacgtagcacttcagcggcggttttagaagctcttcgcgaagtccatcccattgtggacaagatcttgcagtaccgcgaactcgcgaaattgaaaggcacctatattgaccgtcttccggcattagtccacccgaaaacgggacgcctccatacccgcttcaaccaaacagccacggcgaccggtcgtttgtcctcctctgatccaaaccttcagaatattccagtacgtaccccattgggccagaagatccgcaaagcgtttgtagctgaggagggttggcgtttagtggccctcgattatagccaaattgaattacgtgtccttgcccatctttctggcgatgagaacctcatccgcgtgtttcaggaaggccgcgacattcacactcaaacggcaagctggatgtttggagtgtcatcggaagcgatcgatcctttgatgcgtcgtgcagcgaagaccatcaatttcggtgttctctacggtatgagtgccgcgcgtttgtcgcaggaattaggcattccctatgaagaagctgcggcgttcattcagcgctactttcaaagctatcccaaagttaaagcatggatcgagaagactctcgaagaaggccgcacacgtggttacgtagagaccttatttggacgtcgccgctatgttcccgatttaaacgctcgcgtgaaatctgtccgtgaagccgccgaacgcatggcgttcaacatgcctgtacagggcacggcagctgacctcatgaaacttgcaatggtgcgcctttttccacaattgcgtgaagttggtgcccgcatgctcttgcaggtccacgatgaactcttgttagaagcgccaaaagagcgtgcggaagaggtggcagccctcgcgaaagaggttatggaaggcgtgtggcccttagcggtgcctcttgaagtcgaagttggtattggcgaggattggttggctgccaaaggataatga

SEQ ID NO: 140 - protein, 841 aa, synthetic construct
  REGION 1..841: note = Variant of DNA polymerase I from Thermus sp. strain 2.9
MHHHHHHGGSGMLPLFEPKGRVLLVDGHHLAYRNFFALKGLTTSRGEPVQGVYGFAKSLLKALKEDGDVVIVVFDAKAPSFRHEAYEAYKAGRAPTPEDFPRQLALMKELVDLLGLERLEVPGFEADDVLATLAKKAEREGYEVHILTADRDLFQLLSPRISVLHPEGHRITPEWLWEKYGLRPEQWVDFRALAGDPSDNIPGVKGIGEKTALKLLKEWGSLENLLKNLDQVKPASVREKILAHLEDLKLSRELVRVRTDLPLEVDFRGRREPDWEGLKAFLERLEFGSLLHEFGLLESPLPAEEAPWPPPEGAFLGYRLSRPEPMWAELLALAASAQGRVYRAEDPHGALRGLKEVRGLLAKDLAVVALREGLDLPPTDDPMLLAYLLDPSNTTPEGVARRYGGEWTEDAGERALLAERLHANLLGRLQGEERLLWLYEEVEKPLSRVLAHMEATGVKLDVAYLEALSLEVAAEMRRLEEEVFRLAGHSFNLNSRDQLERVLFDELGLPPIGKTEKTGKRSTSAAVLEALREVHPIVDKILQYRELAKLKGTYIDRLPALVHPKTGRLHTRFNQTATATGRLSSSDPNLQNIPVRTPLGQKIRKAFVAEEGWRLVALDYSQIELRVLAHLSGDENLIRVFQEGRDIHTQTASWMFGVSSEAIDPLMRRAAKTINFGVLYGMSAARLSQELGIPYEEAAAFIQRYFQSYPKVKAWIEKTLEEGRTRGYVETLFGRRRYVPDLNARVKSVREAAERMAFNMPVQGTAADLMKLAMVRLFPQLREVGARMLLQVHDELLLEAPKERAEEVAALAKEVMEGVWPLAVPLEVEVGIGEDWLAAKG

SEQ ID NO: 141 - DNA, 2529 bp, synthetic construct
  misc_feature 1..2529: note = Variant of DNA polymerase I from Thermus sp. strain 2.9
  source 1..2529: mol_type = other DNA
atgcaccatcatcatcatcatggcggtagcggcatgttaccgttgttcgaacctaaaggtcgcgtgcttctggttgatggccatcatctcgcgtatcgtaacttctttgccctgaaaggattaaccaccagccgtggcgagccggtacagggtgtctacggctttgcaaagtcgctcctgaaagctctgaaagaagacggtgatgtggtgattgttgtctttgatgcgaaagcgccaagttttcgccacgaagcgtacgaagcttacaaagccgggcgtgctccaacgccggaagactttcctcgccaattggcgcttatgaaggaattagtggatttgcttggcctcgaacgcttggaagttcccggtttcgaggcagacgacgtattagcgactctcgcaaagaaagccgaacgtgagggctatgaagtccagatcttgacagcagatcgcgatcttttccagcttttatctccgcgcatctcggtgttacacccggaagggcatcgcatcaccccggaatggctctgggagaaatatggtttgcgtcccgaacaatgggtggattttcgcgccttagtaggcgatccgagcgacaatattccgggagttaaaggtatcggcgagaagacggcgctcaagctccttaaagaatgggggtcgttggagaacttgcttaagaatttagatcaggtcaaaccagagtcagtgcgtgagaagattcttgcacacctcgaagacctcaaattaagccgcgaattgtcccgtgtacgcaccgatttgccgctcgaagttgatttccgtggccgccgcgaacctgactgggagggtcttaaagcgtttttagagcgtcttgaatttggttcgctcttgcatgaattcggccttttagaaagcccgttaccagccgaagaagcaccttggccaccgcccgaaggcgcgtttttaggttaccgtttgagtcgcccggaaccgatgtgggccgaattattggctcttgcagcgtctgcccagggacgtgtgtatcgcgcggaagaccctcatggtgcgctccgtggcctcaaagaagtccgtggactccttgccaaagacttagctgttgttgcattgcgcgaaggtcttgatttacctccgactgatgatccaatgcttcttgcgtacctcttggacccgtcaaacacgacgcccgaaggcgtagcccgtcgttacggcggcgagtggaccgaagatgcaggcgagcgcgcgttattggccgaacgtttgcacgccaatttattaggacgtttgcaaggcgaggaacgtctcctctggctttacgaagaagtggagaaaccattgagtcgcgtgctcgcgcatatggaagctaccggtgtcaaattagacgtggcgtatttggaggcactcagccttgaagttgctgccgaaatgcgccgcttggaggaagaagtattccgtttagcaggccactcctttaaccttaattctcgcgatcagttagaacgtgtgttgttcgatgaacttggtctccctcctatcggcaagacagagaagaccggtaaacgtagcacttcagcggcggttttagaagctcttcgcgaagtccatcccattgtggacaagatcttgcagtaccgcgaactcgcgaaattgaaaggcacctatattgaccctcttccggcattagtccacccgaaaacgggacgcctccatacccgcttcaaccaaacagccacggcgaccggtcgtttgtcctcctctgatccaaaccttcagaatattccagtacgtaccccattgggccagaagatccgcaaagcgtttgtagctgaggagggttggcgtttagtggccctcgattatagccaaattgaattacgtgtccttgcccatctttctggcgatgagaacctcatccgcgtgtttcaggaaggcaaagacattcacactcaaacggcaagctggatgtttggattatcagctgaagcgatcgatcctttgatgcgtcgtgcagcgaagaccatcaatttcggtgttctctacggtatgagtgcccatcgtttgtcgcaggaattaggcattccctatgaagaagctgcggcgttcattcagcgctactttcaaagctatcccaaagttaaagcatggatcgagaagactctcgaagaaggccgcacacgtggttacgtagagaccttatttggacgtcgccgctatgttcccgatttaaacgctcgcgtgaaatctgtccgtgaagccgccgaacgcatggcgttcaacatgcctgtacagggcacggcagctgacctcatgaaacttgcaatggtgcgcctttttccacaattgcgtgaagttggtgcccgcatgctcttgcaggtccacgatgaactcttgttagaagcgccaaaagagcgtgcggaagaggtggcagccctcgcgaaagaggttatggaaggcgtgtggcccttagcggtgcctcttgaagtcgaagttggtattggcgaggattggttggctgccaaaggataatga

SEQ ID NO: 142 - protein, 841 aa, synthetic construct
  REGION 1..841: note = Variant of DNA polymerase I from Thermus sp. strain 2.9
MHHHHHHGGSGMLPLFEPKGRVLLVDGHHLAYRNFFALKGLTTSRGEPVQGVYGFAKSLLKALKEDGDVVIVVFDAKAPSFRHEAYEAYKAGRAPTPEDFPRQLALMKELVDLLGLERLEVPGFEADDVLATLAKKAEREGYEVQILTADRDLFQLLSPRISVLHPEGHRITPEWLWEKYGLRPEQWVDFRALVGDPSDNIPGVKGIGEKTALKLLKEWGSLENLLKNLDQVKPESVREKILAHLEDLKLSRELSRVRTDLPLEVDFRGRREPDWEGLKAFLERLEFGSLLHEFGLLESPLPAEEAPWPPPEGAFLGYRLSRPEPMWAELLALAASAQGRVYRAEDPHGALRGLKEVRGLLAKDLAVVALREGLDLPPTDDPMLLAYLLDPSNTTPEGVARRYGGEWTEDAGERALLAERLHANLLGRLQGEERLLWLYEEVEKPLSRVLAHMEATGVKLDVAYLEALSLEVAAEMRRLEEEVFRLAGHSFNLNSRDQLERVLFDELGLPPIGKTEKTGKRSTSAAVLEALREVHPIVDKILQYRELAKLKGTYIDPLPALVHPKTGRLHTRFNQTATATGRLSSSDPNLQNIPVRTPLGQKIRKAFVAEEGWRLVALDYSQIELRVLAHLSGDENLIRVFQEGKDIHTQTASWMFGLSAEAIDPLMRRAAKTINFGVLYGMSAHRLSQELGIPYEEAAAFIQRYFQSYPKVKAWIEKTLEEGRTRGYVETLFGRRRYVPDLNARVKSVREAAERMAFNMPVQGTAADLMKLAMVRLFPQLREVGARMLLQVHDELLLEAPKERAEEVAALAKEVMEGVWPLAVPLEVEVGIGEDWLAAKG

SEQ ID NO: 143 - DNA, 2529 bp, synthetic construct
  misc_feature 1..2529: note = Variant of DNA polymerase I from Thermus sp. strain 2.9
  source 1..2529: mol_type = other DNA
atgcaccatcatcatcatcatggcggtagcggcatgttaccgttgttcgaacctaaaggtcgcgtgcttctggttgatggccatcatctcgcgtatcgtaacttctttgccctgaaaggattaaccaccagccgtggcgagccggtacagggtgtctacggctttgcaaagtcgctcctgaaagctctgaaagaagacggtgatgtggtgattgttgtctttgatgcgaaagcgccaagttttcgccacgaagcgtacgaagcttacaaagccgggcgtgctccaacgccggaagactttcctcgccaattggcgcttatgaaggaattagtggatttgcttggcctcgaacgcttggaagttcccggtttcgaggcagacgacgtattagcgactctcgcaaagaaagccgaacgtgagggctatgaagtccagatcttgacagcagatcgcgatcttttccagcttttatctccgcgcatttccgtgttacacccggaagggcatcgtatcaccccggaatggctctgggagaaatatggtttgcgtcccgaacaatgggtggattttcgcgccttagcgggcgatccgagcgacaatattccgggagttaaaggtatcggcgagaagacggcgctcaagctccttaaagaatgggggtcgttggagaacttgcttaagaatttagatcaggtcaaaccagcttcagtgcgtgagaagattcttgcacacctcgaagacctcaaattaagccgcgaattggtccgtgtacgcaccgatttgccgctcgaagttgatttccgtggccgccgcgaacctgactgggagggtcttaaagcgtttttagagcgtcttgaatttggttcgctcttgcatgaattcggccttttagaaagcccgttaccagccgaagaagcaccttggccaccgcccgaaggcgcgtttttaggttaccgtttgagtcgcccggaaccgatgtgggccgaattattggctcttgcagcgtctgcccagggacgtgtgtatcgcgcggaagaccctcatggtgcgctccgtggcctcaaagaagtccgtggactccttgccaaagacttagctgttgttgcattgcgcgaaggtcttgatttacctccgactgatgatccaatgcttcttgcgtacctcttggactcgtcaaacacgacgcccgaaggcgtagcccgtcgttacggcggcgagtggaccgaagatgcaggtgagcgcgcgttattggccgaacgtttgcacgccaatttattaggacgtttgcaaggcgaggaacgtctcctctggctttacgaagaagtggagaaaccattgagtcgcgtgctcgcgcatatggaagctaccggtgtcaaattagacgtggcgtatttggaggcactcagccttgaagttgctgccgaaatgcgccgcttggaggaagaagtattccgtttagcaggccactcctttaaccttaattctcgcgatcagttagaacgtgtgttgttcgatgaacttggtctccctcctatcggcaagacagagaagaccggtaaacgtagcacttcagcggcggttttagaagctcttcgcgaagtccatcccattgtggacaagatcttgcagtaccgcgaactcgcgaaattgaaaggcacctatattgaccgtcttccggcattagtccacccgaaaacgggacgcctccatacccgcttcaaccaaacagccacggcgaccggtcgtttgtcctcctctgatccaaaccttcagaatattccagtacgtaccccattgggccagaagatccgcaaagcgtttgtagctgaggagggttggcgtttagtggccctcgattatagccaaattgaattacgtgtccttgcccatctttctggcgatgagaacctcatccgcgtgtttcaggaaggccgcgacattcacactcaaacggcaagctggatgtttggattatcagctgaagcgatcgatcctttgatgcgtcgtgcagcgaagaccatcaatttcggtgttctctacggtatgagtgcccatcgtttgtcgcaggaattaggcattccctatgaagaagctgcggcgttcattcagcgctactttcaaagctatcccaaagttaaagcatggatcgagaagactctcgaagaaggccgcacacgtggttacgtagagaccttatttggacgtcgccgctatgttcccgatttaaacgctcgcgtgaaatctgtccgtgaagccgccgaacgcatggcgtttaacatgcctgtacagggcacggcagctgacctcatgaaacttgcaatggtgcgcctttttccacaattgcgtgaagttggtgcccgcatgctcttgcaggtccacgatgaactcttgttagaagcgccaaaagagcgtgcggaagaggtggcagccctcgcgaaagaggttatggaaggcgtgtggcccttagcggtgcctcttgaagtcgaagttggtattggcgaggattggttggctgccaaaggataatga

SEQ ID NO: 144 - protein, 841 aa, synthetic construct
  REGION 1..841: note = Variant of DNA polymerase I from Thermus sp. strain 2.9
MHHHHHHGGSGMLPLFEPKGRVLLVDGHHLAYRNFFALKGLTTSRGEPVQGVYGFAKSLLKALKEDGDVVIVVFDAKAPSFRHEAYEAYKAGRAPTPEDFPRQLALMKELVDLLGLERLEVPGFEADDVLATLAKKAEREGYEVQILTADRDLFQLLSPRISVLHPEGHRITPEWLWEKYGLRPEQWVDFRALAGDPSDNIPGVKGIGEKTALKLLKEWGSLENLLKNLDQVKPASVREKILAHLEDLKLSRELVRVRTDLPLEVDFRGRREPDWEGLKAFLERLEFGSLLHEFGLLESPLPAEEAPWPPPEGAFLGYRLSRPEPMWAELLALAASAQGRVYRAEDPHGALRGLKEVRGLLAKDLAVVALREGLDLPPTDDPMLLAYLLDSSNTTPEGVARRYGGEWTEDAGERALLAERLHANLLGRLQGEERLLWLYEEVEKPLSRVLAHMEATGVKLDVAYLEALSLEVAAEMRRLEEEVFRLAGHSFNLNSRDQLERVLFDELGLPPIGKTEKTGKRSTSAAVLEALREVHPIVDKILQYRELAKLKGTYIDRLPALVHPKTGRLHTRFNQTATATGRLSSSDPNLQNIPVRTPLGQKIRKAFVAEEGWRLVALDYSQIELRVLAHLSGDENLIRVFQEGRDIHTQTASWMFGLSAEAIDPLMRRAAKTINFGVLYGMSAHRLSQELGIPYEEAAAFIQRYFQSYPKVKAWIEKTLEEGRTRGYVETLFGRRRYVPDLNARVKSVREAAERMAFNMPVQGTAADLMKLAMVRLFPQLREVGARMLLQVHDELLLEAPKERAEEVAALAKEVMEGVWPLAVPLEVEVGIGEDWLAAKG

SEQ ID NO: 145 - DNA, 2529 bp, synthetic construct
  misc_feature 1..2529: note = Variant of DNA polymerase I from Thermus sp. strain 2.9
  source 1..2529: mol_type = other DNA
atgcaccatcatcatcatcatggcggtagcggcatgttaccgttgttcgaacctaaaggtcgcgtgcttctggttgatggccatcatctcgcgtatcgtaacttctttgccctgaaaggattaaccaccagccgtggcgagccggtacagggtgtctacggctttgcaaagtcgctcctgaaagctctgaaagaagacggtgatgtggtgattgttgtctttgatgcgaaagcgccaagttttcgccacgaagcgtacgaagcttacaaagccgggcgtgctccaacgccggaagactttcctcgccaattggcgcttatgaaggaattagtggatttgcttggcctcgaacgcttggaagttcccggtttcgaggcagacgacgtattagcgactctcgcaaagaaagccgaacgtgagggctatgaagtccagatcttgacagcagatcgcgatcttttccagcttttatctccgcgcatttccgtgttacacccggaagggcatcgtatcaccccggaatggctctgggagaaatatggtttgcgtcccgaacaatgggtggattttcgcgccttagcgggcgatccgagcgacaatattccgggagttaaaggtatcggcgagaagacggcgctcaagctccttaaagaatgggggtcgttggagaacttgcttaagaatttagatcaggtcaaaccagcttcagtgcgtgagaagattcttgcacacctcgaagacctcaaattaagccgcgaattgtcccgtgtacgcaccgatttgccgctcgaagttgatttccgtggccgccgcgaacctgactgggagggtcttaaagcgtttttagagcgtcttgaatttggttcgctcttgcatgaattcggccttttagaaagcccgttaccagccgaagaagcaccttggccaccgcccgaaggcgcgtttttaggttaccgtttgagtcgcccggaaccgatgtgggccgaattattggctcttgcagcgtctgcccagggacgtgtgtatcgcgcggaagaccctcatggtgcgctccgtggcctcaaagaagtccgtggactccttgccaaagacttagctgttgttgcattgcgcgaaggtcttgatttacctccgactgatgatccaatgcttcttgcgtacctcttggacccgtcaaacacgacgcccgaaggcgtagcccgtcgttacggcggcgagtggaccgaagatgcaggtgagcgcgcgttattggccgaacgtttgcacgccaatttattaggacgtttgcaaggcgaggaacgtctcctctggctttacgaagaagtggagaaaccattgagtcgcgtgctcgcgcatatggaagctaccggtgtcaaattagacgtggcgtatttggaggcactcagccttgaagccgctgccgaaatgcgccgcttggaggaagaagtattccgtttagcaggccactcctttaaccttaattctcgcgatcagttagaacgtgtgttgttcgatgaacttggtctccctcctatcggtaagacagagaagaccggtaaacgtagcacttcagcggcggttttagaagctcttcgcgaagtccatcccattgtggacaagatcttgcagtaccgcgaactcgcgaaattgaaaggcacctatattgaccgtcttccggcattagtccacccgaaaacgggacgcctccatacccgcttcaaccaaacagccacggcgaccggtcgtttgtcctcctctgatccaaaccttcagaatattccagtacgtaccccattgggccagaaaatccgcaaagcgtttgtagctgaggagggttggcgtttagtggccctcgattatagccaaattgaattacgtgtccttgcccatctttctggcgatgagaacctcatccgcgtgtttcaggaaggccgcgacattcacactcaaacggcaagctggatgtttggactgtcatcggaagcgatcgatcctttgatgcgtcgtgcagcgaagaccatcaatttcggtgttctctacggtatgagtgccgcgcgtttgtcgcaggaattaggcattccctatgaagaagctgcggcgttcattcagcgctactttcaaagctatcccaaagttaaagcatggatcgagaagactctcgaagaaggccgcacacgtggttacgtagagaccttatttggacgtcgccgctatgttcccgatttaactgctcgcgtgaaatctgtccgtgaagccgccgaacgcatggcgtggaacatgcctgtacagggcacggcagctgacctcatgaaacttgcaatggtgcgcctttttccacaattgcgtgaagttggtgcccgcatgctcttgcaggtccacgatgaactcttgttagaagcgccaaaagagcgtgcggaagaggtggcagccctcgcgaaagaggttatggaaggcgtgtggcccttagcggtgcctcttgaagtcgaagttggtattggcgaggattggttggctgccaaaggataatga

SEQ ID NO: 146 - protein, 841 aa, synthetic construct
  REGION 1..841: note = Variant of DNA polymerase I from Thermus sp. strain 2.9
MHHHHHHGGSGMLPLFEPKGRVLLVDGHHLAYRNFFALKGLTTSRGEPVQGVYGFAKSLLKALKEDGDVVIVVFDAKAPSFRHEAYEAYKAGRAPTPEDFPRQLALMKELVDLLGLERLEVPGFEADDVLATLAKKAEREGYEVQILTADRDLFQLLSPRISVLHPEGHRITPEWLWEKYGLRPEQWVDFRALAGDPSDNIPGVKGIGEKTALKLLKEWGSLENLLKNLDQVKPASVREKILAHLEDLKLSRELSRVRTDLPLEVDFRGRREPDWEGLKAFLERLEFGSLLHEFGLLESPLPAEEAPWPPPEGAFLGYRLSRPEPMWAELLALAASAQGRVYRAEDPHGALRGLKEVRGLLAKDLAVVALREGLDLPPTDDPMLLAYLLDPSNTTPEGVARRYGGEWTEDAGERALLAERLHANLLGRLQGEERLLWLYEEVEKPLSRVLAHMEATGVKLDVAYLEALSLEAAAEMRRLEEEVFRLAGHSFNLNSRDQLERVLFDELGLPPIGKTEKTGKRSTSAAVLEALREVHPIVDKILQYRELAKLKGTYIDRLPALVHPKTGRLHTRFNQTATATGRLSSSDPNLQNIPVRTPLGQKIRKAFVAEEGWRLVALDYSQIELRVLAHLSGDENLIRVFQEGRDIHTQTASWMFGLSSEAIDPLMRRAAKTINFGVLYGMSAARLSQELGIPYEEAAAFIQRYFQSYPKVKAWIEKTLEEGRTRGYVETLFGRRRYVPDLTARVKSVREAAERMAWNMPVQGTAADLMKLAMVRLFPQLREVGARMLLQVHDELLLEAPKERAEEVAALAKEVMEGVWPLAVPLEVEVGIGEDWLAAKG

SEQ ID NO: 147 - DNA, 2529 bp, synthetic construct
  misc_feature 1..2529: note = Variant of DNA polymerase I from Thermus sp. strain 2.9
  source 1..2529: mol_type = other DNA
atgcaccatcatcatcatcatggcggtagcggcatgttaccgttgttcgaacctaaaggtcgcgtgcttctggttgatggccatcatctcgcgtatcgtaacttctttgccctgaaaggattaaccaccagccgtggcgagccggtacagggtgtctacggctttgcaaagtcgctcctgaaagctctgaaagaagacggtgatgtggtgattgttgtctttgatgcgaaagcgccaagttttcgccacgaagcgtacgaagcttacaaagccgggcgtgctccaacgccggaagactttcctcgccaattggcgcttatgaaggaattagtggatttgcttggcctcgaacgcttggaagttcccggtttcgaggcagacgacgtattagcgactctcgcaaagaaagccgaacgtgagggctatgaagtccagatcttgacagcagatcgcgatcttttccagcttttatctccgcgcatttccgtgttacacccggaagggcatcgtatcaccccggaatggctctgggagaaatatggtttgcgtcccgaacaatgggtggattttcgcgccttagcgggcgatccgagcgacaatattccgggagttaaaggtatcggcgagaagacggcgctcaagctccttaaagaatgggggtcgttggagaacttgcttaagaatttagatcaggtcaaaccagcttcagtgcgtgagaagattcttgcacacctcgaagacctcaaattaagccgcgaattggtccgtgtacgcaccgatttgccgctcgaagttgatttccgtggccgccgcgaacctgactgggagggtcttaaagcgtttttagagcgtcttgaatttggttcgctcttgcatgaattcggccttttagaaagcccgttaccagccgaagaagcaccttggccaccgcccgaaggcgcgtttttaggttaccgtttgagtcgcccggaaccgatgtgggccgaattattggctcttgcagcgtctgcccagggacgtgtgtatcgcgcggaagaccctcatggtgcgctccgtggcctcaaagaagtccgtggactccttgccaaagacttagctgttgttgcattgcgcgaaggtcttgatttacctccgactgatgatccaatgcttcttgcgtacctcttggacccgtcaaacacgacgcccgaaggcgtagcccgtcgttacggcggcgagtggaccgaagatgcaggtgagcgcgcgttattggccgaacgtttgcacgccaatttattaggacgtttgcaaggcgaggaacgtctcctctggctttacgaagaagtggagaaaccattgagtcgcgtgctcgcgcatatggaagctaccggtgtcaaattagacgtggcgtatttggaggcactcagccttgaagttgctgccgaaatgcgccgcttggaggaagaagtattccgtttagcaggccactcctttaaccttaattctcgcgatcagttagaacgtgtgttgttcgatgaacttggtctccctcctatcggcaagacagagaagaccggtaaacgtagcacttcagcggcggttttagaagctcttcgcgaagtccatcccattgtggacaagatcttgcagtaccgcgaactcgcgaaattgaaaggcacctatattgaccgtcttccggcattagtccacccgaaaacgggacgcctccatacccgcttcaaccaaacagccacggcgaccggtcgtttgtcctcctctgatccaaaccttcagaatattccagtacgtaccccattgggccagaagatccgcaaagcgtttgtagctgaggagggttggcgtttagtggccctcgattatagccaaattgaattacgtgtccttgcccatctttctggcgatgagaacctcatccgcgtgtttcaggaaggccgcgacattcacactcaaacggcaagctggatgtttggagtgtcagcggaagcgatcgatcctttgatgcgtcgtgcagcgaagaccatcaatttcggtgttctctacggtatgagtgcccatcgtttgtcgcaggaattaggcattccctatgaagaagctgcggcgttcattcagcgctactttcaaagctatcccaaagttaaagcatggatcgagaagactctcgaagaaggccgcacacgtggttacgtagagaccttatttggacgtcgccgctatgttcccgatttaaacgctcgcgtgaaatctgtccgtgaagccgccgaacgcatggcgtttaacatgcctgtacagggcacggcagctgacctcatgaaacttgcaatggtgcgcctttttccacaattgcgtgaagttggtgcccgcatgctcttgcaggtccacgatgaactcttgttagaagcgccaaaagagcgtgcggaagaggtggcagccctcgcgaaagaggttatggaaggcgtgtggcccttagcggtgcctcttgaagtcgaagttggtattggcgaggattggttggctgccaaaggataatga

SEQ ID NO: 148 - protein, 841 aa, synthetic construct
  REGION 1..841: note = Variant of DNA polymerase I from Thermus sp. strain 2.9
MHHHHHHGGSGMLPLFEPKGRVLLVDGHHLAYRNFFALKGLTTSRGEPVQGVYGFAKSLLKALKEDGDVVIVVFDAKAPSFRHEAYEAYKAGRAPTPEDFPRQLALMKELVDLLGLERLEVPGFEADDVLATLAKKAEREGYEVQILTADRDLFQLLSPRISVLHPEGHRITPEWLWEKYGLRPEQWVDFRALAGDPSDNIPGVKGIGEKTALKLLKEWGSLENLLKNLDQVKPASVREKILAHLEDLKLSRELVRVRTDLPLEVDFRGRREPDWEGLKAFLERLEFGSLLHEFGLLESPLPAEEAPWPPPEGAFLGYRLSRPEPMWAELLALAASAQGRVYRAEDPHGALRGLKEVRGLLAKDLAVVALREGLDLPPTDDPMLLAYLLDPSNTTPEGVARRYGGEWTEDAGERALLAERLHANLLGRLQGEERLLWLYEEVEKPLSRVLAHMEATGVKLDVAYLEALSLEVAAEMRRLEEEVFRLAGHSFNLNSRDQLERVLFDELGLPPIGKTEKTGKRSTSAAVLEALREVHPIVDKILQYRELAKLKGTYIDRLPALVHPKTGRLHTRFNQTATATGRLSSSDPNLQNIPVRTPLGQKIRKAFVAEEGWRLVALDYSQIELRVLAHLSGDENLIRVFQEGRDIHTQTASWMFGVSAEAIDPLMRRAAKTINFGVLYGMSAHRLSQELGIPYEEAAAFIQRYFQSYPKVKAWIEKTLEEGRTRGYVETLFGRRRYVPDLNARVKSVREAAERMAFNMPVQGTAADLMKLAMVRLFPQLREVGARMLLQVHDELLLEAPKERAEEVAALAKEVMEGVWPLAVPLEVEVGIGEDWLAAKG

SEQ ID NO: 149 - DNA, 2529 bp, synthetic construct
  misc_feature 1..2529: note = Variant of DNA polymerase I from Thermus sp. strain 2.9
  source 1..2529: mol_type = other DNA
atgcaccatcatcatcatcatggcggtagcggcatgttaccgttgttcgaacctaaaggtcgcgtgcttctggttgatggccatcatctcgcgtatcgtaacttctttgccctgaaaggattaaccaccagccgtggcgagccggtacagggtgtctacggctttgcaaagtcgctcctgaaagctctgaaagaagacggtgatgtggtgattgttgtctttgatgcgaaagcgccaagttttcgccacgaagcgtacgaagcttacaaagccgggcgtgctccaacgccggaagactttcctcgccaattggcgcttatgaaggaattagtggatttgcttggcctcgaacgcttggaagttcccggtttcgaggcagacgacgtattagcgactctcgcaaagaaagccgaacgtgagggctatgaagtccagatcttgacagcagatcgcgatcttttccagcttttatctccgcgcatttccgtgttacacccggaagggcatcgtatcaccccggaatggctctgggagaaatatggtttgcgtcccgaacaatgggtggattttcgcgccttagcgggcgatccgagcgacaatattccgggagttaaaggtatcggcgagaagacggcgctcaagctccttaaagaatgggggtcgttggagaacttgcttaagaatttagatcaggtcaaaccagcttcagtgcgtgagaagattcttgcacacctcgaagacctcaaattaagccgcgaattgtcccgtgtacgcaccgatttgccgctcgaagttgatttccgtggccgccgcgaacctgactgggagggtcttaaagcgtttttagagcgtcttgaatttggttcgctcttgcatgaattcggccttttagaaagcccgttaccagccgaagaagcaccttggccaccgcccgaaggcgcgtttttaggttaccgtttgagtcgcccggaaccgatgtgggccgaattattggctcttgcagcgtctgcccagggacgtgtgtatcgcgcggaagaccctcatggtgcgctccgtggcctcaaagaagtccgtggactccttgccaaagacttagctgttgttgcattgcgcgaaggtcttgatttacctccgactgatgatccaatgcttcttgcgtacctcttggacccgtcaaacacgacgcccgaaggcgtagcccgtcgttacggcggcgagtggaccgaagatgcaggtgagcgcgcgttattggccgaacgtttgcacgccaatttattaggacgtttgcaaggcgaggaacgtctcctctggctttacgaagaagtggagaaaccattgagtcgcgtgctcgcgcatatggaagctaccggtgtcaaattagacgtggcgtatttggaggcactcagccttgaagttgctgccgaaatgcgccgcttggaggaagaagtattccgtttagcaggccactcctttaaccttaattctcgcgatcagttagaacgtgtgttgttcgatgaacttggtctccctcctatcggcaagacagagaagaccggtaaacgtagcacttcagcggcggttttagaagctcttcgcgaagtccatcccattgtggacaagatcttgcagtaccgcgaactcgcgaaattgaaaggcacctatattgaccctcttccggcattagtccacccgaaaacgggacgcctccatacccgcttcaaccaaacagccacggcgaccggtcgtttgtcctcctctgatccaaaccttcagaatattccagtacgtaccccattgggccagaagatccgcaaagcgtttgtagctgaggagggttggcgtttagtggccctcgattatagccaaattgaattacgtgtccttgcccatctttctggcgatgagaacctcatccgcgtgtttcaggaaggccgcgacattcacactcaaacggcaagctggatgtttggattatcaagtgaagcgatcgatcctttgatgcgtcgtgcagcgaagaccatcaatttcggtgttctctacggtatgagtgcccatcgtttgtcgcaggaattaggcattccctatgaagaagctgcggcgttcattcagcgctactttcaaagctatcccaaagttaaagcatggatcgagaagactctcgaagaaggccgcacacgtggttacgtagagaccttatttggacgtcgccgctatgttcccgatttaaacgctcgcgtgaaatctgtccgtgaagccgccgaacgcatggcgttcaacatgcctgtacagggcacggcagctgacctcatgaaacttgcaatggtgcgcctttttccacaattgcgtgaagttggtgcccgcatgctcttgcaggtccacgatgaactcttgttagaagcgccaaaagagcgtgcggaagaggtggcagccctcgcgaaagaggttatggaaggcgtgtggcccttagcggtgcctcttgaagtcgaagttggtattggcgaggattggttggctgccaaaggataatga

SEQ ID NO: 150 - protein, 841 aa, synthetic construct
  REGION 1..841: note = Variant of DNA polymerase I from Thermus sp. strain 2.9
MHHHHHHGGSGMLPLFEPKGRVLLVDGHHLAYRNFFALKGLTTSRGEPVQGVYGFAKSLLKALKEDGDVVIVVFDAKAPSFRHEAYEAYKAGRAPTPEDFPRQLALMKELVDLLGLERLEVPGFEADDVLATLAKKAEREGYEVQILTADRDLFQLLSPRISVLHPEGHRITPEWLWEKYGLRPEQWVDFRALAGDPSDNIPGVKGIGEKTALKLLKEWGSLENLLKNLDQVKPASVREKILAHLEDLKLSRELSRVRTDLPLEVDFRGRREPDWEGLKAFLERLEFGSLLHEFGLLESPLPAEEAPWPPPEGAFLGYRLSRPEPMWAELLALAASAQGRVYRAEDPHGALRGLKEVRGLLAKDLAVVALREGLDLPPTDDPMLLAYLLDPSNTTPEGVARRYGGEWTEDAGERALLAERLHANLLGRLQGEERLLWLYEEVEKPLSRVLAHMEATGVKLDVAYLEALSLEVAAEMRRLEEEVFRLAGHSFNLNSRDQLERVLFDELGLPPIGKTEKTGKRSTSAAVLEALREVHPIVDKILQYRELAKLKGTYIDPLPALVHPKTGRLHTRFNQTATATGRLSSSDPNLQNIPVRTPLGQKIRKAFVAEEGWRLVALDYSQIELRVLAHLSGDENLIRVFQEGRDIHTQTASWMFGLSSEAIDPLMRRAAKTINFGVLYGMSAHRLSQELGIPYEEAAAFIQRYFQSYPKVKAWIEKTLEEGRTRGYVETLFGRRRYVPDLNARVKSVREAAERMAFNMPVQGTAADLMKLAMVRLFPQLREVGARMLLQVHDELLLEAPKERAEEVAALAKEVMEGVWPLAVPLEVEVGIGEDWLAAKG

SEQ ID NO: 151 - DNA, 2529 bp, synthetic construct
  misc_feature 1..2529: note = Variant of DNA polymerase I from Thermus sp. strain 2.9
  source 1..2529: mol_type = other DNA
atgcaccatcatcatcatcatggcggtagcggcatgttaccgttgttcgaacctaaaggtcgcgtgcttctggttgatggccatcatctcgcgtatcgtaacttctttgccctgaaaggattaaccaccagccgtggcgagccggtacagggtgtctacggctttgcaaagtcgctcctgaaagctctgaaagaagacggtgatgtggtgattgttgtctttgatgcgaaagcgccaagttttcgccacgaagcgtacgaagcttacaaagccgggcgtgctccaacgccggaagactttcctcgccaattggcgcttatgaaggaattagtggatttgcttggcctcgaacgcttggaagttcccggtttcgaggcagacgacgtattagcgactctcgcaaagaaagccgaacgtgagggctatgaagtccagatcttgacagcagatcgcgatcttttccagcttttatctccgcgcatttccgtgttacacccggaagggcatcgtatcaccccggaatggctctgggagaaatatggtttgcgtcccgaacaatgggtggattttcgcgccttagcgggcgatccgagcgacaatattccgggagttaaaggtatcggcgagaagacggcgctcaagctccttaaagaatgggggtcgttggagaacttgcttaagaatttagatcaggtcaaaccagcttcagtgcgtgagaagattcttgcacacctcgaagacctcaaattaagccgcgaattgtcgcgtgtacgcaccgatttgccgctcgaagttgatttccgtggccgccgcgaacctgactgggagggtcttaaagcgtttttagagcgtcttgaatttggttcgctcttgcatgaattcggccttttagaaagcccgttaccagccgaagaagcaccttggccaccgcccgaaggcgcgtttttaggttaccgtttgagtcgcccggaaccgatgtgggccgaattattggctcttgcagcgtctgcccagggacgtgtgtatcgcgcggaagaccctcatggtgcgctccgtggcctcaaagaagtccgtggactccttgccaaagacttagctgttgttgcattgcgcgaaggtcttgatttacctccgactgatgatccaatgcttcttgcgtacctcttggactcgtcaaacacgacgcccgaaggcgtagcccgtcgttacggcggcgagtggaccgaagatgcaggtgagcgcgcgttattggccgaacgtttgcacgccaatttattaggacgtttgcaaggcgaggaacgtctcctctggctttacgaagaagtggagaaaccattgagtcgcgtgctcgcgcatatggaagctaccggtgtcaaattagacgtggcgtatttggaggcactcagccttgaagtcgctgccgaaatgcgccgcttggaggaagaagtattccgtttagcaggccactcctttaaccttaattctcgcgatcagttagaacgtgtgttgttcgatgaacttggtctccctcctatcggtaagacagagaagaccggtaaacgtagcacttcagcggcggttttagaagctcttcgcgaagtccatcccattgtggacaagatcttgcagtaccgcgaactcgcgaaattgaaaggcacctatattgaccctcttccggcattagtccacccgaaaacgggacgcctccatacccgcttcaaccaaacagccacggcgaccggtcgtttgtcctcctctgatccaaaccttcagaatattccagtacgtaccccattgggccagaagatccgcaaagcgtttgtagctgaggagggttggcgtttagtggccctcgattatagccaaattgaattacgtgtccttgcccatctttctggcgatgagaacctcatccgcgtgtttcaggaaggccgcgacattcacactcaaacggcaagctggatgtttggactgtcagcggaagcgatcgatcctttgatgcgtcgtgcagcgaagaccatcaatttcggtgttctctacggtatgagtgccgcgcgtttgtcgcaggaattaggcattccctatgaagaagctgcggcgttcattcagcgctactttcaaagctatcccaaagttaaagcatggatcgagaagactctcgaagaaggccgcacacgtggttacgtagagaccttatttggacgtcgccgctatgttcccgatttaaatgctcgcgtgaaatctgtccgtgaagccgccgaacgcatggcgttcaacatgcctgtacagggcacggcagctgacctcatgaaacttgcaatggtgcgcctttttccacaattgcgtgaagttggtgcccgcatgctcttgcaggtccacgatgaactcttgttagaagcgccaaaagagcgtgcggaagaggtggcagccctcgcgaaagaggttatggaaggcgtgtggcccttagcggtgcctcttgaagtcgaagttggtattggcgaggattggttggctgccaaaggataatga

SEQ ID NO: 152 - protein, 841 aa, synthetic construct
  REGION 1..841: note = Variant of DNA polymerase I from Thermus sp. strain 2.9
MHHHHHHGGSGMLPLFEPKGRVLLVDGHHLAYRNFFALKGLTTSRGEPVQGVYGFAKSLLKALKEDGDVVIVVFDAKAPSFRHEAYEAYKAGRAPTPEDFPRQLALMKELVDLLGLERLEVPGFEADDVLATLAKKAEREGYEVQILTADRDLFQLLSPRISVLHPEGHRITPEWLWEKYGLRPEQWVDFRALAGDPSDNIPGVKGIGEKTALKLLKEWGSLENLLKNLDQVKPASVREKILAHLEDLKLSRELSRVRTDLPLEVDFRGRREPDWEGLKAFLERLEFGSLLHEFGLLESPLPAEEAPWPPPEGAFLGYRLSRPEPMWAELLALAASAQGRVYRAEDPHGALRGLKEVRGLLAKDLAVVALREGLDLPPTDDPMLLAYLLDSSNTTPEGVARRYGGEWTEDAGERALLAERLHANLLGRLQGEERLLWLYEEVEKPLSRVLAHMEATGVKLDVAYLEALSLEVAAEMRRLEEEVFRLAGHSFNLNSRDQLERVLFDELGLPPIGKTEKTGKRSTSAAVLEALREVHPIVDKILQYRELAKLKGTYIDPLPALVHPKTGRLHTRFNQTATATGRLSSSDPNLQNIPVRTPLGQKIRKAFVAEEGWRLVALDYSQIELRVLAHLSGDENLIRVFQEGRDIHTQTASWMFGLSAEAIDPLMRRAAKTINFGVLYGMSAARLSQELGIPYEEAAAFIQRYFQSYPKVKAWIEKTLEEGRTRGYVETLFGRRRYVPDLNARVKSVREAAERMAFNMPVQGTAADLMKLAMVRLFPQLREVGARMLLQVHDELLLEAPKERAEEVAALAKEVMEGVWPLAVPLEVEVGIGEDWLAAKG

SEQ ID NO: 153 - DNA, 2529 bp, synthetic construct
  misc_feature 1..2529: note = Variant of DNA polymerase I from Thermus sp. strain 2.9
  source 1..2529: mol_type = other DNA
atgcaccatcatcatcatcatggcggtagcggcatgttaccgttgttcgaacctaaaggtcgcgtgcttctggttgatggccatcatctcgcgtatcgtaacttctttgccctgaaaggattaaccaccagccgtggcgagccggtacagggtgtctacggctttgcaaagtcgctcctgaaagctctgaaagaagacggtgatgtggtgattgttgtctttgatgcgaaagcgccaagttttcgccacgaagcgtacgaagcttacaaagccgggcgtgctccaacgccggaagactttcctcgccaattggcgcttatgaaggaattagtggatttgcttggcctcgaacgcttggaagttcccggtttcgaggcagacgacgtattagcgactctcgcaaagaaagccgaacgtgagggctatgaagtccatatcttgacagcagatcgcgatcttttccagcttttatctccgcgcatttccgtgttacacccggaagggcatcgtatcaccccggaatggctctgggagaaatatggtttgcgtcccgaacaatgggtggattttcgcgccttagcgggcgatccgagcgacaatattccgggagttaaaggtatcggcgagaagacggcgctcaagctccttaaagaatgggggtcgttggagaacttgcttaagaatttagatcaggtcaaaccagcttcagtgcgtgagaagattcttgcacacctcgaagacctcaaattaagccgcgaattgtcgcgtgtacgcaccgatttgccgctcgaagttgatttccgtggccgccgcgaacctgactgggagggtcttaaagcgtttttagagcgtcttgaatttggttcgctcttgcatgaattcggccttttagaaagcccgttaccagccgaagaagcaccttggccaccgcccgaaggcgcgtttttaggttaccgtttgagtcgcccggaaccgatgtgggccgaattattggctcttgcagcgtctgcccagggacgtgtgtatcgcgcggaagaccctcatggtgcgctccgtggcctcaaagaagtccgtggactccttgccaaagacttagctgttgttgcattgcgcgaaggtcttgatttacctccgactgatgatccaatgcttcttgcgtacctcttggactcgtcaaacacgacgcccgaaggcgtagcccgtcgttacggcggcgagtggaccgaagatgcaggtgagcgcgcgttattggccgaacgtttgcacgccaatttattaggacgtttgcaaggcgaggaacgtctcctctggctttacgaagaagtggagaaaccattgagtcgcgtgctcgcgcatatggaagctaccggtgtcaaattagacgtggcgtatttggaggcactcagccttgaagccgctgccgaactgcgccgcttggaggaagaagtattccgtttagcaggccactcctttaaccttaattctcgcgatcagttagaacgtgtgttgttcgatgaacttggtctccctcctatcggcaagacagagaagaccggtaaacgtagcacttcagcggcggttttagaagctcttcgcgaagtccatcccattgtggacaagatcttgcagtaccgcgaactcgcgaaattgaaaggcacctatattgaccgtcttccggcattagtccacccgaaaacgggacgcctccatacccgcttcaaccaaacagccacggcgaccggtcgtttgtcctcctctgatccaaaccttcagaatattccagtacgtaccccattgggccagcatatccgcaaagcgtttgtagctgaggagggttggcgtttagtggccctcgattatagccaaattgaattacgtgtccttgcccatctttctggcgatgagaacctcatccgcgtgtttcaggaaggccgcgacattcacactcaaacggcaagctggatgtttggactgtcatcggaagcgatcgatcctttgatgcgtcgtgcagcgaagaccatcaatttcggtgttctctacggtatgagtgccgcgcgtttgtcgcaggaattaggcattccctatgaagaagctgcggcgttcattcagcgctactttcaaagctatcccaaagttaaagcatggatcgagaagactctcgaagaaggccgcacacgtggttacgtagagaccttatttggacgtcgccgctatgttcccgatttaactgctcgcgtgaaatctgtccgtgaagccgccgaacgcatggcgttcaacatgcctgtacagggcacggcagctgacctcatgaaacttgcaatggtgcgcctttttccacaattgcgtgaagttggtgcccgcatgctcttgcaggtccacgatgaactcttgttagaagcgccaaaagagcgtgcggaagaggtggcagccctcgcgaaagaggttatggaaggcgtgtggcccttagcggtgcctcttgaagtcgaagttggtattggcgaggattggttggctgccaaaggataatga

SEQ ID NO: 154 - protein, 841 aa, synthetic construct
  REGION 1..841: note = Variant of DNA polymerase I from Thermus sp. strain 2.9
MHHHHHHGGSGMLPLFEPKGRVLLVDGHHLAYRNFFALKGLTTSRGEPVQGVYGFAKSLLKALKEDGDVVIVVFDAKAPSFRHEAYEAYKAGRAPTPEDFPRQLALMKELVDLLGLERLEVPGFEADDVLATLAKKAEREGYEVHILTADRDLFQLLSPRISVLHPEGHRITPEWLWEKYGLRPEQWVDFRALAGDPSDNIPGVKGIGEKTALKLLKEWGSLENLLKNLDQVKPASVREKILAHLEDLKLSRELSRVRTDLPLEVDFRGRREPDWEGLKAFLERLEFGSLLHEFGLLESPLPAEEAPWPPPEGAFLGYRLSRPEPMWAELLALAASAQGRVYRAEDPHGALRGLKEVRGLLAKDLAVVALREGLDLPPTDDPMLLAYLLDSSNTTPEGVARRYGGEWTEDAGERALLAERLHANLLGRLQGEERLLWLYEEVEKPLSRVLAHMEATGVKLDVAYLEALSLEAAAELRRLEEEVFRLAGHSFNLNSRDQLERVLFDELGLPPIGKTEKTGKRSTSAAVLEALREVHPIVDKILQYRELAKLKGTYIDRLPALVHPKTGRLHTRFNQTATATGRLSSSDPNLQNIPVRTPLGQHIRKAFVAEEGWRLVALDYSQIELRVLAHLSGDENLIRVFQEGRDIHTQTASWMFGLSSEAIDPLMRRAAKTINFGVLYGMSAARLSQELGIPYEEAAAFIQRYFQSYPKVKAWIEKTLEEGRTRGYVETLFGRRRYVPDLTARVKSVREAAERMAFNMPVQGTAADLMKLAMVRLFPQLREVGARMLLQVHDELLLEAPKERAEEVAALAKEVMEGVWPLAVPLEVEVGIGEDWLAAKG

SEQ ID NO: 155 - DNA, 2529 bp, synthetic construct
  misc_feature 1..2529: note = Variant of DNA polymerase I from Thermus sp. strain 2.9
  source 1..2529: mol_type = other DNA
atgcaccatcatcatcatcatggcggtagcggcatgttaccgttgttcgaacctaaaggtcgcgtgcttctggttgatggccatcatctcgcgtatcgtaacttctttgccctgaaaggattaaccaccagccgtggcgagccggtacagggtgtctacggctttgcaaagtcgctcctgaaagctctgaaagaagacggtgatgtggtgattgttgtctttgatgcgaaagcgccaagttttcgccacgaagcgtacgaagcttacaaagccgggcgtgctccaacgccggaagactttcctcgccaattggcgcttatgaaggaattagtggatttgcttggcctcgaacgcttggaagttcccggtttcgaggcagacgacgtattagcgactctcgcaaagaaagccgaacgtgagggctatgaagtccagatcttgacagcagatcgcgatcttttccagcttttatctccgcgcatttccgtgttacacccggaagggcatcgtatcaccccggaatggctctgggagaaatatggtttgcgtcccgaacaatgggtggattttcgcgccttagcgggcgatccgagcgacaatattccgggagttaaaggtatcggcgagaagacggcgctcaagctccttaaagaatgggggtcgttggagaacttgcttaagaatttagatcaggtcaaaccagcttcagtgcgtgagaagattcttgcacacctcgaagacctcaaattaagccgcgaattgtcccgtgtacgcaccgatttgccgctcgaagttgatttccgtggccgccgcgaacctgactgggagggtcttaaagcgtttttagagcgtcttgaatttggttcgctcttgcatgaattcggccttttagaaagcccgttaccagccgaagaagcaccttggccaccgcccgaaggcgcgtttttaggttaccgtttgagtcgcccggaaccgatgtgggccgaattattggctcttgcagcgtctgcccagggacgtgtgtatcgcgcggaagaccctcatggtgcgctccgtggcctcaaagaagtccgtggactccttgccaaagacttagctgttgttgcattgcgcgaaggtcttgatttacctccgactgatgatccaatgcttcttgcgtacctcttggacccgtcaaacacgacgcccgaaggcgtagcccgtcgttacggcggcgagtggaccgaagatgcaggtgagcgcgcgttattggccgaacgtttgcacgccaatttattaggacgtttgcaaggcgaggaacgtctcctctggctttacgaagaagtggagaaaccattgagtcgcgtgctcgcgcatatggaagctaccggtgtcaaattagacgtggcgtatttggaggcactcagccttgaagttgctgccgaaatgcgccgcttggaggaagaagtattccgtttagcaggccactcctttaaccttaattctcgcgatcagttagaacgtgtgttgttcgatgaacttggtctccctcctatcggcaagacagagaagaccggtaaacgtagcacttcagcggcggttttagaagctcttcgcgaagtccatcccattgtggacaagatcttgcagtaccgcgaactcgcgaaattgaaaggcacctatattgaccctcttccggcattagtccacccgaaaacgggacgcctccatacccgcttcaaccaaacagccacggcgaccggtcgtttgtcctcctctgatccaaaccttcagaatattccagtacgtaccccattgggccagcacatccgcaaagcgtttgtagctgaggagggttggcgtttagtggccctcgattatagccaaattgaattacgtgtccttgcccatctttctggcgatgagaacctcatccgcgtgtttcaggaaggccgcgacattcacactcaaacggcaagctggatgtttggattatcagctgaagcgatcgatcctttgatgcgtcgtgcagcgaagaccatcaatttcggtgttctctacggtatgagtgcccatcgtttgtcgcaggaattaggcattccctatgaagaagctgcggcgttcattcagcgctactttcaaagctatcccaaagttaaagcatggatcgagaagactctcgaagaaggccgcacacgtggttacgtagagaccttatttggacgtcgccgctatgttcccgatttaaacgctcgcgtgaaatctgtccgtgaagccgccgaacgcatggcgttcaacatgcctgtacagggcacggcagctgacctcatgaaacttgcaatggtgcgcctttttccacaattgcgtgaagttggtgcccgcatgctcttgcaggtccacgatgaactcttgttagaagcgccaaaagagcgtgcggaagaggtggcagccctcgcgaaagaggttatggaaggcgtgtggcccttagcggtgcctcttgaagtcgaagttggtattggcgaggattggttggctgccaaaggataatga

SEQ ID NO: 156 - protein, 841 aa, synthetic construct
  REGION 1..841: note = Variant of DNA polymerase I from Thermus sp. strain 2.9
MHHHHHHGGSGMLPLFEPKGRVLLVDGHHLAYRNFFALKGLTTSRGEPVQGVYGFAKSLLKALKEDGDVVIVVFDAKAPSFRHEAYEAYKAGRAPTPEDFPRQLALMKELVDLLGLERLEVPGFEADDVLATLAKKAEREGYEVQILTADRDLFQLLSPRISVLHPEGHRITPEWLWEKYGLRPEQWVDFRALAGDPSDNIPGVKGIGEKTALKLLKEWGSLENLLKNLDQVKPASVREKILAHLEDLKLSRELSRVRTDLPLEVDFRGRREPDWEGLKAFLERLEFGSLLHEFGLLESPLPAEEAPWPPPEGAFLGYRLSRPEPMWAELLALAASAQGRVYRAEDPHGALRGLKEVRGLLAKDLAVVALREGLDLPPTDDPMLLAYLLDPSNTTPEGVARRYGGEWTEDAGERALLAERLHANLLGRLQGEERLLWLYEEVEKPLSRVLAHMEATGVKLDVAYLEALSLEVAAEMRRLEEEVFRLAGHSFNLNSRDQLERVLFDELGLPPIGKTEKTGKRSTSAAVLEALREVHPIVDKILQYRELAKLKGTYIDPLPALVHPKTGRLHTRFNQTATATGRLSSSDPNLQNIPVRTPLGQHIRKAFVAEEGWRLVALDYSQIELRVLAHLSGDENLIRVFQEGRDIHTQTASWMFGLSAEAIDPLMRRAAKTINFGVLYGMSAHRLSQELGIPYEEAAAFIQRYFQSYPKVKAWIEKTLEEGRTRGYVETLFGRRRYVPDLNARVKSVREAAERMAFNMPVQGTAADLMKLAMVRLFPQLREVGARMLLQVHDELLLEAPKERAEEVAALAKEVMEGVWPLAVPLEVEVGIGEDWLAAKG

SEQ ID NO: 157 - DNA, 2529 bp, synthetic construct
  misc_feature 1..2529: note = Variant of DNA polymerase I from Thermus sp. strain 2.9
  source 1..2529: mol_type = other DNA
atgcaccatcatcatcatcatggcggtagcggcatgttaccgttgttcgaacctaaaggtcgcgtgcttctggttgatggccatcatctcgcgtatcgtaacttctttgccctgaaaggattaaccaccagccgtggcgagccggtacagggtgtctacggctttgcaaagtcgctcctgaaagctctgaaagaagacggtgatgtggtgattgttgtctttgatgcgaaagcgccaagttttcgccacgaagcgtacgaagcttacaaagccgggcgtgctccaacgccggaagactttcctcgccaattggcgcttatgaaggaattagtggatttgcttggcctcgaacgcttggaagttcccggtttcgaggcagacgacgtattagcgactctcgcaaagaaagccgaacgtgagggctatgaagtccagatcttgacagcagatcgcgatcttttccagcttttatctccgcgcatttccgtgttacacccggaagggcatcgtatcaccccggaatggctctgggagaaatatggtttgcgtcccgaacaatgggtggattttcgcgccttagcgggcgatccgagcgacaatattccgggagttaaaggtatcggcgagaagacggcgctcaagctccttaaagaatgggggtcgttggagaacttgcttaagaatttagatcaggtcaaaccagcttcagtgcgtgagaagattcttgcacacctcgaagacctcaaattaagccgcgaattgtcgcgtgtacgcaccgatttgccgctcgaagttgatttccgtggccgccgcgaacctgactgggagggtcttaaagcgtttttagagcgtcttgaatttggttcgctcttgcatgaattcggccttttagaaagcccgttaccagccgaagaagcaccttggccaccgcccgaaggcgcgtttttaggttaccgtttgagtcgcccggaaccgatgtgggccgaattattggctcttgcagcgtctgcccagggacgtgtgtatcgcgcggaagaccctcatggtgcgctccgtggcctcaaagaagtccgtggactccttgccaaagacttagctgttgttgcattgcgcgaaggtcttgatttacctccgactgatgatccaatgcttcttgcgtacctcttggacccgtcaaacacgacgcccgaaggcgtagcccgtcgttacggcggcgagtggaccgaagatgcaggtgagcgcgcgttattggccgaacgtttgcacgccaatttattaggacgtttgcaaggcgaggaacgtctcctctggctttacgaagaagtggagaaaccattgagtcgcgtgctcgcgcatatggaagctaccggtgtcaaattagacgtggcgtatttggaggcactcagccttgaagttgctgccgaaatgcgccgcttggaggaagaagtattccgtttagcaggccactcctttaaccttaattctcgcgatcagttagaacgtgtgttgttcgatgaacttggtctccctcctatcggcaagacagagaagaccggtaaacgtagcacttcagcggcggttttagaagctcttcgcgaagtccatcccattgtggacaagatcttgcagtaccgcgaactcgcgaaattgaaaggcacctatattgaccgtcttccggcattagtccacccgaaaacgggacgcctccatacccgcttcaaccaaacagccacggcgaccggtcgtttgtcctcctctgatccaaaccttcagaatattccagtacgtaccccattgggccagaaaatccgcaaagcgtttgtagctgaggagggttggcgtttagtggccctcgattatagccaaattgaattacgtgtccttgcccatctttctggcgatgagaacctcatccgcgtgtttcaggaaggccgcgacattcacactcaaacggcaagctggatgtttggagtgtcagcggaagcgatcgatcctttgatgcgtcgtgcagcgaagaccatcaatttcggtgttctctacggtatgagtgccgcgcgtttgtcgcaggaattaggcattccctatgaagaagctgcggcgttcattcagcgctactttcaaagctatcccaaagttaaagcatggatcgagaagactctcgaagaaggccgcacacgtggttacgtagagaccttatttggacgtcgccgctatgttcccgatttaaacgctcgcgtgaaatctgtccgtgaagccgccgaacgcatggcgttcaacatgcctgtacagggcacggcagctgacctcatgaaacttgcaatggtgcgcctttttccacaattgcgtgaagttggtgcccgcatgctcttgcaggtccacgatgaactcttgttagaagcgccaaaagagcgtgcggaagaggtggcagccctcgcgaaagaggttatggaaggcgtgtggcccttagcggtgcctcttgaagtcgaagttggtattggcgaggattggttggctgccaaaggataatga

SEQ ID NO: 158 - protein, 841 aa, synthetic construct
  REGION 1..841: note = Variant of DNA polymerase I from Thermus sp. strain 2.9
MHHHHHHGGSGMLPLFEPKGRVLLVDGHHLAYRNFFALKGLTTSRGEPVQGVYGFAKSLLKALKEDGDVVIVVFDAKAPSFRHEAYEAYKAGRAPTPEDFPRQLALMKELVDLLGLERLEVPGFEADDVLATLAKKAEREGYEVQILTADRDLFQLLSPRISVLHPEGHRITPEWLWEKYGLRPEQWVDFRALAGDPSDNIPGVKGIGEKTALKLLKEWGSLENLLKNLDQVKPASVREKILAHLEDLKLSRELSRVRTDLPLEVDFRGRREPDWEGLKAFLERLEFGSLLHEFGLLESPLPAEEAPWPPPEGAFLGYRLSRPEPMWAELLALAASAQGRVYRAEDPHGALRGLKEVRGLLAKDLAVVALREGLDLPPTDDPMLLAYLLDPSNTTPEGVARRYGGEWTEDAGERALLAERLHANLLGRLQGEERLLWLYEEVEKPLSRVLAHMEATGVKLDVAYLEALSLEVAAEMRRLEEEVFRLAGHSFNLNSRDQLERVLFDELGLPPIGKTEKTGKRSTSAAVLEALREVHPIVDKILQYRELAKLKGTYIDRLPALVHPKTGRLHTRFNQTATATGRLSSSDPNLQNIPVRTPLGQKIRKAFVAEEGWRLVALDYSQIELRVLAHLSGDENLIRVFQEGRDIHTQTASWMFGVSAEAIDPLMRRAAKTINFGVLYGMSAARLSQELGIPYEEAAAFIQRYFQSYPKVKAWIEKTLEEGRTRGYVETLFGRRRYVPDLNARVKSVREAAERMAFNMPVQGTAADLMKLAMVRLFPQLREVGARMLLQVHDELLLEAPKERAEEVAALAKEVMEGVWPLAVPLEVEVGIGEDWLAAKG

SEQ ID NO: 159 - DNA, 2529 bp, synthetic construct
  misc_feature 1..2529: note = Variant of DNA polymerase I from Thermus sp. strain 2.9
  source 1..2529: mol_type = other DNA
atgcaccatcatcatcatcatggcggtagcggcatgttaccgttgttcgaacctaaaggtcgcgtgcttctggttgatggccatcatctcgcgtatcgtaacttctttgccctgaaaggattaaccaccagccgtggcgagccggtacagggtgtctacggctttgcaaagtcgctcctgaaagctctgaaagaagacggtgatgtggtgattgttgtctttgatgcgaaagcgccaagttttcgccacgaagcgtacgaagcttacaaagccgggcgtgctccaacgccggaagactttcctcgccaattggcgcttatgaaggaattagtggatttgcttggcctcgaacgcttggaagttcccggtttcgaggcagacgacgtattagcgactctcgcaaagaaagccgaacgtgagggctatgaagtccagatcttgacagcagatcgcgatcttttccagcttttatctccgcgcatttccgtgttacacccggaagggcatcgtatcaccccggaatggctctgggagaaatatggtttgcgtcccgaacaatgggtggattttcgcgccttagcgggcgatccgagcgacaatattccgggagttaaaggtatcggcgagaagacggcgctcaagctccttaaagaatgggggtcgttggagaacttgcttaagaatttagatcaggtcaaaccagcttcagtgcgtgagaagattcttgcacacctcgaagacctcaaattaagccgcgaattgtcgcgtgtacgcaccgatttgccgctcgaagttgatttccgtggccgccgcgaacctgactgggagggtcttaaagcgtttttagagcgtcttgaactgggttcgctcttgcatgaattcggccttttagaaagcccgttaccagccgaagaagcaccttggccaccgcccgaaggcgcgtttttaggttaccgtttgagtcgcccggaaccgatgtgggccgaattattggctcttgcagcgtctgcccagggacgtgtgtatcgcgcggaagaccctcatggtgcgctccgtggcctcaaagaagtccgtggactccttgccaaagacttagctgttgttgcattgcgcgaaggtcttgatttacctccgactgatgatccaatgcttcttgcgtacctcttggactcgtcaaacacgacgcccgaaggcgtagcccgtcgttacggcggcgagtggaccgaagatgcaggtgagcgcgcgttattggccgaacgtttgcacgccaatttattaggacgtttgcaaggcgaggaacgtctcctctggctttacgaagaagtggagaaaccattgagtcgcgtgctcgcgcatatggaagctaccggtgtcaaattagacgtggcgtatttggaggcactcagccttgaagtcgctgccgaaatgcgccgcttggaggaagaagtattccgtttagcaggccactcctttaaccttaattctcgcgatcagttagaacgtgtgttgttcgatgaacttggtctccctcctatcggtaagacagagaagaccggtaaacgtagcacttcagcggcggttttagaagctcttcgcgaagtccatcccattgtggacaagatcttgcagtaccgcgaactcgcgaaattgaaaggcacctatattgaccgtcttccggcattagtccacccgaaaacgggacgcctccatacccgcttcaaccaaacagccacggcgaccggtcgtttgtcctcctctgatccaaaccttcagaatattccagtacgtaccccattgggccagaagatccgcaaagcgtttgtagctgaggagggttggcgtttagtggccctcgattatagccaaattgaattacgtgtccttgcccatctttctggcgatgagaacctcatccgcgtgtttcaggaaggccgcgacattcacactcaaacggcaagctggatgtttggattatcagctgaagcgatcgatcctttgatgcgtcgtgcagcgaagaccatcaatttcggtgttctctacggtatgagtgcccatcgtttgtcgcaggaattaggcattccctatgaagaagctgcggcgttcattcagcgctactttcaaagctatcccaaagttaaagcatggatcgagaagactctcgaagaaggccgcacacgtggttacgtagagaccttatttggacgtcgccgctatgttcccgatttaaatgctcgcgtgaaatctgtccgtgaagccgccgaacgcatggcgttcaacatgcctgtacagggcacggcagctgacctcatgaaacttgcaatggtgcgcctttttccacaattgcgtgaagttggtgcccgcatgctcttgcaggtccacgatgaactcttgttagaagcgccaaaagagcgtgcggaagaggtggcagccctcgcgaaagaggttatggaaggcgtgtggcccttagcggtgcctcttgaagtcgaagttggtattggcgaggattggttggctgccaaaggataatga

SEQ ID NO: 160 - protein, 841 aa, synthetic construct
  REGION 1..841: note = Variant of DNA polymerase I from Thermus sp. strain 2.9
MHHHHHHGGSGMLPLFEPKGRVLLVDGHHLAYRNFFALKGLTTSRGEPVQGVYGFAKSLLKALKEDGDVVIVVFDAKAPSFRHEAYEAYKAGRAPTPEDFPRQLALMKELVDLLGLERLEVPGFEADDVLATLAKKAEREGYEVQILTADRDLFQLLSPRISVLHPEGHRITPEWLWEKYGLRPEQWVDFRALAGDPSDNIPGVKGIGEKTALKLLKEWGSLENLLKNLDQVKPASVREKILAHLEDLKLSRELSRVRTDLPLEVDFRGRREPDWEGLKAFLERLELGSLLHEFGLLESPLPAEEAPWPPPEGAFLGYRLSRPEPMWAELLALAASAQGRVYRAEDPHGALRGLKEVRGLLAKDLAVVALREGLDLPPTDDPMLLAYLLDSSNTTPEGVARRYGGEWTEDAGERALLAERLHANLLGRLQGEERLLWLYEEVEKPLSRVLAHMEATGVKLDVAYLEALSLEVAAEMRRLEEEVFRLAGHSFNLNSRDQLERVLFDELGLPPIGKTEKTGKRSTSAAVLEALREVHPIVDKILQYRELAKLKGTYIDRLPALVHPKTGRLHTRFNQTATATGRLSSSDPNLQNIPVRTPLGQKIRKAFVAEEGWRLVALDYSQIELRVLAHLSGDENLIRVFQEGRDIHTQTASWMFGLSAEAIDPLMRRAAKTINFGVLYGMSAHRLSQELGIPYEEAAAFIQRYFQSYPKVKAWIEKTLEEGRTRGYVETLFGRRRYVPDLNARVKSVREAAERMAFNMPVQGTAADLMKLAMVRLFPQLREVGARMLLQVHDELLLEAPKERAEEVAALAKEVMEGVWPLAVPLEVEVGIGEDWLAAKG

SEQ ID NO: 161 - DNA, 2529 bp, synthetic construct
  misc_feature 1..2529: note = Variant of DNA polymerase I from Thermus sp. strain 2.9
  source 1..2529: mol_type = other DNA
atgcaccatcatcatcatcatggcggtagcggcatgttaccgttgttcgaacctaaaggtcgcgtgcttctggttgatggccatcatctcgcgtatcgtaacttctttgccctgaaaggattaaccaccagccgtggcgagccggtacagggtgtctacggctttgcaaagtcgctcctgaaagctctgaaagaagacggtgatgtggtgattgttgtctttgatgcgaaagcgccaagttttcgccacgaagcgtacgaagcttacaaagccgggcgtgctccaacgccggaagactttcctcgccaattggcgcttatgaaggaattagtggatttgcttggcctcgaacgcttggaagttcccggtttcgaggcagacgacgtattagcgactctcgcaaagaaagccgaacgtgagggctatgaagtccagatcttgacagcagatcgcgatcttttccagcttttatctccgcgcatttccgtgttacacccggaagggcatcgtatcaccccggaatggctctgggagaaatatggtttgcgtcccgaacaatgggtggattttcgcgccttagcgggcgatcaaagcgacaatattccgggagttaaaggtatcggcgagaagacggcgctcaagctccttaaagaatgggggtcgttggagaacttgcttaagaatttagatcaggtcaaaccagcttcagtgcgtgagaagattcttgcacacctcgaagacctcaaattaagccgcgaattgtcccgtgtacgcaccgatttgccgctcgaagttgatttccgtggccgccgcgaacctgactgggagggtcttaaagcgtttttagagcgtcttgaatttggttcgctcttgcatgaattcggccttttagaaagcccgttaccagccgaagaagcaccttggccaccgcccgaaggcgcgtttttaggttaccgtttgagtcgcccggaaccgatgtgggccgaattattggctcttgcagcgtctgcccagggacgtgtgtatcgcgcggaagaccctcatggtgcgctccgtggcctcaaagaagtccgtggactccttgccaaagacttagctgttgttgcattgcgcgaaggtcttgatttacctccgactgatgatccaatgcttcttgcgtacctcttggacccgtcaaacacgacgcccgaaggcgtagcccgtcgttacggcggcgagtggaccgaagatgcaggtgagcgcgcgttattggccgaacgtttgcacgccaatttattaggacgtttgcaaggcgaggaacgtctcctctggctttacgaagaagtggagaaaccattgagtcgcgtgctcgcgcatatggaagctaccggtgtcaaattagacgtggcgtatttggaggcactcagccttgaagttgctgccgaaatgcgccgcttggaggaagaagtattccgtttagcaggccactcctttaaccttaattctcgcgatcagttagaacgtgtgttgttcgatgaacttggtctccctcctatcggcaagacagagaagaccggtaaacgtagcacttcagcggcggttttagaagctcttcgcgaagtccatcccattgtggacaagatcttgcagtaccgcgaactcgcgaaattgaaaggcacctatattgaccctcttccggcattagtccacccgaaaacgggacgcctccatacccgcttcaaccaaacagccacggcgaccggtcgtttgtcctcctctgatccaaaccttcagaatattccagtacgtaccccattgggccagaagatccgcaaagcgtttgtagctgaggagggttggcgtttagtggccctcgattatagccaaattgaattacgtgtccttgcccatctttctggcgatgagaacctcatccgcgtgtttcaggaaggccgcgacattcacactcaaacggcaagctggatgtttggattatcagctgaagcgatcgatcctttgatgcgtcgtgcagcgaagaccatcaatttcggtgttctctacggtatgagtgcccatcgtttgtcgcaggaattaggcattccctatgaagaagctgcggcgttcattcagcgctactttcaaagctatcccaaagttaaagcatggatcgagaagactctcgaagaaggccgcacacgtggttacgtagagaccttatttggacgtcgccgctatgttcccgatttaaacgctcgcgtgaaatctgtccgtgaagccgccgaacgcatggcgttcaacatgcctgtacagggcacggcagctgacctcatgaaacttgcaatggtgcgcctttttccacaattgcgtgaagttggtgcccgcatgctcttgcaggtccacgatgaactcttgttagaagcgccaaaagagcgtgcggaagaggtggcagccctcgcgaaagaggttatggaaggcgtgtggcccttagcggtgcctcttgaagtcgaagttggtattggcgaggattggttggctgccaaaggataatga

SEQ ID NO: 162 - protein, 841 aa, synthetic construct
  REGION 1..841: note = Variant of DNA polymerase I from Thermus sp. strain 2.9
MHHHHHHGGSGMLPLFEPKGRVLLVDGHHLAYRNFFALKGLTTSRGEPVQGVYGFAKSLLKALKEDGDVVIVVFDAKAPSFRHEAYEAYKAGRAPTPEDFPRQLALMKELVDLLGLERLEVPGFEADDVLATLAKKAEREGYEVQILTADRDLFQLLSPRISVLHPEGHRITPEWLWEKYGLRPEQWVDFRALAGDQSDNIPGVKGIGEKTALKLLKEWGSLENLLKNLDQVKPASVREKILAHLEDLKLSRELSRVRTDLPLEVDFRGRREPDWEGLKAFLERLEFGSLLHEFGLLESPLPAEEAPWPPPEGAFLGYRLSRPEPMWAELLALAASAQGRVYRAEDPHGALRGLKEVRGLLAKDLAVVALREGLDLPPTDDPMLLAYLLDPSNTTPEGVARRYGGEWTEDAGERALLAERLHANLLGRLQGEERLLWLYEEVEKPLSRVLAHMEATGVKLDVAYLEALSLEVAAEMRRLEEEVFRLAGHSFNLNSRDQLERVLFDELGLPPIGKTEKTGKRSTSAAVLEALREVHPIVDKILQYRELAKLKGTYIDPLPALVHPKTGRLHTRFNQTATATGRLSSSDPNLQNIPVRTPLGQKIRKAFVAEEGWRLVALDYSQIELRVLAHLSGDENLIRVFQEGRDIHTQTASWMFGLSAEAIDPLMRRAAKTINFGVLYGMSAHRLSQELGIPYEEAAAFIQRYFQSYPKVKAWIEKTLEEGRTRGYVETLFGRRRYVPDLNARVKSVREAAERMAFNMPVQGTAADLMKLAMVRLFPQLREVGARMLLQVHDELLLEAPKERAEEVAALAKEVMEGVWPLAVPLEVEVGIGEDWLAAKG

SEQ ID NO: 163 - DNA, 2529 bp, synthetic construct
  misc_feature 1..2529: note = Variant of DNA polymerase I from Thermus sp. strain 2.9
  source 1..2529: mol_type = other DNA
atgcaccatcatcatcatcatggcggtagcggcatgttaccgttgttcgaacctaaaggtcgcgtgcttctggttgatggccatcatctcgcgtatcgtaacttctttgccctgaaaggattaaccaccagccgtggcgagccggtacagggtgtctacggctttgcaaagtcgctcctgaaagctctgaaagaagacggtgatgtggtgattgttgtctttgatgcgaaagcgccaagttttcgccacgaagcgtacgaagcttacaaagccgggcgtgctccaacgccggaagactttcctcgccaattggcgcttatgaaggaattagtggatttgcttggcctcgaacgcttggaagttcccggtttcgaggcagacgacgtattagcgactctcgcaaagaaagccgaacgtgagggctatgaagtccagatcttgacagcagatcgcgatcttttccagcttttatctccgcgcatttccgtgttacacccggaagggcatcgtatcaccccggaatggctctgggagaaatatggtttgcgtcccgaacaatgggtggattttcgcgccttagcgggcgatccgagcgacaatattccgggagttaaaggtatcggcgagaagacggcgctcaagctccttaaagaatgggggtcgttggagaacttgcttaagaatttagatcaggtcaaaccagcttcagtgcgtgagaagattcttgcacacctcgaagacctcaaattaagccgcgaattgtcgcgtgtacgcaccgatttgccgctcgaagttgatttccgtggccgccgcgaacctgactgggagggtcttaaagcgtttttagagcgtcttgaatttggttcgctcttgcatgaattcggccttttagaaagcccgttaccagccgaagaagcaccttggccaccgcccgaaggcgcgtttttaggttaccgtttgagtcgcccggaaccgatgtgggccgaattattggctcttgcagcgtctgcccagggacgtgtgtatcgcgcggaagaccctcatggtgcgctccgtggcctcaaagaagtccgtggactccttgccaaagacttagctgttgttgcattgcgcgaaggtcttgatttacctccgactgatgatccaatgcttcttgcgtacctcttggacccgtcaaacacgacgcccgaaggcgtagcccgtcgttacggcggcgagtggaccgaagatgcaggtgagcgcgcgttattggccgaacgtttgcacgccaatttattaggacgtttgcaaggcgaggaacgtctcctctggctttacgaagaagtggagaaaccattgagtcgcgtgctcgcgcatatggaagctaccggtgtcaaattagacgtggcgtatttggaggcactcagccttgaagttgctgccgaaatgcgccgcttggaggaagaagtattccgtttagcaggccactcctttaaccttaattctcgcgatcagttagaacgtgtgttgttcgatgaacttggtctccctcctatcggcaagacagagaagaccggtaaacgtagcacttcagcggcggttttagaagctcttcgcgaagtccatcccattgtggacaagatcttgcagtaccgcgaactcgcgaaattgaaaggcacctatattgaccgtcttccggcattagtccacccgaaaacgggacgcctccatacccgcttcaaccaaacagccacggcgaccggtcgtttgtcctcctctgatccaaaccttcagaatattccagtacgtaccccattgggccagaaaatccgcaaagcgtttgtagctgaggagggttggcgtttagtggccctcgattatagccaaattgaattacgtgtccttgcccatctttctggcgatgagaacctcatccgcgtgtttcaggaaggccgcgacattcacactcaaacggcaagctggatgtttggagtgtcatcggaagcgatcgatcctttgatgcgtcgtgcagcgaagaccatcaatttcggtgttctctacggtatgagtgcccatcgtttgtcgcaggaattaggcattccctatgaagaagctgcggcgttcattcagcgctactttcaaagctatcccaaagttaaagcatggatcgagaagactctcgaagaaggccgcacacgtggttacgtagagaccttatttggacgtcgccgctatgttcccgatttaaatgctcgcgtgaaatctgtccgtgaagccgccgaacgcatggcgttcaacatgcctgtacagggcacggcagctgacctcatgaaacttgcaatggtgcgcctttttccacaattgcgtgaagttggtgcccgcatgctcttgcaggtccacgatgaactcttgttagaagcgccaaaagagcgtgcggaagaggtggcagccctcgcgaaagaggttatggaaggcgtgtggcccttagcggtgcctcttgaagtcgaagttggtattggcgaggattggttggctgccaaaggataatga

SEQ ID NO: 164 - protein, 841 aa, synthetic construct
  REGION 1..841: note = Variant of DNA polymerase I from Thermus sp. strain 2.9
MHHHHHHGGSGMLPLFEPKGRVLLVDGHHLAYRNFFALKGLTTSRGEPVQGVYGFAKSLLKALKEDGDVVIVVFDAKAPSFRHEAYEAYKAGRAPTPEDFPRQLALMKELVDLLGLERLEVPGFEADDVLATLAKKAEREGYEVQILTADRDLFQLLSPRISVLHPEGHRITPEWLWEKYGLRPEQWVDFRALAGDPSDNIPGVKGIGEKTALKLLKEWGSLENLLKNLDQVKPASVREKILAHLEDLKLSRELSRVRTDLPLEVDFRGRREPDWEGLKAFLERLEFGSLLHEFGLLESPLPAEEAPWPPPEGAFLGYRLSRPEPMWAELLALAASAQGRVYRAEDPHGALRGLKEVRGLLAKDLAVVALREGLDLPPTDDPMLLAYLLDPSNTTPEGVARRYGGEWTEDAGERALLAERLHANLLGRLQGEERLLWLYEEVEKPLSRVLAHMEATGVKLDVAYLEALSLEVAAEMRRLEEEVFRLAGHSFNLNSRDQLERVLFDELGLPPIGKTEKTGKRSTSAAVLEALREVHPIVDKILQYRELAKLKGTYIDRLPALVHPKTGRLHTRFNQTATATGRLSSSDPNLQNIPVRTPLGQKIRKAFVAEEGWRLVALDYSQIELRVLAHLSGDENLIRVFQEGRDIHTQTASWMFGVSSEAIDPLMRRAAKTINFGVLYGMSAHRLSQELGIPYEEAAAFIQRYFQSYPKVKAWIEKTLEEGRTRGYVETLFGRRRYVPDLNARVKSVREAAERMAFNMPVQGTAADLMKLAMVRLFPQLREVGARMLLQVHDELLLEAPKERAEEVAALAKEVMEGVWPLAVPLEVEVGIGEDWLAAKG

SEQ ID NO: 165 - DNA, 2529 bp, synthetic construct
  misc_feature 1..2529: note = Variant of DNA polymerase I from Thermus sp. strain 2.9
  source 1..2529: mol_type = other DNA
atgcaccatcatcatcatcatggcggtagcggcatgttaccgttgttcgaacctaaaggtcgcgtgcttctggttgatggccatcatctcgcgtatcgtaacttctttgccctgaaaggattaaccaccagccgtggcgagccggtacagggtgtctacggctttgcaaagtcgctcctgaaagctctgaaagaagacggtgatgtggtgattgttgtctttgatgcgaaagcgccaagttttcgccacgaagcgtacgaagcttacaaagccgggcgtgctccaacgccggaagactttcctcgccaattggcgcttatgaaggaattagtggatttgcttggcctcgaacgcttggaagttcccggtttcgaggcagacgacgtattagcgactctcgcaaagaaagccgaacgtgagggctatgaagtccagatcttgacagcagatcgcgatcttttccagcttttatctccgcgcgtctcggtgttacacccggaagggcatcgcatcaccccggaatggctctgggagaaatatggtttgcgtcccgaacaatgggtggattttcgcgccttagtaggcgatccgagcgacaatattccgggagttaaaggtatcggcgagaagacggcgctcaagctccttaaagaatgggggtcgttggagaacttgcttaagaatttagatcaggtcaaaccagcttcagtgcgtgagaagattcttgcacacctcgaagacctcaaattaagcctggaattgtcccgtgtacgcaccgatttgccgctcgaagttgatttccgtggccgccgcgaacctgactgggagggtcttaaagcgtttttagagcgtcttgaatttggttcgctcttgcatgaattcggccttttagaaagcccgttaccagccgaagaagcaccttggccaccgcccgaaggcgcgtttttaggttaccgtttgagtcgcccggaaccgatgtgggccgaattattggctcttgcagcgtctgcccagggacgtgtgtatcgcgcggaagaccctcatggtgcgctccgcggcctcaaagaagtccgtggactccttgccaaagacttagctgttgttgcattgcgcgaaggtcttgatttacctccgactgatgatccaatgcttcttgcgtacctcttggacccgtcaaacacgacgcccgaaggcgtagcccgtcgttacggcggcgagtggaccgaagatgcaggtgagcgcgcgttattggccgaacgtttgcacgccaatttattaggacgtttgcaaggcgaggaacgtctcctctggctttacgaagaagtggagaaaccattgagtcgcgtgctcgcgcatatggaagctaccggtgtcaaattagacgtggcgtatttggaggcactcagccttgaagttgctgccgaaatgcgccgcttggaggaagaagtattccgtttagcaggccactcctttaaccttaattctcgcgatcagttagaacgtgtgttgttcgatgaacttggtctccctcctatcggcaagacagagaagaccggtaaacgtagcacttcagcggcggttttagaagctcttcgcgaagtccatcccattgtggacaagatcttgcagtaccgcgaactcgcgaaattgaaaggcacctatattgaccctcttccggcattagtccacccgaaaacgggacgcctccatacccgcttcaaccaaacagccacggcgaccggtcgtttgtcctcctctgatccaaaccttcagaatattccagtacgtaccccattgggccagaagatccgcaaagcgtttgtagctgaggagggttggcgtttagtggccctcgattatagccaaattgaattacgtgtccttgcccatctttctggcgatgagaacctcatccgcgtgtttcaggaaggccgtgacattcacactcaaacggcaagctggatgtttggattatcagctgaagcgatcgatcctttgatgcgtcgtgcagcgaagaccatcaatttcggtgttctctacggtatgagtgcccatcgtttgtcgcaggaattaggcattccctatgaagaagctgcggcgttcattcagcgctactttcaaagctatcccaaagttaaagcatggatcgagaagactctcgaagaaggccgcacacgtggttacgtagagaccttatttggacgtcgccgctatgttcccgatttaaacgctcgcgtgaaatctgtccgtgaagccgccgaacgcatggcgttcaacatgcctgtacagggcacggcagctgacctcatgaaacttgcaatggtgcgcctttttccacaattgcgtgaagttggtgcccgcatgctcttgcaggtccacgatgaactcttgttagaagcgccaaaagagcgtgcggaagaggtggcagccctcgcgaaagaggttatggaaggcgtgtggcccttagcggtgcctcttgaagtcgaagttggtattggcgaggattggttggctgccaaaggataatga

SEQ ID NO: 166 - protein, 841 aa, synthetic construct
  REGION 1..841: note = Variant of DNA polymerase I from Thermus sp. strain 2.9
MHHHHHHGGSGMLPLFEPKGRVLLVDGHHLAYRNFFALKGLTTSRGEPVQGVYGFAKSLLKALKEDGDVVIVVFDAKAPSFRHEAYEAYKAGRAPTPEDFPRQLALMKELVDLLGLERLEVPGFEADDVLATLAKKAEREGYEVQILTADRDLFQLLSPRVSVLHPEGHRITPEWLWEKYGLRPEQWVDFRALVGDPSDNIPGVKGIGEKTALKLLKEWGSLENLLKNLDQVKPASVREKILAHLEDLKLSLELSRVRTDLPLEVDFRGRREPDWEGLKAFLERLEFGSLLHEFGLLESPLPAEEAPWPPPEGAFLGYRLSRPEPMWAELLALAASAQGRVYRAEDPHGALRGLKEVRGLLAKDLAVVALREGLDLPPTDDPMLLAYLLDPSNTTPEGVARRYGGEWTEDAGERALLAERLHANLLGRLQGEERLLWLYEEVEKPLSRVLAHMEATGVKLDVAYLEALSLEVAAEMRRLEEEVFRLAGHSFNLNSRDQLERVLFDELGLPPIGKTEKTGKRSTSAAVLEALREVHPIVDKILQYRELAKLKGTYIDPLPALVHPKTGRLHTRFNQTATATGRLSSSDPNLQNIPVRTPLGQKIRKAFVAEEGWRLVALDYSQIELRVLAHLSGDENLIRVFQEGRDIHTQTASWMFGLSAEAIDPLMRRAAKTINFGVLYGMSAHRLSQELGIPYEEAAAFIQRYFQSYPKVKAWIEKTLEEGRTRGYVETLFGRRRYVPDLNARVKSVREAAERMAFNMPVQGTAADLMKLAMVRLFPQLREVGARMLLQVHDELLLEAPKERAEEVAALAKEVMEGVWPLAVPLEVEVGIGEDWLAAKG

SEQ ID NO: 167 - DNA, 2529 bp, synthetic construct
  misc_feature 1..2529: note = Variant of DNA polymerase I from Thermus sp. strain 2.9
  source 1..2529: mol_type = other DNA
atgcaccatcatcatcatcatggcggtagcggcatgttaccgttgttcgaacctaaaggtcgcgtgcttctggttgatggccatcatctcgcgtatcgtaacttctttgccctgaaaggattaaccaccagccgtggcgagccggtacagggtgtctacggctttgcaaagtcgctcctgaaagctctgaaagaagacggtgatgtggtgattgttgtctttgatgcgaaagcgccaagttttcgccacgaagcgtacgaagcttacaaagccgggcgtgctccaacgccggaagactttcctcgccaattggcgcttatgaaggaattagtggatttgcttggcctcgaacgcttggaagttcccggtttcgaggcagacgacgtattagcgactctcgcaaagaaagccgaacgtgagggctatgaagtccagatcttgacagcagatcgcgatcttttccagcttttatctccgcgcatttccgtgttacacccggaagggcatcgtatcaccccggaatggctctgggagaaatatggtttgcgtcccgaacaatgggtggattttcgcgccttagcgggcgatccgagcgacaatattccgggagttaaaggtatcggcgagaagacggcgctcaagctccttaaagaatgggggtcgttggagaacttgcttaagaatttagatcaggtcaaaccagcttcagtgcgtgagaagattcttgcacacctcgaagacctcaaattaagccgcgaattgtcgcgtgtacgcaccgatttgccgctcgaagttgatttccgtggccgccgcgaacctgactgggagggtcttaaagcgtttttagagcgtcttgaatttggttcgctcttgcatgaattcggccttttagaaagcccgttaccagccgaagaagcaccttggccaccgcccgaaggcgcgtttttaggttaccgtttgagtcgcccggaaccgatgtgggccgaattattggctcttgcagcgtctgcccagggacgtgtgtatcgcgcggaagaccctcatggtgcgctccgtggcctcaaagaagtccgtggactccttgccaaagacttagctgttgttgcattgcgcgaaggtcttgatttacctccgactgatgatccaatgcttcttgcgtacctcttggacccgtcaaacacgacgcccgaaggcgtagcccgtcgttacggcggcgagtggaccgaagatgcaggtgagcgcgcgttattggccgaacgtttgcacgccaatttattaggacgtttgcaaggcgaggaacgtctcctctggctttacgaagaagtggagaaaccattgagtcgcgtgctcgcgcatatggaagctaccggtgtcaaattagacgtggcgtatttggaggcactcagccttgaagccgctgccgaactgcgccgcttggaggaagaagtattccgtttagcaggccactcctttaaccttaattctcgcgatcagttagaacgtgtgttgttcgatgaacttggtctccctcctatcggtaagacagagaagaccggtaaacgtagcacttcagcggcggttttagaagctcttcgcgaagtccatcccattgtggacaagatcttgcagtaccgcgaactcgcgaaattgaaaggcacctatattgaccgtcttccggcattagtccacccgaaaacgggacgcctccatacccgcttcaaccaaacagccacggcgaccggtcgtttgtcctcctctgatccaaaccttcagaatattccagtacgtaccccattgggccagaaaatccgcaaagcgtttgtagctgaggagggttggcgtttagtggccctcgattatagccaaattgaattacgtgtccttgcccatctttctggcgatgagaacctcatccgcgtgtttcaggaaggccgcgacattcacactcaaacggcaagctggatgtttggagtgtcagcggaagcgatcgatcctttgatgcgtcgtgcagcgaagaccatcaatttcggtgttctctacggtatgagtgcccatcgtttgtcgcaggaattaggcattccctatgaagaagctgcggcgttcattcagcgctactttcaaagctatcccaaagttaaagcatggatcgagaagactctcgaagaaggccgcacacgtggttacgtagagaccttatttggacgtcgccgctatgttcccgatttaaacgctcgcgtgaaatctgtccgtgaagccgccgaacgcatggcgtggaacatgcctgtacagggcacggcagctgacctcatgaaacttgcaatggtgcgcctttttccacaattgcgtgaagttggtgcccgcatgctcttgcaggtccacgatgaactcttgttagaagcgccaaaagagcgtgcggaagaggtggcagccctcgcgaaagaggttatggaaggcgtgtggcccttagcggtgcctcttgaagtcgaagttggtattggcgaggattggttggctgccaaaggataatga

SEQ ID NO: 168 - protein, 841 aa, synthetic construct
  REGION 1..841: note = Variant of DNA polymerase I from Thermus sp. strain 2.9
MHHHHHHGGSGMLPLFEPKGRVLLVDGHHLAYRNFFALKGLTTSRGEPVQGVYGFAKSLLKALKEDGDVVIVVFDAKAPSFRHEAYEAYKAGRAPTPEDFPRQLALMKELVDLLGLERLEVPGFEADDVLATLAKKAEREGYEVQILTADRDLFQLLSPRISVLHPEGHRITPEWLWEKYGLRPEQWVDFRALAGDPSDNIPGVKGIGEKTALKLLKEWGSLENLLKNLDQVKPASVREKILAHLEDLKLSRELSRVRTDLPLEVDFRGRREPDWEGLKAFLERLEFGSLLHEFGLLESPLPAEEAPWPPPEGAFLGYRLSRPEPMWAELLALAASAQGRVYRAEDPHGALRGLKEVRGLLAKDLAVVALREGLDLPPTDDPMLLAYLLDPSNTTPEGVARRYGGEWTEDAGERALLAERLHANLLGRLQGEERLLWLYEEVEKPLSRVLAHMEATGVKLDVAYLEALSLEAAAELRRLEEEVFRLAGHSFNLNSRDQLERVLFDELGLPPIGKTEKTGKRSTSAAVLEALREVHPIVDKILQYRELAKLKGTYIDRLPALVHPKTGRLHTRFNQTATATGRLSSSDPNLQNIPVRTPLGQKIRKAFVAEEGWRLVALDYSQIELRVLAHLSGDENLIRVFQEGRDIHTQTASWMFGVSAEAIDPLMRRAAKTINFGVLYGMSAHRLSQELGIPYEEAAAFIQRYFQSYPKVKAWIEKTLEEGRTRGYVETLFGRRRYVPDLNARVKSVREAAERMAWNMPVQGTAADLMKLAMVRLFPQLREVGARMLLQVHDELLLEAPKERAEEVAALAKEVMEGVWPLAVPLEVEVGIGEDWLAAKG

SEQ ID NO: 169 - DNA, 2529 bp, synthetic construct
  misc_feature 1..2529: note = Variant of DNA polymerase I from Thermus sp. strain 2.9
  source 1..2529: mol_type = other DNA
atgcaccatcatcatcatcatggcggtagcggcatgttaccgttgttcgaacctaaaggtcgcgtgcttctggttgatggccatcatctcgcgtatcgtaacttctttgccctgaaaggattaaccaccagccgtggcgagccggtacagggtgtctacggctttgcaaagtcgctcctgaaagctctgaaagaagacggtgatgtggtgattgttgtctttgatgcgaaagcgccaagttttcgccacgaagcgtacgaagcttacaaagccgggcgtgctccaacgccggaagactttcctcgccaattggcgcttatgaaggaattagtggatttgcttggcctcgaacgcttggaagttcccggtttcgaggcagacgacgtattagcgactctcgcaaagaaagccgaacgtgagggctatgaagtccagatcttgacagcagatcgcgatcttttccagcttttatctccgcgcatctcggtgttacacccggaagggcatcgtatcaccccggaatggctctgggagaaatatggtttgcgtcccgaacaatgggtggattttcgcgccttagtaggcgatccgagcgacaatattccgggagttaaaggtatcggcgagaagacggcgctcaagctccttaaagaatgggggtcgttggagaacttgcttaagaatttagatcaggtcaaaccagcgtcagtgcgtgagaagattcttgcacacctcgaagacctcaaattaagccgcgaattgtcccgtgtacgcaccgatttgccgctcgaagttgatttccgtggccgccgcgaacctgactgggagggtcttaaagcgtttttagagcgtcttgaatttggttcgctcttgcatgaattcggccttttagaaagcccgttaccagccgaagaagcaccttggccaccgcccgaaggcgcgtttttaggttaccgtttgagtcgcccggaaccgatgtgggccgaattattggctcttgcagcgtctgcccagggacgtgtgtatcgcgcggaagaccctcatggtgcgctccgtggcctcaaagaagtccgtggactccttgccaaagacttagctgttgttgcattgcgcgaaggtcttgatttacctccgactgatgatccaatgcttcttgcgtacctcttggacccgtcaaacacgacgcccgaaggcgtagcccgtcgttacggcggcgagtggaccgaagatgcaggcgagcgcgcgttattggccgaacgtttgcacgccaatttattaggacgtttgcaaggcgaggaacgtctcctctggctttacgaagaagtggagaaaccattgagtcgcgtgctcgcgcatatggaagctaccggtgtcaaattagacgtggcgtatttggaggcactcagccttgaagttgctgccgaaatgcgccgcttggaggaagaagtattccgtttagcaggccactcctttaaccttaattctcgcgatcagttagaacgtgtgttgttcgatgaacttggtctccctcctatcggcaagacagagaagaccggtaaacgtagcacttcagcggcggttttagaagctcttcgcgaagtccatcccattgtggacaagatcttgcagtaccgcgaactcgcgaaattgaaaggcacctatattgaccctcttccggcattagtccacccgaaaacgggacgcctccatacccgcttcaaccaaacagccacggcgaccggtcgtttgtcctcctctgatccaaaccttcagaatattccagtacgtaccccattgggccagaagatccgcaaagcgtttgtagctgaggagggttggcgtttagtggccctcgattatagccaaattgaattacgtgtccttgcccatctttctggcgatgagaacctcatccgcgtgtttcaggaaggcaaagacattcacactcaaacggcaagctggatgtttggattaccggcggaagcgatcgatcctttgatgcgtcgtgcagcgaagaccatcaatttcggtgttctctacggtatgagtgcccatcgtttgtcgcaggaattaggcattccctatgaagaagctgcggcgttcattcagcgctactttcaaagctatcccaaagttaaagcatggatcgagaagactctcgaagaaggccgcacacgtggttacgtagagaccttatttggacgtcgccgctatgttcccgatttaaacgctcgcgtgaaatctgtccgtgaagccgccgaacgcatggcgttcaacatgcctgtacagggcacggcagctgacctcatgaaacttgcaatggtgcgcctttttccacaattgcgtgaagttggtgcccgcatgctcttgcaggtccacgatgaactcttgttagaagcgccaaaagagcgtgcggaagaggtggcagccctcgcgaaagaggttatggaaggcgtgtggcccttagcggtgcctcttgaagtcgaagttggtattggcgaggattggttggctgccaaaggataatga

SEQ ID NO: 170 - protein, 841 aa, synthetic construct
  REGION 1..841: note = Variant of DNA polymerase I from Thermus sp. strain 2.9
MHHHHHHGGSGMLPLFEPKGRVLLVDGHHLAYRNFFALKGLTTSRGEPVQGVYGFAKSLLKALKEDGDVVIVVFDAKAPSFRHEAYEAYKAGRAPTPEDFPRQLALMKELVDLLGLERLEVPGFEADDVLATLAKKAEREGYEVQILTADRDLFQLLSPRISVLHPEGHRITPEWLWEKYGLRPEQWVDFRALVGDPSDNIPGVKGIGEKTALKLLKEWGSLENLLKNLDQVKPASVREKILAHLEDLKLSRELSRVRTDLPLEVDFRGRREPDWEGLKAFLERLEFGSLLHEFGLLESPLPAEEAPWPPPEGAFLGYRLSRPEPMWAELLALAASAQGRVYRAEDPHGALRGLKEVRGLLAKDLAVVALREGLDLPPTDDPMLLAYLLDPSNTTPEGVARRYGGEWTEDAGERALLAERLHANLLGRLQGEERLLWLYEEVEKPLSRVLAHMEATGVKLDVAYLEALSLEVAAEMRRLEEEVFRLAGHSFNLNSRDQLERVLFDELGLPPIGKTEKTGKRSTSAAVLEALREVHPIVDKILQYRELAKLKGTYIDPLPALVHPKTGRLHTRFNQTATATGRLSSSDPNLQNIPVRTPLGQKIRKAFVAEEGWRLVALDYSQIELRVLAHLSGDENLIRVFQEGKDIHTQTASWMFGLPAEAIDPLMRRAAKTINFGVLYGMSAHRLSQELGIPYEEAAAFIQRYFQSYPKVKAWIEKTLEEGRTRGYVETLFGRRRYVPDLNARVKSVREAAERMAFNMPVQGTAADLMKLAMVRLFPQLREVGARMLLQVHDELLLEAPKERAEEVAALAKEVMEGVWPLAVPLEVEVGIGEDWLAAKG

SEQ ID NO: 171 - DNA, 2529 bp, synthetic construct
  misc_feature 1..2529: note = Variant of DNA polymerase I from Thermus sp. strain 2.9
  source 1..2529: mol_type = other DNA
atgcaccatcatcatcatcatggcggtagcggcatgttaccgttgttcgaacctaaaggtcgcgtgcttctggttgatggccatcatctcgcgtatcgtaacttctttgccctgaaaggattaaccaccagccgtggcgagccggtacagggtgtctacggctttgcaaagtcgctcctgaaagctctgaaagaagacggtgatgtggtgattgttgtctttgatgcgaaagcgccaagttttcgccacgaagcgtacgaagcttacaaagccgggcgtgctccaacgccggaagactttcctcgccaattggcgcttatgaaggaattagtggatttgcttggcctcgaacgcttggaagttcccggtttcgaggcagacgacgtattagcgactctcgcaaagaaagccgaacgtgagggctatgaagtccagatcttgacagcagatcgcgatcttttccagcttttatctccgcgcgtctcggtgttacacccggaagggcatcgtatcaccccggaatggctctgggagaaatatggtttgcgtcccgaacaatgggtggattttcgcgccttagcaggcgatccgagcgacaatattccgggagttaaaggtatcggcgagaagacggcgctcaagctccttaaagaatgggggtcgttggagaacttgcttaagaatttagatcaggtcaaaccagcttcagtgcgtgagaagattcttgcacacctcgaagacctcaaattaagccgcgaattgtcccgtgtacgcaccgatttgccgctcgaagttgatttccgtggccgccgcgaacctgactgggagggtcttaaagcgtttttagagcgtcttgaatttggttcgctcttgcatgaattcggccttttagaaagcccgttaccagccgaagaagcaccttggccaccgcccgaaggcgcgtttttaggttacgttttgagtcgcccggaaccgatgtgggccgaattattggctcttgcagcgtctgcccagggacgtgtgtatcgcgcggaagaccctcatggtgcgctccgtggcctcaaagaagtccgtggactccttgccaaagacttagctgttgttgcattgcgcgaaggtcttgatttacctccgactgatgatccaatgcttcttgcgtacctcttggacccgtcaaacacgacgcccgaaggcgtagcccgtcgttacggcggcgagtggaccgaagatgcaggcgagcgcgcgttattggccgaacgtttgcacgccaatttattaggacgtttgcaaggcgaggaacgtctcctctggctttacgaagaagtggagaaaccattgagtcgcgtgctcgcgcatatggaagctaccggtgtcaaattagacgtggcgtatttggaggcactcagccttgaagttgctgccgaaatgcgccgcttggaggaagaagtattccgtttagcaggccactcctttaaccttaattctcgcgatcagttagaacgtgtgttgttcgatgaacttggtctccctcctatcggcaagacagagaagaccggtaaacgtagcacttcagcggcggttttagaagctcttcgcgaagtccatcccattgtggacaagatcttgcagtaccgcgaactcgcgaaattgaaaggcacctatattgaccctcttccggcattagtccacccgaaaacgggacgcctccatacccgcttcaaccaaacagccacggcgaccggtcgtttgtcctcctctgatccaaaccttcagaatattccagtacgtaccccattgggccagaagatccgcaaagcgtttgtagctgaggagggttggcgtttagtggccctcgattatagccaaattgaattacgtgtccttgcccatctttctggcgatgagaacctcatccgcgtgtttcaggaaggccgcgacattcacactcaaacggcaagctggatgtttggattatcgccggaagcgatcgatcctttgatgcgtcgtgcagcgaagaccatcaatttcggtgttctctacggtatgagtgcccatcgtttgtcgcaggaattaggcattccctatgaagaagctgcggcgttcattcagcgctactttcaaagctatcccaaagttaaagcatggatcgagaagactctcgaagaaggccgcacacgtggttacgtagagaccttatttggacgtcgccgctatgttcccgatttaaacgctcgcgtgaaatctgtccgtgaagccgccgaacgcatggcgttcaacatgcctgtacagggcacggcagctgacctcatgaaacttgcaatggtgcgcctttttccacaattgcgtgaagttggtgcccgcatgctcttgcaggtccacgatgaactcttgttagaagcgccaaaagagcgtgcggaagaggtggcagccctcgcgaaagaggttatggaaggcgtgtggcccttagcggtgcctcttgaagtcgaagttggtattggcgaggattggttggctgccaaaggataatga

SEQ ID NO: 172 - protein, 841 aa, synthetic construct
  REGION 1..841: note = Variant of DNA polymerase I from Thermus sp. strain 2.9
MHHHHHHGGSGMLPLFEPKGRVLLVDGHHLAYRNFFALKGLTTSRGEPVQGVYGFAKSLLKALKEDGDVVIVVFDAKAPSFRHEAYEAYKAGRAPTPEDFPRQLALMKELVDLLGLERLEVPGFEADDVLATLAKKAEREGYEVQILTADRDLFQLLSPRVSVLHPEGHRITPEWLWEKYGLRPEQWVDFRALAGDPSDNIPGVKGIGEKTALKLLKEWGSLENLLKNLDQVKPASVREKILAHLEDLKLSRELSRVRTDLPLEVDFRGRREPDWEGLKAFLERLEFGSLLHEFGLLESPLPAEEAPWPPPEGAFLGYVLSRPEPMWAELLALAASAQGRVYRAEDPHGALRGLKEVRGLLAKDLAVVALREGLDLPPTDDPMLLAYLLDPSNTTPEGVARRYGGEWTEDAGERALLAERLHANLLGRLQGEERLLWLYEEVEKPLSRVLAHMEATGVKLDVAYLEALSLEVAAEMRRLEEEVFRLAGHSFNLNSRDQLERVLFDELGLPPIGKTEKTGKRSTSAAVLEALREVHPIVDKILQYRELAKLKGTYIDPLPALVHPKTGRLHTRFNQTATATGRLSSSDPNLQNIPVRTPLGQKIRKAFVAEEGWRLVALDYSQIELRVLAHLSGDENLIRVFQEGRDIHTQTASWMFGLSPEAIDPLMRRAAKTINFGVLYGMSAHRLSQELGIPYEEAAAFIQRYFQSYPKVKAWIEKTLEEGRTRGYVETLFGRRRYVPDLNARVKSVREAAERMAFNMPVQGTAADLMKLAMVRLFPQLREVGARMLLQVHDELLLEAPKERAEEVAALAKEVMEGVWPLAVPLEVEVGIGEDWLAAKG

SEQ ID NO: 173 - DNA, 2529 bp, synthetic construct
  misc_feature 1..2529: note = Variant of DNA polymerase I from Thermus sp. strain 2.9
  source 1..2529: mol_type = other DNA
atgcaccatcatcatcatcatggcggtagcggcatgttaccgttgttcgaacctaaaggtcgcgtgcttctggttgatggccatcatctcgcgtatcgtaacttctttgccctgaaaggattaaccaccagccgtggcgagccggtacagggtgtctacggctttgcaaagtcgctcctgaaagctctgaaagaagacggtgatgtggtgattgttgtctttgatgcgaaagcgccaagttttcgccacgaagcgtacgaagcttacaaagccgggcgtgctccaacgccggaagactttcctcgccaattggcgcttatgaaggaattagtggatttgcttggcctcgaacgcttggaagttcccggtttcgaggcagacgacgtattagcgactctcgcaaagaaagccgaacgtgagggctatgaagtccagatcttgacagcagatcgcgatcttttccagcttttatctccgcgcatttccgtgttacacccggaagggcatcgtatcaccccggaatggctctgggagaaatatggtttgcgtcccgaacaatgggtggattttcgcgccttagcgggcgatccgagcgacaatattccgggagttaaaggtatcggcgagaagacggcgctcaagctccttaaagaatgggggtcgttggagaacttgcttaagaatttagatcaggtcaaaccagcttcagtgcgtgagaagattcttgcacacctcgaagacctcaaattaagccgcgaattgtcccgtgtacgcaccgatttgccgctcgaagttgatttccgtggccgccgcgaacctgactgggagggtcttaaagcgtttttagagcgtcttgaatttggttcgctcttgcatgaattcggccttttagaaagcccgttaccagccgaagaagcaccttggccaccgcccgaaggcgcgtttttaggttaccgtttgagtcgcccggaaccgatgtgggccgaattattggctcttgcagcgtctgcccagggacgtgtgtatcgcgcggaagaccctcatggtgcgctccgtggcctcaaagaagtccgtggactccttgccaaagacttagctgttgttgcattgcgcgaaggtcttgatttacctccgactgatgatccaatgcttcttgcgtacctcttggacccgtcaaacacgacgcccgaaggcgtagcccgtcgttacggcggcgagtggaccgaagatgcaggtgagcgcgcgttattggccgaacgtttgcacgccaatttattaggacgtttgcaaggcgaggaacgtctcctctggctttacgaagaagtggagaaaccattgagtcgcgtgctcgcgcatatggaagctaccggtgtcaaattagacgtggcgtatttggaggcactcagccttgaagttgctgccgaaatgcgccgcttggaggaagaagtattcaaattagcaggccactcctttaaccttaattctcgcgatcagttagaacgtgtgttgttcgatgaacttggtctccctcctatcggcaagacagagaagaccggtaaacgtagcacttcagcggcggttttagaagctcttcgcgaagtccatcccattgtggacaagatcttgcagtaccgcgaactcgcgaaattgaaaggcacctatattgaccctcttccggcattagtccacccgaaaacgggacgcctccatacccgcttcaaccaaacagccacggcgaccggtcgtttgtcctcctctgatccaaaccttcagaatattccagtacgtaccccattgggccagaagatccgcaaagcgtttgtagctgaggagggttggcgtttagtggccctcgattatagccaaattgaattacgtgtccttgcccatctttctggcgatgagaacctcatccgcgtgtttcaggaaggccgcgacattcacactcaaacggcaagctggatgtttggattatcagctgaagcgatcgatcctttgatgcgtcgtgcagcgaagaccatcaatttcggtgttctctacggtatgagtgcccatcgtttgtcgcaggaattaggcattccctatgaagaagctgcggcgttcattcagcgctactttcaaagctatcccaaagttaaagcatggatcgagaagactctcgaagaaggccgcacacgtggttacgtagagaccttatttggacgtcgccgctatgttcccgatttaaacgctcgcgtgaaatctgtccgtgaagccgccgaacgcatggcgttcaacatgcctgtacagggcacggcagctgacctcatgaaacttgcaatggtgcgcctttttccacaattgcgtgaagttggtgcccgcatgctcttgcaggtccacgatgaactcttgttagaagcgccaaaagagcgtgcggaagaggtggcagccctcgcgaaagaggttatggaaggcgtgtggcccttagcggtgcctcttgaagtcgaagttggtattggcgaggattggttggctgccaaaggataatga

SEQ ID NO: 174 - protein, 841 aa, synthetic construct
  REGION 1..841: note = Variant of DNA polymerase I from Thermus sp. strain 2.9
MHHHHHHGGSGMLPLFEPKGRVLLVDGHHLAYRNFFALKGLTTSRGEPVQGVYGFAKSLLKALKEDGDVVIVVFDAKAPSFRHEAYEAYKAGRAPTPEDFPRQLALMKELVDLLGLERLEVPGFEADDVLATLAKKAEREGYEVQILTADRDLFQLLSPRISVLHPEGHRITPEWLWEKYGLRPEQWVDFRALAGDPSDNIPGVKGIGEKTALKLLKEWGSLENLLKNLDQVKPASVREKILAHLEDLKLSRELSRVRTDLPLEVDFRGRREPDWEGLKAFLERLEFGSLLHEFGLLESPLPAEEAPWPPPEGAFLGYRLSRPEPMWAELLALAASAQGRVYRAEDPHGALRGLKEVRGLLAKDLAVVALREGLDLPPTDDPMLLAYLLDPSNTTPEGVARRYGGEWTEDAGERALLAERLHANLLGRLQGEERLLWLYEEVEKPLSRVLAHMEATGVKLDVAYLEALSLEVAAEMRRLEEEVFKLAGHSFNLNSRDQLERVLFDELGLPPIGKTEKTGKRSTSAAVLEALREVHPIVDKILQYRELAKLKGTYIDPLPALVHPKTGRLHTRFNQTATATGRLSSSDPNLQNIPVRTPLGQKIRKAFVAEEGWRLVALDYSQIELRVLAHLSGDENLIRVFQEGRDIHTQTASWMFGLSAEAIDPLMRRAAKTINFGVLYGMSAHRLSQELGIPYEEAAAFIQRYFQSYPKVKAWIEKTLEEGRTRGYVETLFGRRRYVPDLNARVKSVREAAERMAFNMPVQGTAADLMKLAMVRLFPQLREVGARMLLQVHDELLLEAPKERAEEVAALAKEVMEGVWPLAVPLEVEVGIGEDWLAAKG

SEQ ID NO: 175 - DNA, 2529 bp, synthetic construct
  misc_feature 1..2529: note = Variant of DNA polymerase I from Thermus sp. strain 2.9
  source 1..2529: mol_type = other DNA
atgcaccatcatcatcatcatggcggtagcggcatgttaccgttgttcgaacctaaaggtcgcgtgcttctggttgatggccatcatctcgcgtatcgtaacttctttgccctgaaaggattaaccaccagccgtggcgagccggtacagggtgtctacggctttgcaaagtcgctcctgaaagctctgaaagaagacggtgatgtggtgattgttgtctttgatgcgaaagcgccaagttttcgccacgaagcgtacgaagcttacaaagccgggcgtgctccaacgccggaagactttcctcgccaattggcgcttatgaaggaattagtggatttgcttggcctcgaacgcttggaagttcccggtttcgaggcagacgacgtattagcgactctcgcaaagaaagccgaacgtgagggctatgaagtccagatcttgacagcagatcgcgatcttttccagcttttatctccgcgcatttccgtgttacacccggaagggcatctgatcaccccggaatggctctgggagaaatatggtttgcgtcccgaacaatgggtggattttcgcgccttagcaggcgatccgagcgacaatattccgggagttaaaggtatcggcgagaagacggcgctcaagctccttaaagaatgggggtcgttggagaacttgcttaagaatttagatcaggtcaaaccagagtcagtgcgtgagaagattcttgcacacctcgaagacctcaaattaagccgcgaattgtcccgtgtacgcaccgatttgccgctcgaagttgatttccgtggccgccgcgaacctgactgggagggtcttaaagcgtttttagagcgtcttgaatttggttcgctcttgcatgaattcggccttttagaaagcccgttaccagccgaagaagcaccttggccaccgcccgaaggcgcgtttttaggttaccgtttgagtcgcccggaaccgatgtgggccgaattattggctcttgcagcgtctgcccagggacgtgtgtatcgcgcggaagaccctcatggtgcgctcaaaggcctcaaagaagtccgtggactccttgccaaagacttagctgttgttgcattgcgcgaaggtcttgatttacctccgactgatgatccaatgcttcttgcgtacctcttggacccgtcaaacacgacgcccgaaggcgtagcccgtcgttacggcggcgagtggaccgaagatgcaggcgagcgcgcgttattggccgaacgtttgcacgccaatttattaggacgtttgcaaggcgaggaacgtctcctctggctttacgaagaagtggagaaaccattgagtcgcgtgctcgcgcatatggaagctaccggtgtcaaattagacgtggcgtatttggaggcactcagccttgaagttgctgccgaaatgcgccgcttggaggaagaagtattccgtttagcaggccactcctttaaccttaattctcgcgatcagttagaacgtgtgttgttcgatgaacttggtctccctcctatcggcaagacagagaagaccggtaaacgtagcacttcagcggcggttttagaagctcttcgcgaagtccatcccattgtggacaagatcttgcagtaccgcgaactcgcgaaattgaaaggcacctatattgaccctcttccggcattagtccacccgaaaacgggacgcctccatacccgcttcaaccaaacagccacggcgaccggtcgtttgtcctcctctgatccaaaccttcagaatattccagtacgtaccccattgggccagaagatccgcaaagcgtttgtagctgaggagggttggcgtttagtggccctcgattatagccaaattgaattacgtgtccttgcccatctttctggcgatgagaacctcatccgcgtgtttcaggaaggccgtgacattcacactcaaacggcaagctggatgtttggattatcagctgaagcgatcgatcctttgatgcgtcgtgcagcgaagaccgttaatttcggtgttctctacggtatgagtgcccatcgtttgtcgcaggaattaggcattccctatgaagaagctgtggcgttcattcagcgctactttcaaagctatcccaaagttaaagcatggatcgagaagactctcgaagaaggccgcacacgtggttacgtagagaccttatttggacgtcgccgctatgttcccgatttaaacgctcgcgtgaaatctgtccgtgaagccgccgaacgcatggcgttcaacatgcctgtacagggcacggcagctgacctcatgaaacttgcaatggtgcgcctttttccacaattgcgtgaagttggtgcccgcatgctcttgcaggtccacgatgaactcttgttagaagcgccaaaagagcgtgcggaagaggtggcagccctcgcgaaagaggttatggaaggcgtgtggcccttagcggtgcctcttgaagtcgaagttggtattggcgaggattggttggctgccaaaggataatga

SEQ ID NO: 176 - protein, 841 aa, synthetic construct
  REGION 1..841: note = Variant of DNA polymerase I from Thermus sp. strain 2.9
MHHHHHHGGSGMLPLFEPKGRVLLVDGHHLAYRNFFALKGLTTSRGEPVQGVYGFAKSLLKALKEDGDVVIVVFDAKAPSFRHEAYEAYKAGRAPTPEDFPRQLALMKELVDLLGLERLEVPGFEADDVLATLAKKAEREGYEVQILTADRDLFQLLSPRISVLHPEGHLITPEWLWEKYGLRPEQWVDFRALAGDPSDNIPGVKGIGEKTALKLLKEWGSLENLLKNLDQVKPESVREKILAHLEDLKLSRELSRVRTDLPLEVDFRGRREPDWEGLKAFLERLEFGSLLHEFGLLESPLPAEEAPWPPPEGAFLGYRLSRPEPMWAELLALAASAQGRVYRAEDPHGALKGLKEVRGLLAKDLAVVALREGLDLPPTDDPMLLAYLLDPSNTTPEGVARRYGGEWTEDAGERALLAERLHANLLGRLQGEERLLWLYEEVEKPLSRVLAHMEATGVKLDVAYLEALSLEVAAEMRRLEEEVFRLAGHSFNLNSRDQLERVLFDELGLPPIGKTEKTGKRSTSAAVLEALREVHPIVDKILQYRELAKLKGTYIDPLPALVHPKTGRLHTRFNQTATATGRLSSSDPNLQNIPVRTPLGQKIRKAFVAEEGWRLVALDYSQIELRVLAHLSGDENLIRVFQEGRDIHTQTASWMFGLSAEAIDPLMRRAAKTVNFGVLYGMSAHRLSQELGIPYEEAVAFIQRYFQSYPKVKAWIEKTLEEGRTRGYVETLFGRRRYVPDLNARVKSVREAAERMAFNMPVQGTAADLMKLAMVRLFPQLREVGARMLLQVHDELLLEAPKERAEEVAALAKEVMEGVWPLAVPLEVEVGIGEDWLAAKG

SEQ ID NO: 177 - DNA, 2529 bp, synthetic construct
  misc_feature 1..2529: note = Variant of DNA polymerase I from Thermus sp. strain 2.9
  source 1..2529: mol_type = other DNA
atgcaccatcatcatcatcatggcggtagcggcatgttaccgttgttcgaacctaaaggtcgcgtgcttctggttgatggccatcatctcgcgtatcgtaacttctttgccctgaaaggattaaccaccagccgtggcgagccggtacagggtgtctacggctttgcaaagtcgctcctgaaagctctgaaagaagacggtgatgtggtgattgttgtctttgatgcgaaagcgccaagttttcgccacgaagcgtacgaagcttacaaagccgggcgtgctccaacgccggaagactttcctcgccaattggcgcttatgaaggaattagtggatttgcttggcctcgaacgcttggaagttcccggtttcgaggcagacgacgtattagcgactctcgcaaagaaagccgaacgtgagggctatgaagtccagatcttgacagcagatcgcgatcttttccagcttttatctccgcgcatctcggtgttacacccggaagggcatcgtatcaccccggaatggctctgggagaaatatggtttgcgtcccgaacaatgggtggattttcgcgccttagcaggcgatccgagcgacaatattccgggagttaaaggtatcggcgagaagacggcgctcaagctccttaaagaatgggggtcgttggagaacttgcttaagaatttagatcaggtcaaaccagagtcagtgcgtgagaagattcttgcacacctcgaagacctcaaattaagccgcgaattgtcccgtgtacgcaccgatttgccgctcgaagttgatttccgtggccgccgcgaacctgactgggagggtcttaaagcgtttttagagcgtcttgaatttggttcgctcttgcatgaattcggccttttagaaagcccgttaccagccgaagaagcaccttggccaccgcccgaaggcgcgtttttaggttaccgtttgagtcgcccggaaccgatgtgggccgaattattggctcttgcagcgtctgcccagggacgtgtgtatcgcgcggaagaccctcatggtgcgctccgcggcctcaaagaagtccgtggactccttgccaaagacttagctgttgttgcattgcgcgaaggtcttgatttacctccgactgatgatccaatgcttcttgcgtacctcttggacccgtcaaacacgacgcccgaaggcgtagcccgtcgttacggcggcgagtggaccgaagatgcaggcgagcgcgcgttattggccgaacgtttgcacgccaatttattaggacgtttgcaaggcgaggaacgtctcctctggctttacgaagaagtggagaaaccattgagtcgcgtgctcgcgcatatggaagctaccggtgtcaaattagacgtggcgtatttggaggcactcagccttgaagttgctgccgaaatgcgccgcttggaggaagaagtattccgtttagcaggccactcctttaaccttaattctcgcgatcagttagaacgtgtgttgttcgatgaacttggtctccctcctatcggcaagacagagaagaccggtaaacgtagcacttcagcggcggttttagaagctcttcgcgaagtccatcccattgtggacaagatcttgcagtaccgcgaactcgcgaaattgaaaggcacctatattgaccctcttccggcattagtccacccgaaaacgggacgcctccatacccgcttcaaccaaacagccacggcgaccggtcgtttgtcctcctctgatccaaaccttcagaatattccagtacgtaccccattgggccagaagatccgccgcgcgtttgtagctgaggagggttggcgtttagtggccctcgattatagccaaattgaattacgtgtccttgcccatctttctggcgatgagaacctcatccgcgtgtttcaggaaggcaaagacattcacactcaaacggcaagctggatgtttggattatcagctgaagcgatcgatcctttgatgcgtcgtgcagcgaagaccatcaatttcggtgttctctacggtatgagtgcccatcgtttgtcgcaggaattaggcattccctatgaagaagctgcggcgttcattcagcgctactttcaaagctatcccaaagttaaagcatggatcgagaagactctcgaagaaggccgcacacgtggttacgtagagaccttatttggacgtcgccgctatgttcccgatttaaacgctcgcgtgaaatctgtccgtgaagccgccgaacgcatggcgttcaacatgcctgtacagggcacggcagctgacctcatgaaacttgcaatggtgcgcctttttccacaattgcgtgaagttggtgcccgcatgctcttgcaggtccacgatgaactcttgttagaagcgccaaaagagcgtgcggaagaggtggcagccctcgcgaaagaggttatggaaggcgtgtggcccttagcggtgcctcttgaagtcgaagttggtattggcgaggattggttggctgccaaaggataatga

SEQ ID NO: 178 - protein, 841 aa, synthetic construct
  REGION 1..841: note = Variant of DNA polymerase I from Thermus sp. strain 2.9
MHHHHHHGGSGMLPLFEPKGRVLLVDGHHLAYRNFFALKGLTTSRGEPVQGVYGFAKSLLKALKEDGDVVIVVFDAKAPSFRHEAYEAYKAGRAPTPEDFPRQLALMKELVDLLGLERLEVPGFEADDVLATLAKKAEREGYEVQILTADRDLFQLLSPRISVLHPEGHRITPEWLWEKYGLRPEQWVDFRALAGDPSDNIPGVKGIGEKTALKLLKEWGSLENLLKNLDQVKPESVREKILAHLEDLKLSRELSRVRTDLPLEVDFRGRREPDWEGLKAFLERLEFGSLLHEFGLLESPLPAEEAPWPPPEGAFLGYRLSRPEPMWAELLALAASAQGRVYRAEDPHGALRGLKEVRGLLAKDLAVVALREGLDLPPTDDPMLLAYLLDPSNTTPEGVARRYGGEWTEDAGERALLAERLHANLLGRLQGEERLLWLYEEVEKPLSRVLAHMEATGVKLDVAYLEALSLEVAAEMRRLEEEVFRLAGHSFNLNSRDQLERVLFDELGLPPIGKTEKTGKRSTSAAVLEALREVHPIVDKILQYRELAKLKGTYIDPLPALVHPKTGRLHTRFNQTATATGRLSSSDPNLQNIPVRTPLGQKIRRAFVAEEGWRLVALDYSQIELRVLAHLSGDENLIRVFQEGKDIHTQTASWMFGLSAEAIDPLMRRAAKTINFGVLYGMSAHRLSQELGIPYEEAAAFIQRYFQSYPKVKAWIEKTLEEGRTRGYVETLFGRRRYVPDLNARVKSVREAAERMAFNMPVQGTAADLMKLAMVRLFPQLREVGARMLLQVHDELLLEAPKERAEEVAALAKEVMEGVWPLAVPLEVEVGIGEDWLAAKG

SEQ ID NO: 179 - DNA, 2529 bp, synthetic construct
  misc_feature 1..2529: note = Variant of DNA polymerase I from Thermus sp. strain 2.9
  source 1..2529: mol_type = other DNA
atgcaccatcatcatcatcatggcggtagcggcatgttaccgttgttcgaacctaaaggtcgcgtgcttctggttgatggccatcatctcgcgtatcgtaacttctttgccctgaaaggattaaccaccagccgtggcgagccggtacagggtgtctacggctttgcaaagtcgctcctgaaagctctgaaagaagacggtgatgtggtgattgttgtctttgatgcgaaagcgccaagttttcgccacgaagcgtacgaagcttacaaagccgggcgtgctccaacgccggaagactttcctcgccaattggcgcttatgaaggaattagtggatttgcttggcctcgaacgcttggaagttcccggtttcgaggcagacgacgtattagcgactctcgcaaagaaagccgaacgtgagggctatgaagtccagatcttgacagcagatcgcgatcttttccagcttttatctccgcgcatttccgtgttacacccggaagggcatcgtatcaccccggaatggctctgggagaaatatggtttgcgtcccgaacaatgggtggattttcgcgccttagcgggcgatccgagcgacaatattccgggagttaaaggtatcggcgagaagacggcgctcaagctccttaaagaatgggggtcgttggagaacttgcttaagaatttagatcaggtcaaaccagcttcagtgcgtgagaagattcttgcacacctcgaagacctcaaattaagccgcgaattgtcccgtgtacgcaccgatttgccgctcgaagttgatttccgtggccgccgcgaacctgactgggagggtcttaaagcgtttttagagcgtcttgaatttggttcgctcttgcatgaattcggccttttagaaagcccgttaccagccgaagaagcaccttggccaccgcccgaaggcgcgtttttaggttaccgtttgagtcgcccggaaccgatgtgggccgaattattggctcttgcagcgtctgcccagggacgtgtgtatcgcgcggaagaccctcatggtgcgctccgtggcctcaaagaagtcaatggactccttgccaaagacttagctgttgttgcattgcgcgaaggtcttgatttacctccgactgatgatccaatgcttcttgcgtacctcttggacccgtcaaacacgacgcccgaaggcgtagcccgtcgttacggcggcgagtggaccgaagatgcaggtgagcgcgcgttattggccgaacgtttgcacgccaatttattaggacgtttgcaaggcgaggaacgtctcctctggctttacgaagaagtggagaaaccattgagtcgcgtgctcgcgcatatggaagctaccggtgtcaaattagacgtggcgtatttggaggcactcagccttgaagttgctgccgaaatgcgccgcttggaggaagaagtattccgtttagcaggccactcctttaaccttaattctcgcgatcagttagaacgtgtgttgttcgatgaacttggtctccctcctatcggcaagacagagaagaccggtaaacgtagcacttcagcggcggttttagaagctcttcgcgaagtccatcccattgtggacaagatcttgcagtaccgcgaactcgcgaaattgaaaggcacctatattgaccctcttccggcattagtccacccgaaaacgggacgcctccatacccgcttcaaccaaacagccacggcgaccggtcgtttgtcctcctctgatccaaaccttcagaatattccagtacgtaccccattgggccagaagatccgcaaagcgtttgtagctgaggagggttggcgtttagtggccctcgattatagccaaattgaattacgtgtccttgcccatctttctggcgatgagaacctcatccgcgtgtttcaggaaggccgcgacattcacactcaaacggcaagctggatgtttggattatcagctgaagcgatcgatcctttgatgcgtcgtgcagcgaagaccatcaatttcggtgttctctacggtatgagtgcccatcgtttgtcgcaggaattaggcattccctatgaagaagctgcggcgttcattcagcgctactttcaaagctatcccaaagttaaagcatggatcgagaagactctcgaagaaggccgcacacgtggttacgtagagaccttatttggacgtcgccgctatgttcccgatttaaacgctcgcgtgaaatctgtccgtgaagccgccgaacgcatggcgttcaacatgcctgtacagggcacggcagctgacctcatgaaacttgcaatggtgcgcctttttccacaattgcgtgaagttggtgcccgcatgctcttgcaggtccacgatgaactcttgttagaagcgccaaaagagcgtgcggaagaggtggcagccctcgcgaaagaggttatggaaggcgtgtggcccttagcggtgcctcttgaagtcgaagttggtattggcgaggattggttggctgccaaaggataatga

SEQ ID NO: 180 - protein, 841 aa, synthetic construct
  REGION 1..841: note = Variant of DNA polymerase I from Thermus sp. strain 2.9
MHHHHHHGGSGMLPLFEPKGRVLLVDGHHLAYRNFFALKGLTTSRGEPVQGVYGFAKSLLKALKEDGDVVIVVFDAKAPSFRHEAYEAYKAGRAPTPEDFPRQLALMKELVDLLGLERLEVPGFEADDVLATLAKKAEREGYEVQILTADRDLFQLLSPRISVLHPEGHRITPEWLWEKYGLRPEQWVDFRALAGDPSDNIPGVKGIGEKTALKLLKEWGSLENLLKNLDQVKPASVREKILAHLEDLKLSRELSRVRTDLPLEVDFRGRREPDWEGLKAFLERLEFGSLLHEFGLLESPLPAEEAPWPPPEGAFLGYRLSRPEPMWAELLALAASAQGRVYRAEDPHGALRGLKEVNGLLAKDLAVVALREGLDLPPTDDPMLLAYLLDPSNTTPEGVARRYGGEWTEDAGERALLAERLHANLLGRLQGEERLLWLYEEVEKPLSRVLAHMEATGVKLDVAYLEALSLEVAAEMRRLEEEVFRLAGHSFNLNSRDQLERVLFDELGLPPIGKTEKTGKRSTSAAVLEALREVHPIVDKILQYRELAKLKGTYIDPLPALVHPKTGRLHTRFNQTATATGRLSSSDPNLQNIPVRTPLGQKIRKAFVAEEGWRLVALDYSQIELRVLAHLSGDENLIRVFQEGRDIHTQTASWMFGLSAEAIDPLMRRAAKTINFGVLYGMSAHRLSQELGIPYEEAAAFIQRYFQSYPKVKAWIEKTLEEGRTRGYVETLFGRRRYVPDLNARVKSVREAAERMAFNMPVQGTAADLMKLAMVRLFPQLREVGARMLLQVHDELLLEAPKERAEEVAALAKEVMEGVWPLAVPLEVEVGIGEDWLAAKG

SEQ ID NO: 181 - DNA, 2529 bp, synthetic construct
  misc_feature 1..2529: note = Variant of DNA polymerase I from Thermus sp. strain 2.9
  source 1..2529: mol_type = other DNA
atgcaccatcatcatcatcatggcggtagcggcatgttaccgttgttcgaacctaaaggtcgcgtgcttctggttgatggccatcatctcgcgtatcgtaacttctttgccctgaaaggattaaccaccagccgtggcgagccggtacagggtgtctacggctttgcaaagtcgctcctgaaagctctgaaagaagacggtgatgtggtgattgttgtctttgatgcgaaagcgccaagttttcgccacgaagcgtacgaagcttacaaagccgggcgtgctccaacgccggaagactttcctcgccaattggcgcttatgaaggaattagtggatttgcttggcctcgaacgcttggaagttcccggtttcgaggcagacgacgtattagcgactctcgcaaagaaagccgaacgtgagggctatgaagtccatatcttgacagcagatcgcgatcttttccagcttttatctccgcgcatttccgtgttacacccggaagggcatcgtatcaccccggaatggctctgggagaaatatggtttgcgtcccgaacaatgggtggattttcgcgccttagcgggcgatccgagcgacaatattccgggagttaaaggtatcggcgagaagacggcgctcaagctccttaaagaatgggggtcgttggagaacttgcttaagaatttagatcaggtcaaaccagcttcagtgcgtgagaagattcttgcacacctcgaagacctcaaattaagccgcgaattgtcgcgtgtacgcaccgatttgccgctcgaagttgatttccgtggccgccgcgaacctgactgggagggtcttaaagcgtttttagagcgtcttgaatttggttcgctcttgcatgaattcggccttttagaaagcccgttaccagccgaagaagcaccttggccaccgcccgaaggcgcgtttttaggttaccgtttgagtcgcccggaaccgatgtgggccgaattattggctcttgcagcgtctgcccagggacgtgtgtatcgcgcggaagaccctcatggtgcgctccgtggcctcaaagaagtccgtggactccttgccaaagacttagctgttgttgcattgcgcgaaggtcttgatttacctccgactgatgatccaatgcttcttgcgtacctcttggactcgtcaaacacgacgcccgaaggcgtagcccgtcgttacggcggcgagtggaccgaagatgcaggtgagcgcgcgttattggccgaacgtttgcacgccaatttattaggacgtttgcaaggcgaggaacgtctcctctggctttacgaagaagtggagaaaccattgagtcgcgtgctcgcgcatatggaagctaccggtgtcaaattagacgtggcgtatttggaggcactcagccttgaagccgctgccgaactgcgccgcttggaggaagaagtattccgtttagcaggccactcctttaaccttaattctcgcgatcagttagaacgtgtgttgttcgatgaacttggtctccctcctatcggcaagacagagaagaccggtaaacgtagcacttcagcggcggttttagaagctcttcgcgaagtccatcccattgtggacaagatcttgcagtaccgcgaactcgcgaaattgaaaggcacctatattgaccctcttccggcattagtccacccgaaaacgggacgcctccatacccgcttcaaccaaacagccacggcgaccggtcgtttgtcctcctctgatccaaaccttcagaatattccagtacgtaccccattgggccagaaaatccgcaaagcgtttgtagctgaggagggttggcgtttagtggccctcgattatagccaaattgaattacgtgtccttgcccatctttctggcgatgagaacctcatccgcgtgtttcaggaaggccgcgacattcacactcaaacggcaagctggatgtttggattatcagctgaagcgatcgatcctttgatgcgtcgtgcagcgaagaccatcaatttcggtgttctctacggtatgagtgcccatcgtttgtcgcaggaattaggcattccctatgaagaagctgcggcgttcattcagcgctactttcaaagctatcccaaagttaaagcatggatcgagaagactctcgaagaaggccgcacacgtggttacgtagagaccttatttggacgtcgccgctatgttcccgatttaaacgctcgcgtgaaatctgtccgtgaagccgccgaacgcatggcgtggaacatgcctgtacagggcacggcagctgacctcatgaaacttgcaatggtgcgcctttttccacaattgcgtgaagttggtgcccgcatgctcttgcaggtccacgatgaactcttgttagaagcgccaaaagagcgtgcggaagaggtggcagccctcgcgaaagaggttatggaaggcgtgtggcccttagcggtgcctcttgaagtcgaagttggtattggcgaggattggttggctgccaaaggataatga

SEQ ID NO: 182 - protein, 841 aa, synthetic construct
  REGION 1..841: note = Variant of DNA polymerase I from Thermus sp. strain 2.9
MHHHHHHGGSGMLPLFEPKGRVLLVDGHHLAYRNFFALKGLTTSRGEPVQGVYGFAKSLLKALKEDGDVVIVVFDAKAPSFRHEAYEAYKAGRAPTPEDFPRQLALMKELVDLLGLERLEVPGFEADDVLATLAKKAEREGYEVHILTADRDLFQLLSPRISVLHPEGHRITPEWLWEKYGLRPEQWVDFRALAGDPSDNIPGVKGIGEKTALKLLKEWGSLENLLKNLDQVKPASVREKILAHLEDLKLSRELSRVRTDLPLEVDFRGRREPDWEGLKAFLERLEFGSLLHEFGLLESPLPAEEAPWPPPEGAFLGYRLSRPEPMWAELLALAASAQGRVYRAEDPHGALRGLKEVRGLLAKDLAVVALREGLDLPPTDDPMLLAYLLDSSNTTPEGVARRYGGEWTEDAGERALLAERLHANLLGRLQGEERLLWLYEEVEKPLSRVLAHMEATGVKLDVAYLEALSLEAAAELRRLEEEVFRLAGHSFNLNSRDQLERVLFDELGLPPIGKTEKTGKRSTSAAVLEALREVHPIVDKILQYRELAKLKGTYIDPLPALVHPKTGRLHTRFNQTATATGRLSSSDPNLQNIPVRTPLGQKIRKAFVAEEGWRLVALDYSQIELRVLAHLSGDENLIRVFQEGRDIHTQTASWMFGLSAEAIDPLMRRAAKTINFGVLYGMSAHRLSQELGIPYEEAAAFIQRYFQSYPKVKAWIEKTLEEGRTRGYVETLFGRRRYVPDLNARVKSVREAAERMAWNMPVQGTAADLMKLAMVRLFPQLREVGARMLLQVHDELLLEAPKERAEEVAALAKEVMEGVWPLAVPLEVEVGIGEDWLAAKG

SEQ ID NO: 183 - DNA, 2529 bp, synthetic construct
  misc_feature 1..2529: note = Variant of DNA polymerase I from Thermus sp. strain 2.9
  source 1..2529: mol_type = other DNA
atgcaccatcatcatcatcatggcggtagcggcatgttaccgttgttcgaacctaaaggtcgcgtgcttctggttgatggccatcatctcgcgtatcgtaacttctttgccctgaaaggattaaccaccagccgtggcgagccggtacagggtgtctacggctttgcaaagtcgctcctgaaagctctgaaagaagacggtgatgtggtgattgttgtctttgatgcgaaagcgccaagttttcgccacgaagcgtacgaagcttacaaagccgggcgtgctccaacgccggaagactttcctcgccaattggcgcttatgaaggaattagtggatttgcttggcctcgaacgcttggaagttcccggtttcgaggcagacgacgtattagcgactctcgcaaagaaagccgaacgtgagggctatgaagtccagatcttgacagcagatcgcgatcttttccagcttttatctccgcgcatttccgtgttacacccggaagggcatcgtatcaccccggaatggctctgggagaaatatggtttgcgtcccgaacaatgggtggattttcgcgccttagcgggcgatccgagcgacaatattccgggagttaaaggtatcggcgagaagacggcgctcaagctccttaaagaatgggggtcgttggagaacttgcttaagaatttagatcaggtcaaaccagcttcagtgcgtgagaagattcttgcacacctcgaagacctcaaattaagccgcgaattggtccgtgtacgcaccgatttgccgctcgaagttgatttccgtggccgccgcgaacctgactgggagggtcttaaagcgtttttagagcgtcttgaatttggttcgctcttgcatgaattcggccttttagaaagcccgttaccagccgaagaagcaccttggccaccgcccgaaggcgcgtttttaggttaccgtttgagtcgcccggaaccgatgtgggccgaattattggctcttgcagcgtctgcccagggacgtgtgtatcgcgcggaagaccctcatggtgcgctccgtggcctcaaagaagtccgtggactccttgccaaagacttagctgttgttgcattgcgcgaaggtcttgatttacctccgactgatgatccaatgcttcttgcgtacctcttggacccgtcaaacacgacgcccgaacgcgtagcccgtcgttacggcggcgagtggaccgaagatgcaggtgagcgcgcgttattggccgaacgtttgcacgccaatttattaggacgtttgcaaggcgaggaacgtctcctctggctttacgaagaagtggagaaaccattgagtcgcgtgctcgcgcatatggaagctaccggtgtcaaattagacgtggcgtatttggaggcactcagccttgaagtcgctgccgaactgcgccgcttggaggaagaagtattccgtttagcaggccactcctttaaccttaattctcgcgatcagttagaacgtgtgttgttcgatgaacttggtctccctcctatcggtaagacagagaagaccggtaaacgtagcacttcagcggcggttttagaagctcttcgcgaagtccatcccattgtggacaagatcttgcagtaccgcgaactcgcgaaattgaaaggcacctatattgaccgtcttccggcattagtccacccgaaaacgggacgcctccatacccgcttcaaccaaacagccacggcgaccggtcgtttgtcctcctctgatccaaaccttcagaatattccagtacgtaccccattgggccagaaaatccgcaaagcgtttgtagctgaggagggttggcgtttagtggccctcgattatagccaaattgaattacgtgtccttgcccatctttctggcgatgagaacctcatccgcgtgtttcaggaaggccgcgacattcacactcaaacggcaagctggatgtttggagtgtcatcggaagcgatcgatcctttgatgcgtcgtgcagcgaagaccatcaatttcggtgttctctacggtatgagtgccgcgcgtttgtcgcaggaattaggcattccctatgaagaagctgcggcgttcattcagcgctactttcaaagctatcccaaagttaaagcatggatcgagaagactctcgaagaaggccgcacacgtggttacgtagagaccttatttggacgtcgccgctatgttcccgatttaaacgctcgcgtgaaatctgtccgtgaagccgccgaacgcatggcgttcaacatgcctgtacagggcacggcagctgacctcatgaaacttgcaatggtgcgcctttttccacaattgcgtgaagttggtgcccgcatgctcttgcaggtccacgatgaactcttgttagaagcgccaaaagagcgtgcggaagaggtggcagccctcgcgaaagaggttatggaaggcgtgtggcccttagcggtgcctcttgaagtcgaagttggtattggcgaggattggttggctgccaaaggataatga

SEQ ID NO: 184 - protein, 841 aa, synthetic construct
  REGION 1..841: note = Variant of DNA polymerase I from Thermus sp. strain 2.9
MHHHHHHGGSGMLPLFEPKGRVLLVDGHHLAYRNFFALKGLTTSRGEPVQGVYGFAKSLLKALKEDGDVVIVVFDAKAPSFRHEAYEAYKAGRAPTPEDFPRQLALMKELVDLLGLERLEVPGFEADDVLATLAKKAEREGYEVQILTADRDLFQLLSPRISVLHPEGHRITPEWLWEKYGLRPEQWVDFRALAGDPSDNIPGVKGIGEKTALKLLKEWGSLENLLKNLDQVKPASVREKILAHLEDLKLSRELVRVRTDLPLEVDFRGRREPDWEGLKAFLERLEFGSLLHEFGLLESPLPAEEAPWPPPEGAFLGYRLSRPEPMWAELLALAASAQGRVYRAEDPHGALRGLKEVRGLLAKDLAVVALREGLDLPPTDDPMLLAYLLDPSNTTPERVARRYGGEWTEDAGERALLAERLHANLLGRLQGEERLLWLYEEVEKPLSRVLAHMEATGVKLDVAYLEALSLEVAAELRRLEEEVFRLAGHSFNLNSRDQLERVLFDELGLPPIGKTEKTGKRSTSAAVLEALREVHPIVDKILQYRELAKLKGTYIDRLPALVHPKTGRLHTRFNQTATATGRLSSSDPNLQNIPVRTPLGQKIRKAFVAEEGWRLVALDYSQIELRVLAHLSGDENLIRVFQEGRDIHTQTASWMFGVSSEAIDPLMRRAAKTINFGVLYGMSAARLSQELGIPYEEAAAFIQRYFQSYPKVKAWIEKTLEEGRTRGYVETLFGRRRYVPDLNARVKSVREAAERMAFNMPVQGTAADLMKLAMVRLFPQLREVGARMLLQVHDELLLEAPKERAEEVAALAKEVMEGVWPLAVPLEVEVGIGEDWLAAKG

SEQ ID NO: 185 - DNA, 2529 bp, synthetic construct
  misc_feature 1..2529: note = Variant of DNA polymerase I from Thermus sp. strain 2.9
  source 1..2529: mol_type = other DNA
atgcaccatcatcatcatcatggcggtagcggcatgttaccgttgttcgaacctaaaggtcgcgtgcttctggttgatggccatcatctcgcgtatcgtaacttctttgccctgaaaggattaaccaccagccgtggcgagccggtacagggtgtctacggctttgcaaagtcgctcctgaaagctctgaaagaagacggtgatgtggtgattgttgtctttgatgcgaaagcgccaagttttcgccacgaagcgtacgaagcttacaaagccgggcgtgctccaacgccggaagactttcctcgccaattggcgcttatgaaggaattagtggatttgcttggcctcgaacgcttggaagttcccggtttcgaggcagacgacgtattagcgactctcgcaaagaaagccgaacgtgagggctatgaagtccagatcttgacagcagatcgcgatcttttccagcttttatctccgcgcatttccgtgttacacccggaagggcatcgtatcaccccggaatggctctgggagaaatatggtttgcgtcccgaacaatgggtggattttcgcgccttagcgggcgatccgagcgacaatattccgggagttaaaggtatcggcgagaagacggcgctcaagctccttaaagaatgggggtcgttggagaacttgcttaagaatttagatcaggtcaaaccagcttcagtgcgtgagaagattcttgcacacctcgaagacctcaaattaagccgcgaattgtcccgtgtacgcaccgatttgccgctcgaagttgatttccgtggccgccgcgaacctgactgggagggtcttaaagcgtttttagagcgtcttgaatttggttcgctcttgcatgaattcggccttttagaaagcccgttaccagccgaagaagcaccttggccaccgcccgaaggcgcgtttttaggttaccgtttgagtcgcccggaaccgatgtgggccgaattattggctcttgcagcgtctgcccagggacgtgtgtatcgcgcggaagaccctcatggtgcgctccgtggcctcaaagaagtccgtggactccttgccaaagacttagctgttgttgcattgcgcgaaggtcttgatttacctccgactgatgatccaatgcttcttgcgtacctcttggacccgtcaaacacgacgcccgaaggcgtagcccgtcgttacggcggcgagtggaccgaagatgcaggtgagcgcgcgttattggccgaacgtttgcacgccaatttattaggacgtttgcaaggcgaggaacgtctcctctggctttacgaagaagtggagaaaccattgagtcgcgtgctcgcgcatatggaagctaccggtgtcaaattagacgtggcgtatttggaggcactcagccttgaagttgctgccgaaatgcgccgcttggaggaagaagtattccgtttagcaggccactcctttaaccttaattctcgcgatcagttagaacgtgtgttgttcgatgaacttggtctccctcctatcggcaagacagagaagaccggtaaacgtagcacttcagcggcggttttagaagctcttcgcgaagtccatcccattgtggacaagatcttgcagtaccgcgaactcgcgaaattgaaaggcacctatattgaccctcttccggcattagtccacccgaaaacgggacgcctccatacccgcttcaaccaaacagccacggcgaccggtcgtttgtcctcctctgatccaaaccttcagaatattccagtacgtaccccattgggccagaagatccgcaaagcgtttgtagctgaggagggttggcgtttagtggccctcgattatagccaaattgaattacgtgtccttgcccatctttctggcgatgagaacctcatccgcgtgtttcaggaaggccgcgacattcacactcaaacggcaagctggatgtttggattagaggctgaagcgatcgatcctttgatgcgtcgtgcagcgaagaccatcaatttcggtgttctctacggtatgagtgcccatcgtttgtcgcaggaattaggcattccctatgaagaagctgcggcgttcattcagcgctactttcaaagctatcccaaagttaaagcatggatcgagaagactctcgaagaaggccgcacacgtggttacgtagagaccttatttggacgtcgccgctatgttcccgatttaaacgctcgcgtgaaatctgtccgtgaagccgccgaacgcatggcgttcaacatgcctgtacagggcacggcagctgacctcatgaaacttgcaatggtgcgcctttttccacaattgcgtgaagttggtgcccgcatgctcttgcaggtccacgatgaactcttgttagaagcgccaaaagagcgtgcggaagaggtggcagccctcgcgaaagaggttatggaaggcgtgtggcccttagcggtgcctcttgaagtcgaagttggtattggcgaggattggttggctgccaaaggataatga

SEQ ID NO: 186 - protein, 841 aa, synthetic construct
  REGION 1..841: note = Variant of DNA polymerase I from Thermus sp. strain 2.9
MHHHHHHGGSGMLPLFEPKGRVLLVDGHHLAYRNFFALKGLTTSRGEPVQGVYGFAKSLLKALKEDGDVVIVVFDAKAPSFRHEAYEAYKAGRAPTPEDFPRQLALMKELVDLLGLERLEVPGFEADDVLATLAKKAEREGYEVQILTADRDLFQLLSPRISVLHPEGHRITPEWLWEKYGLRPEQWVDFRALAGDPSDNIPGVKGIGEKTALKLLKEWGSLENLLKNLDQVKPASVREKILAHLEDLKLSRELSRVRTDLPLEVDFRGRREPDWEGLKAFLERLEFGSLLHEFGLLESPLPAEEAPWPPPEGAFLGYRLSRPEPMWAELLALAASAQGRVYRAEDPHGALRGLKEVRGLLAKDLAVVALREGLDLPPTDDPMLLAYLLDPSNTTPEGVARRYGGEWTEDAGERALLAERLHANLLGRLQGEERLLWLYEEVEKPLSRVLAHMEATGVKLDVAYLEALSLEVAAEMRRLEEEVFRLAGHSFNLNSRDQLERVLFDELGLPPIGKTEKTGKRSTSAAVLEALREVHPIVDKILQYRELAKLKGTYIDPLPALVHPKTGRLHTRFNQTATATGRLSSSDPNLQNIPVRTPLGQKIRKAFVAEEGWRLVALDYSQIELRVLAHLSGDENLIRVFQEGRDIHTQTASWMFGLEAEAIDPLMRRAAKTINFGVLYGMSAHRLSQELGIPYEEAAAFIQRYFQSYPKVKAWIEKTLEEGRTRGYVETLFGRRRYVPDLNARVKSVREAAERMAFNMPVQGTAADLMKLAMVRLFPQLREVGARMLLQVHDELLLEAPKERAEEVAALAKEVMEGVWPLAVPLEVEVGIGEDWLAAKG

SEQ ID NO: 187 - DNA, 2529 bp, synthetic construct
  misc_feature 1..2529: note = Variant of DNA polymerase I from Thermus sp. strain 2.9
  source 1..2529: mol_type = other DNA
atgcaccatcatcatcatcatggcggtagcggcatgttaccgttgttcgaacctaaaggtcgcgtgcttctggttgatggccatcatctcgcgtatcgtaacttctttgccctgaaaggattaaccaccagccgtggcgagccggtacagggtgtctacggctttgcaaagtcgctcctgaaagctctgaaagaagacggtgatgtggtgattgttgtctttgatgcgaaagcgccaagttttcgccacgaagcgtacgaagcttacaaagccgggcgtgctccaacgccggaagactttcctcgccaattggcgcttatgaaggaattagtggatttgcttggcctcgaacgcttggaagttcccggtttcgaggcagacgacgtattagcgactctcgcaaagaaagccgaacgtgagggctatgaagtccagatcttgacagcagatcgcgatcttttccagcttttatctccgcgcatctcggtgttacacccggaagggcatcgcatcaccccggaatggctctgggagaaatatggtttgcgtcccgaacaatgggtggattttcgcgccttagcgggcgatccgagcgacaatattccgggagttaaaggtatcggcgagaagacggcgctcaagctccttaaagaatgggggtcgttggagaacttgcttaagaatttagatcaggtcaaaccagagtcagtgcgtgagaagattcttgcacacctcgaagacctcaaattaagcctggaattgtcccgtgtacgcaccgatttgccgctcgaagttgatttccgtcgccgccgcgaacctgactgggagggtcttaaagcgtttttagagcgtcttgaatttggttcgctcttgcatgaattcggccttttagaaagcccgttaccagccgaagaagcaccttggccaccgcccgaaggcgcgtttttaggttaccgtttgagtcgcccggaaccgatgtgggccgaattattggctcttgcagcgtctgcccagggacgtgtgtatcgcgcggaagaccctcatggtgcgctccgcggcctcaaagaagtccgtggactccttgccaaagacttagctgttgttgcattgcgcgaaggtcttgatttacctccgactgatgatccaatgcttcttgcgtacctcttggacccgtcaaacacgacgcccgaaggcgtagcccgtcgttacggcggcgagtggaccgaagatgcaggcgagcgcgcgttattggccgaacgtttgcaccagaatttattaggacgtttgcaaggcgaggaacgtctcctctggctttacgaagaagtggagaaaccattgagtcgcgtgctcgcgcatatggaagctaccggtgtcaaattagacgtggcgtatttggaggcactcagccttgaagttgctgccgaaatgcgccgcttggaggaagaagtattccgtttagcaggccactcctttaaccttaattctcgcgatcagttagaacgtgtgttgttcgatgaacttggtctccctcctatcggcaagacagagaagaccggtaaacgtagcacttcagcggcggttttagaagctcttcgcgaagtccatcccattgtggacaagatcttgcagtaccgcgaactcgcgaaattgaaaggcacctatattgaccctcttccggcattagtccacccgaaaacgggacgcctccatacccgcttcaaccaaacagccacggcgaccggtcgtttgtcctcctctgatccaaaccttcagaatattccagtacgtaccccattgggccagaagatccgccgcgcgtttgtagctgaggagggttggcgtttagtggccctcgattatagccaaattgaattacgtgtccttgcccatctttctggcgatgagaacctcatccgcgtgtttcaggaaggcaaagacattcacactcaaacggcaagctggatgtttggattatcgccggaagcgatcgatcctttgatgcgtcgtgcagcgaagaccgttaatttcggtgttctctacggtatgagtgcccatcgtttgtcgcaggaattaggcattccctatgaagaagctgcggcgttcattcagcgctactttcaaagctatcccaaagttaaagcatggatcgagaagactctcgaagaaggccgcacacgtggttacgtagagaccttatttggacgtcgccgctatgttcccgatttaaacgctcgcgtgaaatctgtccgtgaagccgccgaacgcatggcgttcaacatgcctgtacagggcacggcagctgacctcatgaaacttgcaatggtgcgcctttttccacaattgcgtgaagttggtgcccgcatgctcttgcaggtccacgatgaactcttgttagaagcgccaaaagagcgtgcggaagaggtggcagccctcgcgaaagaggttatggaaggcgtgtggcccttagcggtgcctcttgaagtcgaagttggtattggcgaggattggttggctgccaaaggataatga

SEQ ID NO: 188 - protein, 841 aa, synthetic construct
  REGION 1..841: note = Variant of DNA polymerase I from Thermus sp. strain 2.9
MHHHHHHGGSGMLPLFEPKGRVLLVDGHHLAYRNFFALKGLTTSRGEPVQGVYGFAKSLLKALKEDGDVVIVVFDAKAPSFRHEAYEAYKAGRAPTPEDFPRQLALMKELVDLLGLERLEVPGFEADDVLATLAKKAEREGYEVQILTADRDLFQLLSPRISVLHPEGHRITPEWLWEKYGLRPEQWVDFRALAGDPSDNIPGVKGIGEKTALKLLKEWGSLENLLKNLDQVKPESVREKILAHLEDLKLSLELSRVRTDLPLEVDFRRRREPDWEGLKAFLERLEFGSLLHEFGLLESPLPAEEAPWPPPEGAFLGYRLSRPEPMWAELLALAASAQGRVYRAEDPHGALRGLKEVRGLLAKDLAVVALREGLDLPPTDDPMLLAYLLDPSNTTPEGVARRYGGEWTEDAGERALLAERLHQNLLGRLQGEERLLWLYEEVEKPLSRVLAHMEATGVKLDVAYLEALSLEVAAEMRRLEEEVFRLAGHSFNLNSRDQLERVLFDELGLPPIGKTEKTGKRSTSAAVLEALREVHPIVDKILQYRELAKLKGTYIDPLPALVHPKTGRLHTRFNQTATATGRLSSSDPNLQNIPVRTPLGQKIRRAFVAEEGWRLVALDYSQIELRVLAHLSGDENLIRVFQEGKDIHTQTASWMFGLSPEAIDPLMRRAAKTVNFGVLYGMSAHRLSQELGIPYEEAAAFIQRYFQSYPKVKAWIEKTLEEGRTRGYVETLFGRRRYVPDLNARVKSVREAAERMAFNMPVQGTAADLMKLAMVRLFPQLREVGARMLLQVHDELLLEAPKERAEEVAALAKEVMEGVWPLAVPLEVEVGIGEDWLAAKG

SEQ ID NO: 189 - DNA, 2529 bp, synthetic construct
  misc_feature 1..2529: note = Variant of DNA polymerase I from Thermus sp. strain 2.9
  source 1..2529: mol_type = other DNA
atgcaccatcatcatcatcatggcggtagcggcatgttaccgttgttcgaacctaaaggtcgcgtgcttctggttgatggccatcatctcgcgtatcgtaacttctttgccctgaaaggattaaccaccagccgtggcgagccggtacagggtgtctacggctttgcaaagtcgctcctgaaagctctgaaagaagacggtgatgtggtgattgttgtctttgatgcgaaagcgccaagttttcgccacgaagcgtacgaagcttacaaagccgggcgtgctccaacgccggaagactttcctcgccaattggcgcttatgaaggaattagtggatttgcttggcctcgaacgcttggaagttcccggtttcgaggcagacgacgtattagcgactctcgcaaagaaagccgaacgtgagggctatgaagtccatatcttgacagcagatcgcgatcttttccagcttttatctccgcgcatttccgtgttacacccggaagggcatcgtatcaccccggaatggctctgggagaaatatggtttgcgtcccgaacaatgggtggattttcgcgccttagcgggcgatccgagcgacaatattccgggagttaaaggtatcggcgagaagacggcgctcaagctccttaaagaatgggggtcgttggagaacttgcttaagaatttagatcaggtcaaaccagcttcagtgcgtgagaagattcttgcacacctcgaagacctcaaattaagccgcgaattggtccgtgtacgcaccgatttgccgctcgaagttgatttccgtggccgccgcgaacctgactgggagggtcttaaagcgtttttagagcgtcttgaatttggttcgctcttgcatgaattcggccttttagaaagcccgttaccagccgaagaagcaccttggccaccgcccgaaggcgcgtttttaggttaccgtttgagtcgcccggaaccgatgtgggccgaattattggctcttgcagcgtctgcccagggacgtgtgtatcgcgcggaagaccctcatggtgcgctccgtggcctcaaagaagtccgtggactccttgccaaagacttagctgttgttgcattgcgcgaaggtcttgatttacctccgactgatgatccaatgcttcttgcgtacctcttggactcgtcaaacacgacgcccgaacgcgtagcccgtcgttacggcggcgagtggaccgaagatgcaggtgagcgcgcgttattggccgaacgtttgcacgccaatttattaggacgtttgcaaggcgaggaacgtctcctctggctttacgaagaagtggagaaaccattgagtcgcgtgctcgcgcatatggaagctaccggtgtcaaattagacgtggcgtatttggaggcactcagccttgaagccgctgccgaaatgcgccgcttggaggaagaagtattccgtttagcaggccactcctttaaccttaattctcgcgatcagttagaacgtgtgttgttcgatgaacttggtctccctcctatcggtaagacagagaagaccggtaaacgtagcacttcagcggcggttttagaagctcttcgcgaagtccatcccattgtggacaagatcttgcagtaccgcgaactcgcgaaattgaaaggcacctatattgaccgtcttccggcattagtccacccgaaaacgggacgcctccatacccgcttcaaccaaacagccacggcgaccggtcgtttgtcctcctctgatccaaaccttcagaatattccagtacgtaccccattgggccagaagatccgcaaagcgtttgtagctgaggagggttggcgtttagtggccctcgattatagccaaattgaattacgtgtccttgcccatctttctggcgatgagaacctcatccgcgtgtttcaggaaggccgcgacattcacactcaaacggcaagctggatgtttggactgtcagcggaagcgatcgatcctttgatgcgtcgtgcagcgaagaccatcaatttcggtgttctctacggtatgagtgccgcgcgtttgtcgcaggaattaggcattccctatgaagaagctgcggcgttcattcagcgctactttcaaagctatcccaaagttaaagcatggatcgagaagactctcgaagaaggccgcacacgtggttacgtagagaccttatttggacgtcgccgctatgttcccgatttaaatgctcgcgtgaaatctgtccgtgaagccgccgaacgcatggcgttcaacatgcctgtacagggcacggcagctgacctcatgaaacttgcaatggtgcgcctttttccacaattgcgtgaagttggtgcccgcatgctcttgcaggtccacgatgaactcttgttagaagcgccaaaagagcgtgcggaagaggtggcagccctcgcgaaagaggttatggaaggcgtgtggcccttagcggtgcctcttgaagtcgaagttggtattggcgaggattggttggctgccaaaggataatga

SEQ ID NO: 190 - protein, 841 aa, synthetic construct
  REGION 1..841: note = Variant of DNA polymerase I from Thermus sp. strain 2.9
MHHHHHHGGSGMLPLFEPKGRVLLVDGHHLAYRNFFALKGLTTSRGEPVQGVYGFAKSLLKALKEDGDVVIVVFDAKAPSFRHEAYEAYKAGRAPTPEDFPRQLALMKELVDLLGLERLEVPGFEADDVLATLAKKAEREGYEVHILTADRDLFQLLSPRISVLHPEGHRITPEWLWEKYGLRPEQWVDFRALAGDPSDNIPGVKGIGEKTALKLLKEWGSLENLLKNLDQVKPASVREKILAHLEDLKLSRELVRVRTDLPLEVDFRGRREPDWEGLKAFLERLEFGSLLHEFGLLESPLPAEEAPWPPPEGAFLGYRLSRPEPMWAELLALAASAQGRVYRAEDPHGALRGLKEVRGLLAKDLAVVALREGLDLPPTDDPMLLAYLLDSSNTTPERVARRYGGEWTEDAGERALLAERLHANLLGRLQGEERLLWLYEEVEKPLSRVLAHMEATGVKLDVAYLEALSLEAAAEMRRLEEEVFRLAGHSFNLNSRDQLERVLFDELGLPPIGKTEKTGKRSTSAAVLEALREVHPIVDKILQYRELAKLKGTYIDRLPALVHPKTGRLHTRFNQTATATGRLSSSDPNLQNIPVRTPLGQKIRKAFVAEEGWRLVALDYSQIELRVLAHLSGDENLIRVFQEGRDIHTQTASWMFGLSAEAIDPLMRRAAKTINFGVLYGMSAARLSQELGIPYEEAAAFIQRYFQSYPKVKAWIEKTLEEGRTRGYVETLFGRRRYVPDLNARVKSVREAAERMAFNMPVQGTAADLMKLAMVRLFPQLREVGARMLLQVHDELLLEAPKERAEEVAALAKEVMEGVWPLAVPLEVEVGIGEDWLAAKG

SEQ ID NO: 191 - DNA, 2529 bp, synthetic construct
  misc_feature 1..2529: note = Variant of DNA polymerase I from Thermus sp. strain 2.9
  source 1..2529: mol_type = other DNA
atgcaccatcatcatcatcatggcggtagcggcatgttaccgttgttcgaacctaaaggtcgcgtgcttctggttgatggccatcatctcgcgtatcgtaacttctttgccctgaaaggattaaccaccagccgtggcgagccggtacagggtgtctacggctttgcaaagtcgctcctgaaagctctgaaagaagacggtgatgtggtgattgttgtctttgatgcgaaagcgccaagttttcgccacgaagcgtacgaagcttacaaagccgggcgtgctccaacgccggaagactttcctcgccaattggcgcttatgaaggaattagtggatttgcttggcctcgaacgcttggaagttcccggtttcgaggcagacgacgtattagcgactctcgcaaagaaagccgaacgtgagggctatgaagtccagatcttgacagcagatcgcgatcttttccagcttttatctccgcgcatttccgtgttacacccggaagggcatcgcatcaccccggaatggctctgggagaaatatggtttgcgtcccgaacaatgggtggattttcgcgccttagcaggcgatccgagcgacaatattccgggagttaaaggtatcggcgagaagacggcgctcaagctccttaaagaatgggggtcgttggagaacttgcttaagaatttagatcaggtcaaaccagagtcagtgcgtgagaagattcttgcacacctcgaagacctcaaattaagccgcgaattgtcccgtgtacgcaccgatttgccgctcgaagttgatttccgtggccgccgcgaacctgactgggagggtcttaaagcgtttttagagcgtcttgaatttggttcgctcttgcatgaattcggccttttagaaagcccgttaccagccgaagaagcaccttggccaccgcccgaaggcgcgtttttaggttaccgtttgagtcgcccggaaccgatgtgggccgaattattggctcttgcagcgtctgcccagggacgtgtgtatcgcgcggaagaccctcatggtgcgctccgtggcctcaaagaagtccgtggactccttgccaaagacttagctgttgttgcattgcgcgaaggtcttgatttacctccgactgatgatccaatgcttcttgcgtacctcttggacccgtcaaacacgacgcccgaaggcgtagcccgtcgttacggcggcgagtggaccgaagatgcagccgagcgcgcgttattggccgaacgtttgcacgccaatttattaggacgtttgcaaggcgaggaacgtctcctctggctttacgaagaagtggagaaaccattgagtcgcgtgctcgcgcatatggaagctaccggtgtcaaattagacgtggcgtatttggaggcactcagccttgaagttgctgccgaaatgcgccgcttggaggaagaagtattccgtttagcaggccactcctttaaccttaattctcgcgatcagttagaacgtgtgttgttcgatgaacttggtctccctcctatcggcaagacagagaagaccggtaaacgtagcacttcagcggcggttttagaagctcttcgcgaagtccatcccattgtggacaagatcttgcagtaccgcgaactcgcgaaattgaaaggcacctatattgaccctcttccggcattagtccacccgaaaacgggacgcctccatacccgcttcaaccaaacagccacggcgaccggtcgtttgtcctcctctgatccaaaccttcagaatattccagtacgtaccccattgggccagaagatccgcaaagcgtttgtagctgaggagggttggcgtttagtggccctcgattatagccaaattgaattacgtgtccttgcccatctttctggcgatgagaacctcatccgcgtgtttcaggaaggcaaagacattcacactcaaacggcaagctggatgtttggattatcagctgaagcgatcgatcctttgatgcgtcgtgcagcgaagaccattaatttcggtgttctctacggtatgagtgcccatcgtttgtcgcaggaattaggcattccctatgaagaagctgcggcgttcattcagcgctactttcaaagctatcccaaagttaaagcatggatcgagaagactctcgaagaaggccgcacacgtggttacgtagagaccttatttggacgtcgccgctatgttcccgatttaaacgctcgcgtgaaatctgtccgtgaagccgccgaacgcatggcgttcaacatgcctgtacagggcacggcagctgacctcatgaaacttgcaatggtgcgcctttttccacaattgcgtgaagttggtgcccgcatgctcttgcaggtccacgatgaactcttgttagaagcgccaaaagagcgtgcggaagaggtggcagccctcgcgaaagaggttatggaaggcgtgtggcccttagcggtgcctcttgaagtcgaagttggtattggcgaggattggttggctgccaaaggataatga

SEQ ID NO: 192 - protein, 841 aa, synthetic construct
  REGION 1..841: note = Variant of DNA polymerase I from Thermus sp. strain 2.9
MHHHHHHGGSGMLPLFEPKGRVLLVDGHHLAYRNFFALKGLTTSRGEPVQGVYGFAKSLLKALKEDGDVVIVVFDAKAPSFRHEAYEAYKAGRAPTPEDFPRQLALMKELVDLLGLERLEVPGFEADDVLATLAKKAEREGYEVQILTADRDLFQLLSPRISVLHPEGHRITPEWLWEKYGLRPEQWVDFRALAGDPSDNIPGVKGIGEKTALKLLKEWGSLENLLKNLDQVKPESVREKILAHLEDLKLSRELSRVRTDLPLEVDFRGRREPDWEGLKAFLERLEFGSLLHEFGLLESPLPAEEAPWPPPEGAFLGYRLSRPEPMWAELLALAASAQGRVYRAEDPHGALRGLKEVRGLLAKDLAVVALREGLDLPPTDDPMLLAYLLDPSNTTPEGVARRYGGEWTEDAAERALLAERLHANLLGRLQGEERLLWLYEEVEKPLSRVLAHMEATGVKLDVAYLEALSLEVAAEMRRLEEEVFRLAGHSFNLNSRDQLERVLFDELGLPPIGKTEKTGKRSTSAAVLEALREVHPIVDKILQYRELAKLKGTYIDPLPALVHPKTGRLHTRFNQTATATGRLSSSDPNLQNIPVRTPLGQKIRKAFVAEEGWRLVALDYSQIELRVLAHLSGDENLIRVFQEGKDIHTQTASWMFGLSAEAIDPLMRRAAKTINFGVLYGMSAHRLSQELGIPYEEAAAFIQRYFQSYPKVKAWIEKTLEEGRTRGYVETLFGRRRYVPDLNARVKSVREAAERMAFNMPVQGTAADLMKLAMVRLFPQLREVGARMLLQVHDELLLEAPKERAEEVAALAKEVMEGVWPLAVPLEVEVGIGEDWLAAKG

SEQ ID NO: 193 - DNA, 2529 bp, synthetic construct
  misc_feature 1..2529: note = Variant of DNA polymerase I from Thermus sp. strain 2.9
  source 1..2529: mol_type = other DNA
atgcaccatcatcatcatcatggcggtagcggcatgttaccgttgttcgaacctaaaggtcgcgtgcttctggttgatggccatcatctcgcgtatcgtaacttctttgccctgaaaggattaaccaccagccgtggcgagccggtacagggtgtctacggctttgcaaagtcgctcctgaaagctctgaaagaagacggtgatgtggtgattgttgtctttgatgcgaaagcgccaagttttcgccacgaagcgtacgaagcttacaaagccgggcgtgctccaacgccggaagactttcctcgccaattggcgcttatgaaggaattagtggatttgcttggcctcgaacgcttggaagttcccggtttcgaggcagacgacgtattagcgactctcgcaaagaaagccgaacgtgagggctatgaagtccagatcttgacagcagatcgcgatcttttccagcttttatctccgcgcatttccgtgttacacccggaagggcatcgtatcaccccggaatggctctgggagaaatatggtttgcgtcccgaacaatgggtggattttcgcgccttagcgggcgatccgagcgacaatattccgggagttaaaggtatcggcgagaagacggcgctcaagctccttaaagaatgggggtcgttggagaacttgcttaagaatttagatcaggtcaaaccagcttcagtgcgtgagaagattcttgcacacctcgaagacctcaaattaagccgcgaattggtccgtgtacgcaccgatttgccgctcgaagttgatttccgtggccgccgcgaacctgactgggagggtcttaaagcgtttttagagcgtcttgaatttggttcgctcttgcatgaattcggccttttagaaagcccgttaccagccgaagaagcaccttggccaccgcccgaaggcgcgtttttaggttaccgtttgagtcgcccggaaccgatgtgggccgaattattggctcttgcagcgtctgcccagggacgtgtgtatcgcgcggaagaccctcatggtgcgctccgtggcctcaaagaagtccgtggactccttgccaaagacttagctgttgttgcattgcgcgaaggtcttgatttacctccgactgatgatccaatgcttcttgcgtacctcttggacccgtcaaacacgacgcccgaacgcgtagcccgtcgttacggcggcgagtggaccgaagatgcaggtgagcgcgcgttattggccgaacgtttgcacgccaatttattaggacgtttgcaaggcgaggaacgtctcctctggctttacgaagaagtggagaaaccattgagtcgcgtgctcgcgcatatggaagctaccggtgtcaaattagacgtggcgtatttggaggcactcagccttgaagttgctgccgaaatgcgccgcttggaggaagaagtattccgtttagcaggccactcctttaaccttaattctcgcgatcagttagaacgtgtgttgttcgatgaacttggtctccctcctatcaccaagacagagaagaccggtaaacgtagcacttcagcggcggttttagaagctcttcgcgaagtccatcccattgtggacaagatcttgcagtaccgcgaactcgcgaaattgaaaggcacctatattgaccctcttccggcattagtccacccgaaaacgggacgcctccatacccgcttcaaccaaacagccacggcgaccggtcgtttgtcctcctctgatccaaaccttcagaatattccagtacgtaccccattgggccagaagatccgcaaagcgtttgtagctgaggagggttggcgtttagtggccctcgattatagccaaattgaattacgtgtccttgcccatctttctggcgatgagaacctcatccgcgtgtttcaggaaggccgcgacattcacactcaaacggcaagctggatgtttggattatcagctgaagcgatcgatcctttgatgcgtcgtgcagcgaagaccatcaatttcggtgttctctacggtatgagtgcccatcgtttgtcgcaggaattaggcattccctatgaagaagctgcggcgttcattcagcgctactttcaaagctatcccaaagttaaagcatggatcgagaagactctcgaagaaggccgcacacgtggttacgtagagaccttatttggacgtcgccgctatgttcccgatttaaatgctcgcgtgaaatctgtccgtgaagccgccgaacgcatggcgtggaacatgcctgtacagggcacggcagctgacctcatgaaacttgcaatggtgcgcctttttccacaattgcgtgaagttggtgcccgcatgctcttgcaggtccacgatgaactcttgttagaagcgccaaaagagcgtgcggaagaggtggcagccctcgcgaaagaggttatggaaggcgtgtggcccttagcggtgcctcttgaagtcgaagttggtattggcgaggattggttggctgccaaaggataatga

SEQ ID NO: 194 - protein, 841 aa, synthetic construct
  REGION 1..841: note = Variant of DNA polymerase I from Thermus sp. strain 2.9
MHHHHHHGGSGMLPLFEPKGRVLLVDGHHLAYRNFFALKGLTTSRGEPVQGVYGFAKSLLKALKEDGDVVIVVFDAKAPSFRHEAYEAYKAGRAPTPEDFPRQLALMKELVDLLGLERLEVPGFEADDVLATLAKKAEREGYEVQILTADRDLFQLLSPRISVLHPEGHRITPEWLWEKYGLRPEQWVDFRALAGDPSDNIPGVKGIGEKTALKLLKEWGSLENLLKNLDQVKPASVREKILAHLEDLKLSRELVRVRTDLPLEVDFRGRREPDWEGLKAFLERLEFGSLLHEFGLLESPLPAEEAPWPPPEGAFLGYRLSRPEPMWAELLALAASAQGRVYRAEDPHGALRGLKEVRGLLAKDLAVVALREGLDLPPTDDPMLLAYLLDPSNTTPERVARRYGGEWTEDAGERALLAERLHANLLGRLQGEERLLWLYEEVEKPLSRVLAHMEATGVKLDVAYLEALSLEVAAEMRRLEEEVFRLAGHSFNLNSRDQLERVLFDELGLPPITKTEKTGKRSTSAAVLEALREVHPIVDKILQYRELAKLKGTYIDPLPALVHPKTGRLHTRFNQTATATGRLSSSDPNLQNIPVRTPLGQKIRKAFVAEEGWRLVALDYSQIELRVLAHLSGDENLIRVFQEGRDIHTQTASWMFGLSAEAIDPLMRRAAKTINFGVLYGMSAHRLSQELGIPYEEAAAFIQRYFQSYPKVKAWIEKTLEEGRTRGYVETLFGRRRYVPDLNARVKSVREAAERMAWNMPVQGTAADLMKLAMVRLFPQLREVGARMLLQVHDELLLEAPKERAEEVAALAKEVMEGVWPLAVPLEVEVGIGEDWLAAKG

SEQ ID NO: 195 - DNA, 2529 bp, synthetic construct
  misc_feature 1..2529: note = Variant of DNA polymerase I from Thermus sp. strain 2.9
  source 1..2529: mol_type = other DNA
atgcaccatcatcatcatcatggcggtagcggcatgttaccgttgttcgaacctaaaggtcgcgtgcttctggttgatggccatcatctcgcgtatcgtaacttctttgccctgaaaggattaaccaccagccgtggcgagccggtacagggtgtctacggctttgcaaagtcgctcctgaaagctctgaaagaagacggtgatgtggtgattgttgtctttgatgcgaaagcgccaagttttcgccacgaagcgtacgaagcttacaaagccgggcgtgctccaacgccggaagactttcctcgccaattggcgcttatgaaggaattagtggatttgcttggcctcgaacgcttggaagttcccggtttcgaggcagacgacgtattagcgactctcgcaaagaaagccgaacgtgagggctatgaagtccagatcttgacagcagatcgcgatcttttccagcttttatctccgcgcatttccgtgttacacccggaagggcatcgtatcaccccggaatggctctgggagaaatatggtttgcgtcccgaacaatgggtggattttcgcgccttagcgggcgatccgagcgacaatattccgggagttaaaggtatcggcgagaagacggcgctcaagctccttaaagaatgggggtcgttggagaacttgcttaagaatttagatcaggtcaaaccagcttcagtgcgtgagaagattcttgcacacctcgaagacctcaaattaagccgcgaattgtcccgtgtacgcaccgatttgccgctcgaagttgatttccgtggccgccgcgaacctgactgggagggtcttaaagcgtttttagagcgtcttgaatttggttcgctcttgcatgaattcggccttttagaaagcccgttaccagccgaagaagcaccttggccaccgcccgaaggcgcgtttttaggttaccgtttgagtcgcccggaaccgatgtgggccgaattattggctcttgcagcgtctgcccagggacgtgtgtatcgcgcggaagaccctcatggtgcgctcgggggcctcaaagaagtccgtggactccttgccaaagacttagctgttgttgcattgcgcgaaggtcttgatttacctccgactgatgatccaatgcttcttgcgtacctcttggacccgtcaaacacgacgcccgaaggcgtagcccgtcgttacggcggcgagtggaccgaagatgcaggtgagcgcgcgttattggccgaacgtttgcacgccaatttattaggacgtttgcaaggcgaggaacgtctcctctggctttacgaagaagtggagaaaccattgagtcgcgtgctcgcgcatatggaagctaccggtgtcaaattagacgtggcgtatttggaggcactcagccttgaagttgctgccgaaatgcgccgcttggaggaagaagtattccgtttagcaggccactcctttaaccttaattctcgcgatcagttagaacgtgtgttgttcgatgaacttggtctccctcctatcggcaagacagagaagaccggtaaacgtagcacttcagcggcggttttagaagctcttcgcgaagtccatcccattgtggacaagatcttgcagtaccgcgaactcgcgaaattgaaaggcacctatattgaccctcttccggcattagtccacccgaaaacgggacgcctccatacccgcttcaaccaaacagccacggcgaccggtcgtttgtcctcctctgatccaaaccttcagaatattccagtacgtaccccattgggccagaagatccgcaaagcgtttgtagctgaggagggttggcgtttagtggccctcgattatagccaaattgaattacgtgtccttgcccatctttctggcgatgagaacctcatccgcgtgtttcaggaaggccgcgacattcacactcaaacggcaagctggatgtttggattatcagctgaagcgatcgatcctttgatgcgtcgtgcagcgaagaccatcaatttcggtgttctctacggtatgagtgcccatcgtttgtcgcaggaattaggcattccctatgaagaagctgcggcgttcattcagcgctactttcaaagctatcccaaagttaaagcatggatcgagaagactctcgaagaaggccgcacacgtggttacgtagagaccttatttggacgtcgccgctatgttcccgatttaaacgctcgcgtgaaatctgtccgtgaagccgccgaacgcatggcgttcaacatgcctgtacagggcacggcagctgacctcatgaaacttgcaatggtgcgcctttttccacaattgcgtgaagttggtgcccgcatgctcttgcaggtccacgatgaactcttgttagaagcgccaaaagagcgtgcggaagaggtggcagccctcgcgaaagaggttatggaaggcgtgtggcccttagcggtgcctcttgaagtcgaagttggtattggcgaggattggttggctgccaaaggataatga

SEQ ID NO: 196 - protein, 841 aa, synthetic construct
  REGION 1..841: note = Variant of DNA polymerase I from Thermus sp. strain 2.9
MHHHHHHGGSGMLPLFEPKGRVLLVDGHHLAYRNFFALKGLTTSRGEPVQGVYGFAKSLLKALKEDGDVVIVVFDAKAPSFRHEAYEAYKAGRAPTPEDFPRQLALMKELVDLLGLERLEVPGFEADDVLATLAKKAEREGYEVQILTADRDLFQLLSPRISVLHPEGHRITPEWLWEKYGLRPEQWVDFRALAGDPSDNIPGVKGIGEKTALKLLKEWGSLENLLKNLDQVKPASVREKILAHLEDLKLSRELSRVRTDLPLEVDFRGRREPDWEGLKAFLERLEFGSLLHEFGLLESPLPAEEAPWPPPEGAFLGYRLSRPEPMWAELLALAASAQGRVYRAEDPHGALGGLKEVRGLLAKDLAVVALREGLDLPPTDDPMLLAYLLDPSNTTPEGVARRYGGEWTEDAGERALLAERLHANLLGRLQGEERLLWLYEEVEKPLSRVLAHMEATGVKLDVAYLEALSLEVAAEMRRLEEEVFRLAGHSFNLNSRDQLERVLFDELGLPPIGKTEKTGKRSTSAAVLEALREVHPIVDKILQYRELAKLKGTYIDPLPALVHPKTGRLHTRFNQTATATGRLSSSDPNLQNIPVRTPLGQKIRKAFVAEEGWRLVALDYSQIELRVLAHLSGDENLIRVFQEGRDIHTQTASWMFGLSAEAIDPLMRRAAKTINFGVLYGMSAHRLSQELGIPYEEAAAFIQRYFQSYPKVKAWIEKTLEEGRTRGYVETLFGRRRYVPDLNARVKSVREAAERMAFNMPVQGTAADLMKLAMVRLFPQLREVGARMLLQVHDELLLEAPKERAEEVAALAKEVMEGVWPLAVPLEVEVGIGEDWLAAKG

SEQ ID NO: 197 - DNA, 2529 bp, synthetic construct
  misc_feature 1..2529: note = Variant of DNA polymerase I from Thermus sp. strain 2.9
  source 1..2529: mol_type = other DNA
atgcaccatcatcatcatcatggcggtagcggcatgttaccgttgttcgaacctaaaggtcgcgtgcttctggttgatggccatcatctcgcgtatcgtaacttctttgccctgaaaggattaaccaccagccgtggcgagccggtacagggtgtctacggctttgcaaagtcgctcctgaaagctctgaaagaagacggtgatgtggtgattgttgtctttgatgcgaaagcgccaagttttcgccacgaagcgtacgaagcttacaaagccgggcgtgctccaacgccggaagactttcctcgccaattggcgcttatgaaggaattagtggatttgcttggcctcgaacgcttggaagttcccggtttcgaggcagacgacgtattagcgactctcgcaaagaaagccgaacgtgagggctatgaagtccatatcttgacagcagatcgcgatcttttccagcttttatctccgcgcatttccgtgttacacccggaagggcatcgtatcaccccggaatggctctgggagaaatatggtttgcgtcccgaacaatgggtggattttcgcgccttagcgggcgatccgagcgacaatattccgggagttaaaggtatcggcgagaagacggcgctcaagctccttaaagaatgggggtcgttggagaacttgcttaagaatttagatcaggtcaaaccagcttcagtgcgtgagaagattcttgcacacctcgaagacctcaaattaagccgcgaattggtccgtgtacgcaccgatttgccgctcgaagttgatttccgtggccgccgcgaacctgactgggagggtcttaaagcgtttttagagcgtcttgaatttggttcgctcttgcatgaattcggccttttagaaagcccgttaccagccgaagaagcaccttggccaccgcccgaaggcgcgtttttaggttaccgtttgagtcgcccggaaccgatgtgggccgaattattggctcttgcagcgtctgcccagggacgtgtgtatcgcgcggaagaccctcatggtgcgctccgtggcctcaaagaagtccgtggactccttgccaaagacttagctgttgttgcattgcgcgaaggtcttgatttacctccgactgatgatccaatgcttcttgcgtacctcttggactcgtcaaacacgacgcccgaacgcgtagcccgtcgttacggcggcgagtggaccgaagatgcaggtgagcgcgcgttattggccgaacgtttgcacgccaatttattaggacgtttgcaaggcgaggaacgtctcctctggctttacgaagaagtggagaaaccattgagtcgcgtgctcgcgcatatggaagctaccggtgtcaaattagacgtggcgtatttggaggcactcagccttgaagtcgctgccgaactgcgccgcttggaggaagaagtattccgtttagcaggccactcctttaaccttaattctcgcgatcagttagaacgtgtgttgttcgatgaacttggtctccctcctatcggtaagacagagaagaccggtaaacgtagcacttcagcggcggttttagaagctcttcgcgaagtccatcccattgtggacaagatcttgcagtaccgcgaactcgcgaaattgaaaggcacctatattgaccgtcttccggcattagtccacccgaaaacgggacgcctccatacccgcttcaaccaaacagccacggcgaccggtcgtttgtcctcctctgatccaaaccttcagaatattccagtacgtaccccattgggccagaaaatccgcaaagcgtttgtagctgaggagggttggcgtttagtggccctcgattatagccaaattgaattacgtgtccttgcccatctttctggcgatgagaacctcatccgcgtgtttcaggaaggccgcgacattcacactcaaacggcaagctggatgtttggattatcagctgaagcgatcgatcctttgatgcgtcgtgcagcgaagaccatcaatttcggtgttctctacggtatgagtgcccatcgtttgtcgcaggaattaggcattccctatgaagaagctgcggcgttcattcagcgctactttcaaagctatcccaaagttaaagcatggatcgagaagactctcgaagaaggccgcacacgtggttacgtagagaccttatttggacgtcgccgctatgttcccgatttaaacgctcgcgtgaaatctgtccgtgaagccgccgaacgcatggcgtggaacatgcctgtacagggcacggcagctgacctcatgaaacttgcaatggtgcgcctttttccacaattgcgtgaagttggtgcccgcatgctcttgcaggtccacgatgaactcttgttagaagcgccaaaagagcgtgcggaagaggtggcagccctcgcgaaagaggttatggaaggcgtgtggcccttagcggtgcctcttgaagtcgaagttggtattggcgaggattggttggctgccaaaggataatga

SEQ ID NO: 198 - protein, 841 aa, synthetic construct
  REGION 1..841: note = Variant of DNA polymerase I from Thermus sp. strain 2.9
MHHHHHHGGSGMLPLFEPKGRVLLVDGHHLAYRNFFALKGLTTSRGEPVQGVYGFAKSLLKALKEDGDVVIVVFDAKAPSFRHEAYEAYKAGRAPTPEDFPRQLALMKELVDLLGLERLEVPGFEADDVLATLAKKAEREGYEVHILTADRDLFQLLSPRISVLHPEGHRITPEWLWEKYGLRPEQWVDFRALAGDPSDNIPGVKGIGEKTALKLLKEWGSLENLLKNLDQVKPASVREKILAHLEDLKLSRELVRVRTDLPLEVDFRGRREPDWEGLKAFLERLEFGSLLHEFGLLESPLPAEEAPWPPPEGAFLGYRLSRPEPMWAELLALAASAQGRVYRAEDPHGALRGLKEVRGLLAKDLAVVALREGLDLPPTDDPMLLAYLLDSSNTTPERVARRYGGEWTEDAGERALLAERLHANLLGRLQGEERLLWLYEEVEKPLSRVLAHMEATGVKLDVAYLEALSLEVAAELRRLEEEVFRLAGHSFNLNSRDQLERVLFDELGLPPIGKTEKTGKRSTSAAVLEALREVHPIVDKILQYRELAKLKGTYIDRLPALVHPKTGRLHTRFNQTATATGRLSSSDPNLQNIPVRTPLGQKIRKAFVAEEGWRLVALDYSQIELRVLAHLSGDENLIRVFQEGRDIHTQTASWMFGLSAEAIDPLMRRAAKTINFGVLYGMSAHRLSQELGIPYEEAAAFIQRYFQSYPKVKAWIEKTLEEGRTRGYVETLFGRRRYVPDLNARVKSVREAAERMAWNMPVQGTAADLMKLAMVRLFPQLREVGARMLLQVHDELLLEAPKERAEEVAALAKEVMEGVWPLAVPLEVEVGIGEDWLAAKG

SEQ ID NO: 199 - DNA, 2529 bp, synthetic construct
  misc_feature 1..2529: note = Variant of DNA polymerase I from Thermus sp. strain 2.9
  source 1..2529: mol_type = other DNA
atgcaccatcatcatcatcatggcggtagcggcatgttaccgttgttcgaacctaaaggtcgcgtgcttctggttgatggccatcatctcgcgtatcgtaacttctttgccctgaaaggattaaccaccagccgtggcgagccggtacagggtgtctacggctttgcaaagtcgctcctgaaagctctgaaagaagacggtgatgtggtgattgttgtctttgatgcgaaagcgccaagttttcgccacgaagcgtacgaagcttacaaagccgggcgtgctccaacgccggaagactttcctcgccaattggcgcttatgaaggaattagtggatttgcttggcctcgaacgcttggaagttcccggtttcgaggcagacgacgtattagcgactctcgcaaagaaagccgaacgtgagggctatgaagtccagatcttgacagcagatcgcgatcttttccagcttttatctccgcgcatttccgtgttacacccggaagggcatctgatcaccccggaatggctctgggagaaatatggtttgcgtcccgaacaatgggtggattttcgcgccttagcgggcgatccgagcgacaatattccgggagttaaaggtatcggcgagaagacggcgctcaagctccttaaagaatgggggtcgttggagaacttgcttaagaatttagatcaggtcaaaccagagtcagtgcgtgagaagattcttgcacacctcgaagacctccgtttaagccgcgaattgtcccgtgtacgcaccgatttgccgctcgaagttgatttccgtggccgccgcgaacctgactgggagggtcttaaagcgtttttagagcgtcttgaatttggttcgctcttgcatgaattcggccttttagaaagcccgttaccagccgaagaagcaccttggccaccgcccgaaggcgcgtttttaggttaccgtttgagtcgcccggaaccgatgtgggccgaattattggctcttgcagcgtctgcccagggacgtgtgtatcgcgcggaagaccctcatggtgcgctcaaaggcctcaaagaagtccgtggactccttgccaaagacttagctgttgttgcattgcgcgaaggtcttgatttacctccgactgatgatccaatgcttcttgcgtacctcttggacccgtcaaacacgacgcccgaaggcgtagcccgtcgttacggcggcgagtggaccgaagatgcaggcgagcgcgcgttattggccgaacgtttgcacgccaatttattaggacgtttgcaaggcgaggaacgtctcctctggctttacgaagaagtggagaaaccattgagtcgcgtgctcgcgcatatggaagctaccggtgtcaaattagacgtggcgtatttggaggcactcagccttgaagttgctgccgaaatgcgccgcttggaggaagaagtattccgtttagcaggccactcctttaaccttaattctcgcgatcagttagaacgtgtgttgttcgatgaacttggtctccctcctatcggcaagacagagaagaccggtaaacgtagcacttcagcggcggttttagaagctcttcgcgaagtccatcccattgtggacaagatcttgcagtaccgcgaactcgcgaaattgaaaggcacctatattgaccctcttccggcattagtccacccgaaaacgggacgcctccatacccgcttcaaccaaacagccacggcgaccggtcgtttgtcctcctctgatccaaaccttcagaatattccagtacgtaccccattgggccagaagatccgcaaagcgtttgtagctgaggagggttggcgtttagtggccctcgattatagccaaattgaattacgtgtccttgcccatctttctggcgatgagaacctcatccgcgtgtttcaggaaggcaaagacattcacactcaaacggcaagctggatgtttggattatcagctgaagcgatcgatcctttgatgcgtcgtgcagcgaagaccatcaatttcggtgttctctacggtatgagtgcccatcgtttgtcgcaggaattaggcattccctatgaagaagctgcggcgttcattcagcgctactttcaaagctatcccaaagttaaagcatggatcgagaagactctcgaagaaggccgcacacgtggttacgtagagaccttatttggacgtcgccgctatgttcccgatttaaacgctcgcgtgaaatctgtccgtgaagccgccgaacgcatggcgttcaacatgcctgtacagggcacggcagctgacctcatgaaacttgcaatggtgcgcctttttccacaattgcgtgaagttggtgcccgcatgctcttgcaggtccacgatgaactcttgttagaagcgccaaaagagcgtgcggaagaggtggcagccctcgcgaaagaggttatggaaggcgtgtggcccttagcggtgcctcttgaagtcgaagttggtattggcgaggattggttggctgccaaaggataatga

SEQ ID NO: 200 - protein, 841 aa, synthetic construct
  REGION 1..841: note = Variant of DNA polymerase I from Thermus sp. strain 2.9
MHHHHHHGGSGMLPLFEPKGRVLLVDGHHLAYRNFFALKGLTTSRGEPVQGVYGFAKSLLKALKEDGDVVIVVFDAKAPSFRHEAYEAYKAGRAPTPEDFPRQLALMKELVDLLGLERLEVPGFEADDVLATLAKKAEREGYEVQILTADRDLFQLLSPRISVLHPEGHLITPEWLWEKYGLRPEQWVDFRALAGDPSDNIPGVKGIGEKTALKLLKEWGSLENLLKNLDQVKPESVREKILAHLEDLRLSRELSRVRTDLPLEVDFRGRREPDWEGLKAFLERLEFGSLLHEFGLLESPLPAEEAPWPPPEGAFLGYRLSRPEPMWAELLALAASAQGRVYRAEDPHGALKGLKEVRGLLAKDLAVVALREGLDLPPTDDPMLLAYLLDPSNTTPEGVARRYGGEWTEDAGERALLAERLHANLLGRLQGEERLLWLYEEVEKPLSRVLAHMEATGVKLDVAYLEALSLEVAAEMRRLEEEVFRLAGHSFNLNSRDQLERVLFDELGLPPIGKTEKTGKRSTSAAVLEALREVHPIVDKILQYRELAKLKGTYIDPLPALVHPKTGRLHTRFNQTATATGRLSSSDPNLQNIPVRTPLGQKIRKAFVAEEGWRLVALDYSQIELRVLAHLSGDENLIRVFQEGKDIHTQTASWMFGLSAEAIDPLMRRAAKTINFGVLYGMSAHRLSQELGIPYEEAAAFIQRYFQSYPKVKAWIEKTLEEGRTRGYVETLFGRRRYVPDLNARVKSVREAAERMAFNMPVQGTAADLMKLAMVRLFPQLREVGARMLLQVHDELLLEAPKERAEEVAALAKEVMEGVWPLAVPLEVEVGIGEDWLAAKG

SEQ ID NO: 201 - DNA, 2529 bp, synthetic construct
  misc_feature 1..2529: note = Variant of DNA polymerase I from Thermus sp. strain 2.9
  source 1..2529: mol_type = other DNA
atgcaccatcatcatcatcatggcggtagcggcatgttaccgttgttcgaacctaaaggtcgcgtgcttctggttgatggccatcatctcgcgtatcgtaacttctttgccctgaaaggattaaccaccagccgtggcgagccggtacagggtgtctacggctttgcaaagtcgctcctgaaagctctgaaagaagacggtgatgtggtgattgttgtctttgatgcgaaagcgccaagttttcgccacgaagcgtacgaagcttacaaagccgggcgtgctccaacgccggaagactttcctcgacaattggcgcttatgaaggaattagtggatttgcttggcctcgaacgcttggaagttcccggtttcgaggcagacgacgtattagcgactctcgcaaagaaagccgaacgtgagggctatgaagtccagatcttgacagcagatcgcgatcttttccagcttttatctccgcgcatctcggtgttacacccggaagggcatctgatcaccccggaatggctctgggagaaatatggtttgcgtcccgaacaatgggtggattttcgcgccttagcgggcgatccgagcgacaatattccgggagttaaaggtatcggcgagaagacggcgctcaagctccttaaagaatgggggtcgttggagaacttgcttaagaatttagatcaggtcaaaccagagtcagtgcgtgagaagattcttgcacacctcgaagacctcaaattaagccgcgaattgtcccgtgtacgcaccgatttgccgctcgaagttgatttccgtggccgccgcgaacctgactgggagggtcttaaagcgtttttagagcgtcttgaatttggttcgctcttgcatgaattcggccttttagaaagcccgttaccagccgaagaagcaccttggccaccgcccgaaggcgcgtttttaggttaccgtttgagtcgcccggaaccgatgtgggccgaattattggctcttgcagcgtctgcccagggacgtgtgtatcgcgcggaagaccctcatggtgcgctccgtggcctcaaagaagtccgtggactccttgccaaagacttagctgttgttgcattgcgcgaaggtcttgatttacctccgactgatgatccaatgcttcttgcgtacctcttggacccgtcaaacacgacgcccgaaggcgtagcccgtcgttacggcggcgagtggaccgaagatgcagccgagcgcgcgttattggccgaacgtttgcacgccaatttattaggacgtttgcaaggcgaggaacgtctcctctggctttacgaagaagtggagaaaccattgagtcgcgtgctcgcgcatatggaagctaccggtgtcaaattagacgtggcgtatttggaggcactcagccttgaagttgctgccgaaatgcgccgcttggaggaagaagtattccgtttagcaggccactcctttaaccttaattctcgcgatcagttagaacgtgtgttgttcgatgaacttggtctccctcctatcggcaagacagagaagaccggtaaacgtagcacttcagcggcggttttagaagctcttcgcgaagtccatcccattgtggacaagatcttgcagtaccgcgaactcgcgaaattgaaaggcacctatattgaccctcttccggcattagtccacccgaaaacgggacgcctccatacccgcttcaaccaaacagccacggcgaccggtcgtttgtcctcctctgatccaaaccttcagaatattccagtacgtaccccattgggccagaagatccgcaaagcgtttgtagctgaggagggttggcgtttagtggccctcgattatagccaaattgaattacgtgtccttgcccatctttctggcgatgagaacctcatccgcgtgtttcaggaaggccgtgacattcacactcaaacggcaagctggatgtttggattatcagctgaagcgatcgatcctttgatgcgtcgtgcagcgaagaccatcaatttcggtgttctctacggtatgagtgcccatcgtttgtcgcaggaattaggcattccctatgaagaagctgcggcgttcattcagcgctactttcaaagctatcccaaagttaaagcatggatcgagaagactctcgaagaaggccgcacacgtggttacgtagagaccttatttggacgtcgccgctatgttcccgatttaaacgctcgcgtgaaatctgtccgtgaagccgccgaacgcatggcgttcaacatgcctgtacagggcacggcagctgacctcatgaaacttgcaatggtgcgcctttttccacaattgcgtgaagttggtgcccgcatgctcttgcaggtccacgatgaactcttgttagaagcgccaaaagagcgtgcggaagaggtggcagccctcgcgaaagaggttatggaaggcgtgtggcccttagcggtgcctcttgaagtcgaagttggtattggcgaggattggttggctgccaaaggataatga

SEQ ID NO: 202 - protein, 841 aa, synthetic construct
  REGION 1..841: note = Variant of DNA polymerase I from Thermus sp. strain 2.9
MHHHHHHGGSGMLPLFEPKGRVLLVDGHHLAYRNFFALKGLTTSRGEPVQGVYGFAKSLLKALKEDGDVVIVVFDAKAPSFRHEAYEAYKAGRAPTPEDFPRQLALMKELVDLLGLERLEVPGFEADDVLATLAKKAEREGYEVQILTADRDLFQLLSPRISVLHPEGHLITPEWLWEKYGLRPEQWVDFRALAGDPSDNIPGVKGIGEKTALKLLKEWGSLENLLKNLDQVKPESVREKILAHLEDLKLSRELSRVRTDLPLEVDFRGRREPDWEGLKAFLERLEFGSLLHEFGLLESPLPAEEAPWPPPEGAFLGYRLSRPEPMWAELLALAASAQGRVYRAEDPHGALRGLKEVRGLLAKDLAVVALREGLDLPPTDDPMLLAYLLDPSNTTPEGVARRYGGEWTEDAAERALLAERLHANLLGRLQGEERLLWLYEEVEKPLSRVLAHMEATGVKLDVAYLEALSLEVAAEMRRLEEEVFRLAGHSFNLNSRDQLERVLFDELGLPPIGKTEKTGKRSTSAAVLEALREVHPIVDKILQYRELAKLKGTYIDPLPALVHPKTGRLHTRFNQTATATGRLSSSDPNLQNIPVRTPLGQKIRKAFVAEEGWRLVALDYSQIELRVLAHLSGDENLIRVFQEGRDIHTQTASWMFGLSAEAIDPLMRRAAKTINFGVLYGMSAHRLSQELGIPYEEAAAFIQRYFQSYPKVKAWIEKTLEEGRTRGYVETLFGRRRYVPDLNARVKSVREAAERMAFNMPVQGTAADLMKLAMVRLFPQLREVGARMLLQVHDELLLEAPKERAEEVAALAKEVMEGVWPLAVPLEVEVGIGEDWLAAKG

SEQ ID NO: 203 - DNA, 2529 bp, synthetic construct
  misc_feature 1..2529: note = Variant of DNA polymerase I from Thermus sp. strain 2.9
  source 1..2529: mol_type = other DNA
atgcaccatcatcatcatcatggcggtagcggcatgttaccgttgttcgaacctaaaggtcgcgtgcttctggttgatggccatcatctcgcgtatcgtaacttctttgccctgaaaggattaaccaccagccgtggcgagccggtacagggtgtctacggctttgcaaagtcgctcctgaaagctctgaaagaagacggtgatgtggtgattgttgtctttgatgcgaaagcgccaagttttcgccacgaagcgtacgaagcttacaaagccgggcgtgctccaacgccggaagactttcctcgccaattggcgcttatgaaggaattagtggatttgcttggcctcgaacgcttggaagttcccggtttcgaggcagacgacgtattagcgactctcgcaaagaaagccgaacgtgagggctatgaagtccagatcttgacagcagatcgcgatcttttccagcttttatctccgcgcatttccgtgttacacccggaagggcatcgtatcaccccggaatggctctgggagaaatatggtttgcgtcccgaacaatgggtggattttcgcgccttagcgggcgatccgagcgacaatattccgggagttaaaggtatcggcgagaagacggcgctcaagctccttaaagaatgggggtcgttggagaacttgcttaagaatttagatcaggtcaaaccagcttcagtgcgtgagaagattcttgcacacctcgaagacctcaaattaagccgcgaattgtcccgtgtacgcaccgatttgccgctcgaagttgatttccgtggccgccgcgaacctgactgggagggtcttaaagcgtttttagagcgtcttgaatttggttcgctcttgcatgaattcggccttttagaaagcccgttaccagccgaagaagcaccttggccaccgcccgaaggcgcgtttttaggttaccgtttgagtcgcccggaaccgatgtgggccgaattattggctcttgcagcgtctgcccagggacgtgtgtatcgcgcggaagaccctcatggtgcgctccgtggcctcaaagaagtccgtggactccttgccaaagacttagctgttgttgcattgcgcgaaggtcttgatttacctccgactgatgatccaatgcttcttgcgtacctcttggactcgtcaaacacgacgcccgaaggcgtagcccgtcgttacggcggcgagtggaccgaagatgcaggtgagcgcgcgttattggccgaacgtttgcacgccaatttattaggacgtttgcaaggcgaggaacgtctcctctggctttacgaagaagtggagaaaccattgagtcgcgtgctcgcgcatatggaagctaccggtgtcaaattagacgtggcgtatttggaggcactcagccttgaagttgctgccgaaatgcgccgcttggaggaagaagtattccgtttagcaggccactcctttaaccttaattctcgcgatcagttagaacgtgtgttgttcgatgaacttggtctccctcctatcggcaagacagagaagaccggtaaacgtagcacttcagcggcggttttagaagctcttcgcgaagtccatcccattgtggacaagatcttgcagtaccgcgaactcgcgaaattgaaaggcacctatattgaccctcttccggcattagtccacccgaaaacgggacgcctccatacccgcttcaaccaaacagccacggcgaccggtcgtttgtcctcctctgatccaaaccttcagaatattccagtacgtaccccattgggccagaagatccgcaaagcgtttgtagctgaggagggttggcgtttagtggccctcgattatagccaaattgaattacgtgtccttgcccatctttctggcgatgagaacctcatccgcgtgtttcaggaaggccgcgacattcacactcaaacggcaagctggatgtttggagtgtcagcggaagcgatcgatcctttgatgcgtcgtgcagcgaagaccatcaatttcggtgttctctacggtatgagtgcccatcgtttgtcgcaggaattaggcattccctatgaagaagctgcggcgttcattcagcgctactttcaaagctatcccaaagttaaagcatggatcgagaagactctcgaagaaggccgcacacgtggttacgtagagaccttatttggacgtcgccgctatgttcccgatttaaatgctcgcgtgaaatctgtccgtgaagccgccgaacgcatggcgttcaacatgcctgtacagggcacggcagctgacctcatgaaacttgcaatggtgcgcctttttccacaattgcgtgaagttggtgcccgcatgctcttgcaggtccacgatgaactcttgttagaagcgccaaaagagcgtgcggaagaggtggcagccctcgcgaaagaggttatggaaggcgtgtggcccttagcggtgcctcttgaagtcgaagttggtattggcgaggattggttggctgccaaaggataatga

SEQ ID NO: 204 - protein, 841 aa, synthetic construct
  REGION 1..841: note = Variant of DNA polymerase I from Thermus sp. strain 2.9
MHHHHHHGGSGMLPLFEPKGRVLLVDGHHLAYRNFFALKGLTTSRGEPVQGVYGFAKSLLKALKEDGDVVIVVFDAKAPSFRHEAYEAYKAGRAPTPEDFPRQLALMKELVDLLGLERLEVPGFEADDVLATLAKKAEREGYEVQILTADRDLFQLLSPRISVLHPEGHRITPEWLWEKYGLRPEQWVDFRALAGDPSDNIPGVKGIGEKTALKLLKEWGSLENLLKNLDQVKPASVREKILAHLEDLKLSRELSRVRTDLPLEVDFRGRREPDWEGLKAFLERLEFGSLLHEFGLLESPLPAEEAPWPPPEGAFLGYRLSRPEPMWAELLALAASAQGRVYRAEDPHGALRGLKEVRGLLAKDLAVVALREGLDLPPTDDPMLLAYLLDSSNTTPEGVARRYGGEWTEDAGERALLAERLHANLLGRLQGEERLLWLYEEVEKPLSRVLAHMEATGVKLDVAYLEALSLEVAAEMRRLEEEVFRLAGHSFNLNSRDQLERVLFDELGLPPIGKTEKTGKRSTSAAVLEALREVHPIVDKILQYRELAKLKGTYIDPLPALVHPKTGRLHTRFNQTATATGRLSSSDPNLQNIPVRTPLGQKIRKAFVAEEGWRLVALDYSQIELRVLAHLSGDENLIRVFQEGRDIHTQTASWMFGVSAEAIDPLMRRAAKTINFGVLYGMSAHRLSQELGIPYEEAAAFIQRYFQSYPKVKAWIEKTLEEGRTRGYVETLFGRRRYVPDLNARVKSVREAAERMAFNMPVQGTAADLMKLAMVRLFPQLREVGARMLLQVHDELLLEAPKERAEEVAALAKEVMEGVWPLAVPLEVEVGIGEDWLAAKG

SEQ ID NO: 205 - DNA, 2529 bp, synthetic construct
  misc_feature 1..2529: note = Variant of DNA polymerase I from Thermus sp. strain 2.9
  source 1..2529: mol_type = other DNA
atgcaccatcatcatcatcatggcggtagcggcatgttaccgttgttcgaacctaaaggtcgcgtgcttctggttgatggccatcatctcgcgtatcgtaacttctttgccctgaaaggattaaccaccagccgtggcgagccggtacagggtgtctacggctttgcaaagtcgctcctgaaagctctgaaagaagacggtgatgtggtgattgttgtctttgatgcgaaagcgccaagttttcgccacgaagcgtacgaagcttacaaagccgggcgtgctccaacgccggaagactttcctcgccaattggcgcttatgaaggaattagtggatttgcttggcctcgaacgcttggaagttcccggtttcgaggcagacgacgtattagcgactctcgcaaagaaagccgaacgtgagggctatgaagtccatatcttgacagcagatcgcgatcttttccagcttttatctccgcgcatttccgtgttacacccggaagggcatcgtatcaccccggaatggctctgggagaaatatggtttgcgtcccgaacaatgggtggattttcgcgccttagcgggcgatccgagcgacaatattccgggagttaaaggtatcggcgagaagacggcgctcaagctccttaaagaatgggggtcgttggagaacttgcttaagaatttagatcaggtcaaaccagcttcagtgcgtgagaagattcttgcacacctcgaagacctcaaattaagccgcgaattggtccgtgtacgcaccgatttgccgctcgaagttgatttccgtggccgccgcgaacctgactgggagggtcttaaagcgtttttagagcgtcttgaatttggttcgctcttgcatgaattcggccttttagaaagcccgttaccagccgaagaagcaccttggccaccgcccgaaggcgcgtttttaggttaccgtttgagtcgcccggaaccgatgtgggccgaattattggctcttgcagcgtctgcccagggacgtgtgtatcgcgcggaagaccctcatggtgcgctccgtggcctcaaagaagtccgtggactccttgccaaagacttagctgttgttgcattgcgcgaaggtcttgatttacctccgactgatgatccaatgcttcttgcgtacctcttggacccgtcaaacacgacgcccgaaggcgtagcccgtcgttacggcggcgagtggaccgaagatgcaggtgagcgcgcgttattggccgaacgtttgcacgccaatttattgggacgtttgcaaggcgaggaacgtctcctctggctttacgaagaagtggagaaaccattgagtcgcgtgctcgcgcatatggaagctaccggtgtcaaattagacgtggcgtatttggaggcactcagccttgaagccgctgccgaaatgcgccgcttggaggaagaagtattccgtttagcaggccactcctttaaccttaattctcgcgatcagttagaacgtgtgttgttcgatgaacttggtctccctcctatcaccaagacagagaagaccggtaaacgtagcacttcagcggcggttttagaagctcttcgcgaagtccatcccattgtggacaagatcttgcagtaccgcgaactcgcgaaattgaaaggcacctatattgaccgtcttccggcattagtccacccgaaaacgggacgcctccatacccgcttcaaccaaacagccacggcgaccggtcgtttgtcctcctctgatccaaaccttcagaatattccagtacgtaccccattgggccagcatatccgcaaagcgtttgtagctgaggagggttggcgtttagtggccctcgattatagccaaattgaattacgtgtccttgcccatctttctggcgatgagaacctcatccgcgtgtttcaggaaggccgcgacattcacactcaaacggcaagctggatgtttggactgtcatcggaagcgatcgatcctttgatgcgtcgtgcagcgaagaccatcaatttcggtgttctctacggtatgagtgcccatcgtttgtcgcaggaattaggcattccctatgaagaagctgcggcgttcattcagcgctactttcaaagctatcccaaagttaaagcatggatcgagaagactctcgaagaaggccgcacacgtggttacgtagagaccttatttggacgtcgccgctatgttcccgatttaactgctcgcgtgaaatctgtccgtgaagccgccgaacgcatggcgtttaacatgcctgtacagggcacggcagctgacctcatgaaacttgcaatggtgcgcctttttccacaattgcgtgaagttggtgcccgcatgctcttgcaggtccacgatgaactcttgttagaagcgccaaaagagcgtgcggaagaggtggcagccctcgcgaaagaggttatggaaggcgtgtggcccttagcggtgcctcttgaagtcgaagttggtattggcgaggattggttggctgccaaaggataatga

SEQ ID NO: 206 - protein, 841 aa, synthetic construct
  REGION 1..841: note = Variant of DNA polymerase I from Thermus sp. strain 2.9
MHHHHHHGGSGMLPLFEPKGRVLLVDGHHLAYRNFFALKGLTTSRGEPVQGVYGFAKSLLKALKEDGDVVIVVFDAKAPSFRHEAYEAYKAGRAPTPEDFPRQLALMKELVDLLGLERLEVPGFEADDVLATLAKKAEREGYEVHILTADRDLFQLLSPRISVLHPEGHRITPEWLWEKYGLRPEQWVDFRALAGDPSDNIPGVKGIGEKTALKLLKEWGSLENLLKNLDQVKPASVREKILAHLEDLKLSRELVRVRTDLPLEVDFRGRREPDWEGLKAFLERLEFGSLLHEFGLLESPLPAEEAPWPPPEGAFLGYRLSRPEPMWAELLALAASAQGRVYRAEDPHGALRGLKEVRGLLAKDLAVVALREGLDLPPTDDPMLLAYLLDPSNTTPEGVARRYGGEWTEDAGERALLAERLHANLLGRLQGEERLLWLYEEVEKPLSRVLAHMEATGVKLDVAYLEALSLEAAAEMRRLEEEVFRLAGHSFNLNSRDQLERVLFDELGLPPITKTEKTGKRSTSAAVLEALREVHPIVDKILQYRELAKLKGTYIDRLPALVHPKTGRLHTRFNQTATATGRLSSSDPNLQNIPVRTPLGQHIRKAFVAEEGWRLVALDYSQIELRVLAHLSGDENLIRVFQEGRDIHTQTASWMFGLSSEAIDPLMRRAAKTINFGVLYGMSAHRLSQELGIPYEEAAAFIQRYFQSYPKVKAWIEKTLEEGRTRGYVETLFGRRRYVPDLTARVKSVREAAERMAFNMPVQGTAADLMKLAMVRLFPQLREVGARMLLQVHDELLLEAPKERAEEVAALAKEVMEGVWPLAVPLEVEVGIGEDWLAAKG

SEQ ID NO: 207 - DNA, 2529 bp, synthetic construct
  misc_feature 1..2529: note = Variant of DNA polymerase I from Thermus sp. strain 2.9
  source 1..2529: mol_type = other DNA
atgcaccatcatcatcatcatggcggtagcggcatgttaccgttgttcgaacctaaaggtcgcgtgcttctggttgatggccatcatctcgcgtatcgtaacttctttgccctgaaaggattaaccaccagccgtggcgagccggtacagggtgtctacggctttgcaaagtcgctcctgaaagctctgaaagaagacggtgatgtggtgattgttgtctttgatgcgaaagcgccaagttttcgccacgaagcgtacgaagcttacaaagccgggcgtgctccaacgccggaagactttcctcgccaattggcgcttatgaaggaattagtggatttgcttggcctcgaacgcttggaagttcccggtttcgaggcagacgacgtattagcgactctcgcaaagaaagccgaacgtgagggctatgaagtccagatcttgacagcagatcgcgatcttttccagcttttatctccgcgcatttccgtgttacacccggaagggcatcgtatcaccccggaatggctctgggagaaatatggtttgcgtcccgaacaatgggtggattttcgcgccttagcgggcgatccgagcgacaatattccgggagttaaaggtatcggcgagaagacggcgctcaagctccttaaagaatgggggtcgttggagaacttgcttaagaatttagatcaggtcaaaccagcttcagtgcgtgagaagattcttgcacacctcgaagacctcaaattaagccgcgaattgtcgcgtgtacgcaccgatttgccgctcgaagttgatttccgtggccgccgcgaacctgactgggagggtcttaaagcgtttttagagcgtcttgaatttggttcgctcttgcatgaattcggccttttagaaagcccgttaccagccgaagaagcaccttggccaccgcccgaaggcgcgtttttaggttaccgtttgagtcgcccggaaccgatgtgggccgaattattggctcttgcagcgtctgcccagggacgtgtgtatcgcgcggaagaccctcatggtgcgctccgtggcctcaaagaagtccgtggactccttgccaaagacttagctgttgttgcattgcgcgaaggtcttgatttacctccgactgatgatccaatgcttcttgcgtacctcttggactcgtcaaacacgacgcccgaacgcgtagcccgtcgttacggcggcgagtggaccgaagatgcaggtgagcgcgcgttattggccgaacgtttgcacgccaatttattaggacgtttgcaaggcgaggaacgtctcctctggctttacgaagaagtggagaaaccattgagtcgcgtgctcgcgcatatggaagctaccggtgtcaaattagacgtggcgtatttggaggcactcagccttgaagtcgctgccgaaatgcgccgcttggaggaagaagtattccgtttagcaggccactcctttaaccttaattctcgcgatcagttagaacgtgtgttgttcgatgaacttggtctccctcctatcaccaagacagagaagaccggtaaacgtagcacttcagcggcggttttagaagctcttcgcgaagtccatcccattgtggacaagatcttgcagtaccgcgaactcgcgaaattgaaaggcacctatattgaccctcttccggcattagtccacccgaaaacgggacgcctccatacccgcttcaaccaaacagccacggcgaccggtcgtttgtcctcctctgatccaaaccttcagaatattccagtacgtaccccattgggccagcatatccgcaaagcgtttgtagctgaggagggttggcgtttagtggccctcgattatagccaaattgaattacgtgtccttgcccatctttctggcgatgagaacctcatccgcgtgtttcaggaaggccgcgacattcacactcaaacggcaagctggatgtttggagtgtcatcggaagcgatcgatcctttgatgcgtcgtgcagcgaagaccatcaatttcggtgttctctacggtatgagtgcccatcgtttgtcgcaggaattaggcattccctatgaagaagctgcggcgttcattcagcgctactttcaaagctatcccaaagttaaagcatggatcgagaagactctcgaagaaggccgcacacgtggttacgtagagaccttatttggacgtcgccgctatgttcccgatttaaacgctcgcgtgaaatctgtccgtgaagccgccgaacgcatggcgtggaacatgcctgtacagggcacggcagctgacctcatgaaacttgcaatggtgcgcctttttccacaattgcgtgaagttggtgcccgcatgctcttgcaggtccacgatgaactcttgttagaagcgccaaaagagcgtgcggaagaggtggcagccctcgcgaaagaggttatggaaggcgtgtggcccttagcggtgcctcttgaagtcgaagttggtattggcgaggattggttggctgccaaaggataatga

SEQ ID NO: 208 - protein, 841 aa, synthetic construct
  REGION 1..841: note = Variant of DNA polymerase I from Thermus sp. strain 2.9
MHHHHHHGGSGMLPLFEPKGRVLLVDGHHLAYRNFFALKGLTTSRGEPVQGVYGFAKSLLKALKEDGDVVIVVFDAKAPSFRHEAYEAYKAGRAPTPEDFPRQLALMKELVDLLGLERLEVPGFEADDVLATLAKKAEREGYEVQILTADRDLFQLLSPRISVLHPEGHRITPEWLWEKYGLRPEQWVDFRALAGDPSDNIPGVKGIGEKTALKLLKEWGSLENLLKNLDQVKPASVREKILAHLEDLKLSRELSRVRTDLPLEVDFRGRREPDWEGLKAFLERLEFGSLLHEFGLLESPLPAEEAPWPPPEGAFLGYRLSRPEPMWAELLALAASAQGRVYRAEDPHGALRGLKEVRGLLAKDLAVVALREGLDLPPTDDPMLLAYLLDSSNTTPERVARRYGGEWTEDAGERALLAERLHANLLGRLQGEERLLWLYEEVEKPLSRVLAHMEATGVKLDVAYLEALSLEVAAEMRRLEEEVFRLAGHSFNLNSRDQLERVLFDELGLPPITKTEKTGKRSTSAAVLEALREVHPIVDKILQYRELAKLKGTYIDPLPALVHPKTGRLHTRFNQTATATGRLSSSDPNLQNIPVRTPLGQHIRKAFVAEEGWRLVALDYSQIELRVLAHLSGDENLIRVFQEGRDIHTQTASWMFGVSSEAIDPLMRRAAKTINFGVLYGMSAHRLSQELGIPYEEAAAFIQRYFQSYPKVKAWIEKTLEEGRTRGYVETLFGRRRYVPDLNARVKSVREAAERMAWNMPVQGTAADLMKLAMVRLFPQLREVGARMLLQVHDELLLEAPKERAEEVAALAKEVMEGVWPLAVPLEVEVGIGEDWLAAKG

SEQ ID NO: 209 - DNA, 2529 bp, synthetic construct
  misc_feature 1..2529: note = Variant of DNA polymerase I from Thermus sp. strain 2.9
  source 1..2529: mol_type = other DNA
atgcaccatcatcatcatcatggcggtagcggcatgttaccgttgttcgaacctaaaggtcgcgtgcttctggttgatggccatcatctcgcgtatcgtaacttctttgccctgaaaggattaaccaccagccgtggcgagccggtacagggtgtctacggctttgcaaagtcgctcctgaaagctctgaaagaagacggtgatgtggtgattgttgtctttgatgcgaaagcgccaagttttcgccacgaagcgtacgaagcttacaaagccgggcgtgctccaacgccggaagactttcctcgccaattggcgcttatgaaggaattagtggatttgcttggcctcgaacgcttggaagttcccggtttcgaggcagacgacgtattagcgactctcgcaaagaaagccgaacgtgagggctatgaagtccagatcttgacagcagatcgcgatcttttccagcttttatctccgcgcgtcgcggtgttacacccggaagggcatcgtatcaccccggaatggctctgggagaaatatggtttgcgtcccgaacaatgggtggattttcgcgccttagcaggcgatccgagcgacaatattccgggagttaaaggtatcggcgagaagacggcgctcaagctccttaaagaatgggggtcgttggagaacttgcttaagaatttagatcaggtcaaaccagcttcagtgcgtgagaagattcttgcacacctcgaagacctcaaattaagccgcgaattgtcccgtgtacgcaccgatttgccgctcgaagttgatttccgtcgccgccgcgaacctgactgggagggtcttaaagcgtttttagagcgtcttgaatttggttcgctcttgcatgaattcggccttttagaaagcccgttaccagccgaagaagcaccttggccaccgcccgaaggcgcgtttttaggttaccgtttgagtcgcccggaaccgatgtgggccgaattattggctcttgcagcgtctgcccagggacgtgtgtatcgcgcggaagaccctcatggtgcgctccgtggcctcaaagaagtccgtggactccttgccaaagacttagctgttgttgcattgcgcgaaggtcttgatttacctccgactgatgatccaatgcttcttgcgtacctcttggacccgtcaaacacgacgcccgaaggcgtagcccgtcgttacggcggcgagtggaccgaagatgcaggcgagcgcgcgttattggccgaacgtttgcacgccaatttattaggacgtttgcaaggcgaggaacgtctcctctggctttacgaagaagtggagaaaccattgagtcgcgtgctcgcgcatatggaagctaccggtgtcaaattagacgtggcgtatttggaggcactcagccttgaagttgctgccgaaattcgccgcttggaggaagaagtattccgtttagcaggccactcctttaaccttaattctcgcgatcagttagaacgtgtgttgttcgatgaacttggtctccctcctatcggcaagacagagaagaccggtaaacgtagcacttcagcggcggttttagaagctcttcgcgaagtccatcccattgtggacaagatcttgcagtaccgcgaactcgcgaaattgaaaggcacctatattgaccctcttccggcattagtccacccgaaaacgggacgcctccatacccgcttcaaccaaacagccacggcgaccggtcgtttgtcctcctctgatccaaaccttcagaatattccagtacgtaccccattgggccagaagatccgcaaagcgtttgtagctgaggagggttggcgtttagtggccctcgattatagccaaattgaattacgtgtccttgcccatctttctggcgatgagaacctcatccgcgtgtttcaggaaggccgtgacattcacactcaaacggcaagctggatgtttggattatcgccggaagcgatcgatcctttgatgcgtcgtgcagcgaagaccattaatttcggtgttctctacggtatgagtgcccatcgtttgtcgcaggaattaggcattccctatgaagaagctgcggcgttcattcagcgctactttcaaagctatcccaaagttaaagcatggatcgagaagactctcgaagaaggccgcacacgtggttacgtagagaccttatttggacgtcgccgctatgttcccgatttaaacgctcgcgtgaaatctgtccgtgaagccgccgaacgcatggcgttcaacatgcctgtacagggcacggcagctgacctcatgaaacttgcaatggtgcgcctttttccacaattgcgtgaagttggtgcccgcatgctcttgcaggtccacgatgaactcttgttagaagcgccaaaagagcgtgcggaagaggtggcagccctcgcgaaagaggttatggaaggcgtgtggcccttagcggtgcctcttgaagtcgaagttggtattggcgaggattggttggctgccaaaggataatga

SEQ ID NO: 210 - protein, 841 aa, synthetic construct
  REGION 1..841: note = Variant of DNA polymerase I from Thermus sp. strain 2.9
MHHHHHHGGSGMLPLFEPKGRVLLVDGHHLAYRNFFALKGLTTSRGEPVQGVYGFAKSLLKALKEDGDVVIVVFDAKAPSFRHEAYEAYKAGRAPTPEDFPRQLALMKELVDLLGLERLEVPGFEADDVLATLAKKAEREGYEVQILTADRDLFQLLSPRVAVLHPEGHRITPEWLWEKYGLRPEQWVDFRALAGDPSDNIPGVKGIGEKTALKLLKEWGSLENLLKNLDQVKPASVREKILAHLEDLKLSRELSRVRTDLPLEVDFRRRREPDWEGLKAFLERLEFGSLLHEFGLLESPLPAEEAPWPPPEGAFLGYRLSRPEPMWAELLALAASAQGRVYRAEDPHGALRGLKEVRGLLAKDLAVVALREGLDLPPTDDPMLLAYLLDPSNTTPEGVARRYGGEWTEDAGERALLAERLHANLLGRLQGEERLLWLYEEVEKPLSRVLAHMEATGVKLDVAYLEALSLEVAAEIRRLEEEVFRLAGHSFNLNSRDQLERVLFDELGLPPIGKTEKTGKRSTSAAVLEALREVHPIVDKILQYRELAKLKGTYIDPLPALVHPKTGRLHTRFNQTATATGRLSSSDPNLQNIPVRTPLGQKIRKAFVAEEGWRLVALDYSQIELRVLAHLSGDENLIRVFQEGRDIHTQTASWMFGLSPEAIDPLMRRAAKTINFGVLYGMSAHRLSQELGIPYEEAAAFIQRYFQSYPKVKAWIEKTLEEGRTRGYVETLFGRRRYVPDLNARVKSVREAAERMAFNMPVQGTAADLMKLAMVRLFPQLREVGARMLLQVHDELLLEAPKERAEEVAALAKEVMEGVWPLAVPLEVEVGIGEDWLAAKG

SEQ ID NO: 211 - DNA, 2529 bp, synthetic construct
  misc_feature 1..2529: note = Variant of DNA polymerase I from Thermus sp. strain 2.9
  source 1..2529: mol_type = other DNA
atgcaccatcatcatcatcatggcggtagcggcatgttaccgttgttcgaacctaaaggtcgcgtgcttctggttgatggccatcatctcgcgtatcgtaacttctttgccctgaaaggattaaccaccagccgtggcgagccggtacagggtgtctacggctttgcaaagtcgctcctgaaagctctgaaagaagacggtgatgtggtgattgttgtctttgatgcgaaagcgccaagttttcgccacgaagcgtacgaagcttacaaagccgggcgtgctccaacgccggaagactttcctcgccaattggcgcttatgaaggaattagtggatttgcttggcctcgaacgcttggaagttcccggtttcgaggcagacgacgtattagcgactctcgcaaagaaagccgaacgtgagggctatgaagtccagatcttgacagcagatcgcgatcttttccagcttttatctccgcgcatttccgtgttacacccggaagggcatctgatcaccccggaatggctctgggagaaatatggtttgcgtcccgaacaatgggtggattttcgcgccttagcgggcgatccgagcgacaatattccgggagttaaaggtatcggcgagaagacggcgctcaagctccttaaagaatgggggtcgttggagaacttgcttaagaatttagatcaggtcaaaccagagtcagtgcgtgagaagattcttgcacacctcgaagacctcaaattaagccgcgaattgtcccgtgtacgcaccgatttgccgctcgaagttgatttccgtggccgccgcgaacctgactgggagggtcttaaagcgtttttagagcgtcttgaatttggttcgctcttgcatgaattcggccttttagaaagcccgttaccagccgaagaagcaccttggccaccgcccgaaggcgcgtttttaggttaccgtttgagtcgcccggaaccgatgtgggccgaattattggctcttgcagcgtctgcccagggacgtgtgtatcgcgcggaagaccctcatggtgcgctccgtggcctcaaagaagtccgtggactccttgccaaagacttagctgttgttgcattgcgcgaaggtcttgatttacctccgactgatgatccaatgcttcttgcgtacctcttggacccgtcaaacacgacgcccgaaggcgtagcccgtcgttacggcggcgagtggaccgaagatgcaggtgagcgcgcgttattggccgaacgtttgcacgccaatttattaggacgtttgcaaggcgaggaacgtctcctctggctttacgaagaagtggagaaaccattgagtcgcgtgctcgcgcatatggaagctaccggtgtcaaattagacgtggcgtatttggaggcactcagccttgaagttgctgccgaaatgcgccgcttggaggaagaagtattccgtttagcaggccactcctttaaccttaattctcgcgatcagttagaacgtgtgttgttcgatgaacttggtctccctcctatcggcaagacagagaagaccggtaaacgtagcacttcagcggcggttttagaagctcttcgcgaagtccatcccattgtggacaagatcttgcagtaccgcgaactcgcgaaattgaaaggcacctatattgaccctcttccggcattagtccacccgaaaacgggacgcctccatacccgcttcaaccaaacagccacggcgaccggtcgtttgtcctcctctgatccaaaccttcagaatattccagtacgtaccccattgggccagaagatccgcaaagcgtttgtagctgaggagggttggcgtttagtggccctcgattatagccaaattgaattacgtgtccttgcccatctttctggcgatgagaacctcatccgcgtgtttcaggaaggcaaagacattcacactcaaacggcaagctggatgtttggattatcagctgaagcgatcgatcctttgatgcgtcgtgcagcgaagaccatcaatttcggtgttctctacggtatgagtgcccatcgtttgtcgcaggaattaggcattccctatgaagaagctgcggcgttcattcagcgctactttcaaagctatcccaaagttaaagcatggatcgagaagactctcgaagaaggccgcacacgtggttacgtagagaccttatttggacgtcgccgctatgttcccgatttaaacgctcgcgtgaaatctgtccgtgaagccgccgaacgcatggcgttcaacatgcctgtacagggcacggcagctgacctcatgaaacttgcaatggtgcgcctttttccacaattgcgtgaagttggtgcccgcatgctcttgcaggtccacgatgaactcttgttagaagcgccaaaagagcgtgcggaagaggtggcagccctcgcgaaagaggttatggaaggcgtgtggcccttagcggtgcctcttgaagtcgaagttggtattggcgaggattggttggctgccaaaggataatga

SEQ ID NO: 212 - protein, 841 aa, synthetic construct
  REGION 1..841: note = Variant of DNA polymerase I from Thermus sp. strain 2.9
MHHHHHHGGSGMLPLFEPKGRVLLVDGHHLAYRNFFALKGLTTSRGEPVQGVYGFAKSLLKALKEDGDVVIVVFDAKAPSFRHEAYEAYKAGRAPTPEDFPRQLALMKELVDLLGLERLEVPGFEADDVLATLAKKAEREGYEVQILTADRDLFQLLSPRISVLHPEGHLITPEWLWEKYGLRPEQWVDFRALAGDPSDNIPGVKGIGEKTALKLLKEWGSLENLLKNLDQVKPESVREKILAHLEDLKLSRELSRVRTDLPLEVDFRGRREPDWEGLKAFLERLEFGSLLHEFGLLESPLPAEEAPWPPPEGAFLGYRLSRPEPMWAELLALAASAQGRVYRAEDPHGALRGLKEVRGLLAKDLAVVALREGLDLPPTDDPMLLAYLLDPSNTTPEGVARRYGGEWTEDAGERALLAERLHANLLGRLQGEERLLWLYEEVEKPLSRVLAHMEATGVKLDVAYLEALSLEVAAEMRRLEEEVFRLAGHSFNLNSRDQLERVLFDELGLPPIGKTEKTGKRSTSAAVLEALREVHPIVDKILQYRELAKLKGTYIDPLPALVHPKTGRLHTRFNQTATATGRLSSSDPNLQNIPVRTPLGQKIRKAFVAEEGWRLVALDYSQIELRVLAHLSGDENLIRVFQEGKDIHTQTASWMFGLSAEAIDPLMRRAAKTINFGVLYGMSAHRLSQELGIPYEEAAAFIQRYFQSYPKVKAWIEKTLEEGRTRGYVETLFGRRRYVPDLNARVKSVREAAERMAFNMPVQGTAADLMKLAMVRLFPQLREVGARMLLQVHDELLLEAPKERAEEVAALAKEVMEGVWPLAVPLEVEVGIGEDWLAAKG

SEQ ID NO: 213 - DNA, 2529 bp, synthetic construct
  misc_feature 1..2529: note = Variant of DNA polymerase I from Thermus sp. strain 2.9
  source 1..2529: mol_type = other DNA
atgcaccatcatcatcatcatggcggtagcggcatgttaccgttgttcgaacctaaaggtcgcgtgcttctggttgatggccatcatctcgcgtatcgtaacttctttgccctgaaaggattaaccaccagccgtggcgagccggtacagggtgtctacggctttgcaaagtcgctcctgaaagctctgaaagaagacggtgatgtggtgattgttgtctttgatgcgaaagcgccaagttttcgccacgaagcgtacgaagcttacaaagccgggcgtgctccaacgccggaagactttcctcgccaattggcgcttatgaaggaattagtggatttgcttggcctcgaacgcttggaagttcccggtttcgaggcagacgacgtattagcgactctcgcaaagaaagccgaacgtgagggctatgaagtccagatcttgacagcagatcgcgatcttttccagcttttatctccgcgcatttccgtgttacacccggaagggcatcgtatcaccccggaatggctctgggagaaatatggtttgcgtcccgaacaatgggtggattttcgcgccttagcgggcgatccgagcgacaatattccgggagttaaaggtatcggcgagaagacggcgctcaagctccttaaagaatgggggtcgttggagaacttgcttaagaatttagatcaggtcaaaccagcttcagtgcgtgagaagattcttgcacacctcgaagacctcaaattaagccgcgaattgtcgcgtgtacgcaccgatttgccgctcgaagttgatttccgtggccgccgcgaacctgactgggagggtcttaaagcgtttttagagcgtcttgaatttggttcgctcttgcatgaattcggccttttagaaagcccgttaccagccgaagaagcaccttggccaccgcccgaaggcgcgtttttaggttaccgtttgagtcgcccggaaccgatgtgggccgaattattggctcttgcagcgtctgcccagggacgtgtgtatcgcgcggaagaccctcatggtgcgctccgtggcctcaaagaagtccgtggactccttgccaaagacttagctgttgttgcattgcgcgaaggtcttgatttacctccgactgatgatccaatgcttcttgcgtacctcttggacccgtcaaacacgacgcccgaaggcgtagcccgtcgttacggcggcgagtggaccgaagatgcaggtgagcgcgcgttattggccgaacgtttgcacgccaatttattaggacgtttgcaaggcgaggaacgtctcctctggctttacgaagaagtggagaaaccattgagtcgcgtgctcgcgcatatggaagctaccggtgtcaaattagacgtggcgtatttggaggcactcagccttgaagttgctgccgaaatgcgccgcttggaggaagaagtattccgtttagcaggccactcctttaaccttaattctcgcgatcagttagaacgtgtgttgttcgatgaacttggtctccctcctatcaccaagacagagaagaccggtaaacgtagcacttcagcggcggttttagaagctcttcgcgaagtccatcccattgtggacaagatcttgcagtaccgcgaactcgcgaaattgaaaggcacctatattgaccgtcttccggcattagtccacccgaaaacgggacgcctccatacccgcttcaaccaaacagccacggcgaccggtcgtttgtcctcctctgatccaaaccttcagaatattccagtacgtaccccattgggccagaagatccgcaaagcgtttgtagctgaggagggttggcgtttagtggccctcgattatagccaaattgaattacgtgtccttgcccatctttctggcgatgagaacctcatccgcgtgtttcaggaaggccgcgacattcacactcaaacggcaagctggatgtttggattatcagctgaagcgatcgatcctttgatgcgtcgtgcagcgaagaccatcaatttcggtgttctctacggtatgagtgcccatcgtttgtcgcaggaattaggcattccctatgaagaagctgcggcgttcattcagcgctactttcaaagctatcccaaagttaaagcatggatcgagaagactctcgaagaaggccgcacacgtggttacgtagagaccttatttggacgtcgccgctatgttcccgatttaactgctcgcgtgaaatctgtccgtgaagccgccgaacgcatggcgttcaacatgcctgtacagggcacggcagctgacctcatgaaacttgcaatggtgcgcctttttccacaattgcgtgaagttggtgcccgcatgctcttgcaggtccacgatgaactcttgttagaagcgccaaaagagcgtgcggaagaggtggcagccctcgcgaaagaggttatggaaggcgtgtggcccttagcggtgcctcttgaagtcgaagttggtattggcgaggattggttggctgccaaaggataatga

SEQ ID NO: 214 - protein, 841 aa, synthetic construct
  REGION 1..841: note = Variant of DNA polymerase I from Thermus sp. strain 2.9
MHHHHHHGGSGMLPLFEPKGRVLLVDGHHLAYRNFFALKGLTTSRGEPVQGVYGFAKSLLKALKEDGDVVIVVFDAKAPSFRHEAYEAYKAGRAPTPEDFPRQLALMKELVDLLGLERLEVPGFEADDVLATLAKKAEREGYEVQILTADRDLFQLLSPRISVLHPEGHRITPEWLWEKYGLRPEQWVDFRALAGDPSDNIPGVKGIGEKTALKLLKEWGSLENLLKNLDQVKPASVREKILAHLEDLKLSRELSRVRTDLPLEVDFRGRREPDWEGLKAFLERLEFGSLLHEFGLLESPLPAEEAPWPPPEGAFLGYRLSRPEPMWAELLALAASAQGRVYRAEDPHGALRGLKEVRGLLAKDLAVVALREGLDLPPTDDPMLLAYLLDPSNTTPEGVARRYGGEWTEDAGERALLAERLHANLLGRLQGEERLLWLYEEVEKPLSRVLAHMEATGVKLDVAYLEALSLEVAAEMRRLEEEVFRLAGHSFNLNSRDQLERVLFDELGLPPITKTEKTGKRSTSAAVLEALREVHPIVDKILQYRELAKLKGTYIDRLPALVHPKTGRLHTRFNQTATATGRLSSSDPNLQNIPVRTPLGQKIRKAFVAEEGWRLVALDYSQIELRVLAHLSGDENLIRVFQEGRDIHTQTASWMFGLSAEAIDPLMRRAAKTINFGVLYGMSAHRLSQELGIPYEEAAAFIQRYFQSYPKVKAWIEKTLEEGRTRGYVETLFGRRRYVPDLTARVKSVREAAERMAFNMPVQGTAADLMKLAMVRLFPQLREVGARMLLQVHDELLLEAPKERAEEVAALAKEVMEGVWPLAVPLEVEVGIGEDWLAAKG

SEQ ID NO: 215 - DNA, 2529 bp, synthetic construct
  misc_feature 1..2529: note = Variant of DNA polymerase I from Thermus sp. strain 2.9
  source 1..2529: mol_type = other DNA
atgcaccatcatcatcatcatggcggtagcggcatgttaccgttgttcgaacctaaaggtcgcgtgcttctggttgatggccatcatctcgcgtatcgtaacttctttgccctgaaaggattaaccaccagccgtggcgagccggtacagggtgtctacggctttgcaaagtcgctcctgaaagctctgaaagaagacggtgatgtggtgattgttgtctttgatgcgaaagcgccaagttttcgccacgaagcgtacgaagcttacaaagccgggcgtgctccaacgccggaagactttcctcgccaattggcgcttatgaaggaattagtggatttgcttggcctcgaacgcttggaagttcccggtttcgaggcagacgacgtattagcgactctcgcaaagaaagccgaacgtgagggctatgaagtccagatcttgacagcagatcgcgatcttttccagcttttatctccgcgcatttccgtgttacacccggaagggcatcgtatcaccccggaatggctctgggagaaatatggtttgcgtcccgaacaatgggtggattttcgcgccttagcgggcgatccgagcgacaatattccgggagttaaaggtatcggcgagaagacggcgctcaagctccttaaagaatgggggtcgttggagaacttgcttaagaatttagatcaggtcaaaccagcttcagtgcgtgagaagattcttgcacacctcgaagacctcaaattaagccgcgaattgtcccgtgtacgcaccgatttgccgctcgaagttgatttccgtggccgccgcgaacctgactgggagggtcttaaagcgtttttagagcgtcttgaatttggttcgctcttgcatgaattcggccttttagaaagcccgttaccagccgaagaagcaccttggccaccgcccgaaggcgcgtttttaggttaccgtttgagtcgcccggaaccgatgtgggccgaattaagtgctcttgcagcgtctgcccagggacgtgtgtatcgcgcggaagaccctcatggtgcgctccgtggcctcaaagaagtccgtggactccttgccaaagacttagctgttgttgcattgcgcgaaggtcttgatttacctccgactgatgatccaatgcttcttgcgtacctcttggacccgtcaaacacgacgcccgaaggcgtagcccgtcgttacggcggcgagtggaccgaagatgcaggtgagcgcgcgttattggccgaacgtttgcacgccaatttattaggacgtttgcaaggcgaggaacgtctcctctggctttacgaagaagtggagaaaccattgagtcgcgtgctcgcgcatatggaagctaccggtgtcaaattagacgtggcgtatttggaggcactcagccttgaagttgctgccgaaatgcgccgcttggaggaagaagtattccgtttagcaggccactcctttaaccttaattctcgcgatcagttagaacgtgtgttgttcgatgaacttggtctccctcctatcggcaagacagagaagaccggtaaacgtagcacttcagcggcggttttagaagctcttcgcgaagtccatcccattgtggacaagatcttgcagtaccgcgaactcgcgaaattgaaaggcacctatattgaccctcttccggcattagtccacccgaaaacgggacgcctccatacccgcttcaaccaaacagccacggcgaccggtcgtttgtcctcctctgatccaaaccttcagaatattccagtacgtaccccattgggccagaagatccgcaaagcgtttgtagctgaggagggttggcgtttagtggccctcgattatagccaaattgaattacgtgtccttgcccatctttctggcgatgagaacctcatccgcgtgtttcaggaaggccgcgacattcacactcaaacggcaagctggatgtttggattatcagctgaagcgatcgatcctttgatgcgtcgtgcagcgaagaccatcaatttcggtgttctctacggtatgagtgcccatcgtttgtcgcaggaattaggcattccctatgaagaagctgcggcgttcattcagcgctactttcaaagctatcccaaagttaaagcatggatcgagaagactctcgaagaaggccgcacacgtggttacgtagagaccttatttggacgtcgccgctatgttcccgatttaaacgctcgcgtgaaatctgtccgtgaagccgccgaacgcatggcgttcaacatgcctgtacagggcacggcagctgacctcatgaaacttgcaatggtgcgcctttttccacaattgcgtgaagttggtgcccgcatgctcttgcaggtccacgatgaactcttgttagaagcgccaaaagagcgtgcggaagaggtggcagccctcgcgaaagaggttatggaaggcgtgtggcccttagcggtgcctcttgaagtcgaagttggtattggcgaggattggttggctgccaaaggataatga

SEQ ID NO: 216 - protein, 841 aa, synthetic construct
  REGION 1..841: note = Variant of DNA polymerase I from Thermus sp. strain 2.9
MHHHHHHGGSGMLPLFEPKGRVLLVDGHHLAYRNFFALKGLTTSRGEPVQGVYGFAKSLLKALKEDGDVVIVVFDAKAPSFRHEAYEAYKAGRAPTPEDFPRQLALMKELVDLLGLERLEVPGFEADDVLATLAKKAEREGYEVQILTADRDLFQLLSPRISVLHPEGHRITPEWLWEKYGLRPEQWVDFRALAGDPSDNIPGVKGIGEKTALKLLKEWGSLENLLKNLDQVKPASVREKILAHLEDLKLSRELSRVRTDLPLEVDFRGRREPDWEGLKAFLERLEFGSLLHEFGLLESPLPAEEAPWPPPEGAFLGYRLSRPEPMWAELSALAASAQGRVYRAEDPHGALRGLKEVRGLLAKDLAVVALREGLDLPPTDDPMLLAYLLDPSNTTPEGVARRYGGEWTEDAGERALLAERLHANLLGRLQGEERLLWLYEEVEKPLSRVLAHMEATGVKLDVAYLEALSLEVAAEMRRLEEEVFRLAGHSFNLNSRDQLERVLFDELGLPPIGKTEKTGKRSTSAAVLEALREVHPIVDKILQYRELAKLKGTYIDPLPALVHPKTGRLHTRFNQTATATGRLSSSDPNLQNIPVRTPLGQKIRKAFVAEEGWRLVALDYSQIELRVLAHLSGDENLIRVFQEGRDIHTQTASWMFGLSAEAIDPLMRRAAKTINFGVLYGMSAHRLSQELGIPYEEAAAFIQRYFQSYPKVKAWIEKTLEEGRTRGYVETLFGRRRYVPDLNARVKSVREAAERMAFNMPVQGTAADLMKLAMVRLFPQLREVGARMLLQVHDELLLEAPKERAEEVAALAKEVMEGVWPLAVPLEVEVGIGEDWLAAKG

SEQ ID NO: 217 - DNA, 2529 bp, synthetic construct
  misc_feature 1..2529: note = Variant of DNA polymerase I from Thermus sp. strain 2.9
  source 1..2529: mol_type = other DNA
atgcaccatcatcatcatcatggcggtagcggcatgttaccgttgttcgaacctaaaggtcgcgtgcttctggttgatggccatcatctcgcgtatcgtaacttctttgccctgaaaggattaaccaccagccgtggcgagccggtacagggtgtctacggctttgcaaagtcgctcctgaaagctctgaaagaagacggtgatgtggtgattgttgtctttgatgcgaaagcgccaagttttcgccacgaagcgtacgaagcttacaaagccgggcgtgctccaacgccggaagactttcctcgccaattggcgcttatgaaggaattagtggatttgcttggcctcgaacgcttggaagttcccggtttcgaggcagacgacgtattagcgactctcgcaaagaaagccgaacgtgagggctatgaagtccagatcttgacagcagatcgcgatcttttccagcttttatctccgcgcatttccgtgttacacccggaagggcatcgtatcaccccggaatggctctgggagaaatatggtttgcgtcccgaacaatgggtggattttcgcgccttagcgggcgatccgagcgacaatattccgggagttaaaggtatcggcgagaagacggcgctcaagctccttaaagaatgggggtcgttggagaacttgcttaagaatttagatcaggtcaaaccagcttcagtgcgtgagaagattcttgcacacctcgaagacctcaaattaagccgcgaattggtccgtgtacgcaccgatttgccgctcgaagttgatttccgtggccgccgcgaacctgactgggagggtcttaaagcgtttttagagcgtcttgaatttggttcgctcttgcatgaattcggccttttagaaagcccgttaccagccgaagaagcaccttggccaccgcccgaaggcgcgtttttaggttaccgtttgagtcgcccggaaccgatgtgggccgaattattggctcttgcagcgtctgcccagggacgtgtgtatcgcgcggaagaccctcatggtgcgctccgtggcctcaaagaagtccgtggactccttgccaaagacttagctgttgttgcattgcgcgaaggtcttgatttacctccgactgatgatccaatgcttcttgcgtacctcttggactcgtcaaacacgacgcccgaaggcgtagcccgtcgttacggcggcgagtggaccgaagatgcaggtgagcgcgcgttattggccgaacgtttgcacgccaatttattaggacgtttgcaaggcgaggaacgtctcctctggctttacgaagaagtggagaaaccattgagtcgcgtgctcgcgcatatggaagctaccggtgtcaaattagacgtggcgtatttggaggcactcagccttgaagttgctgccgaaatgcgccgcttggaggaagaagtattccgtttagcaggccactcctttaaccttaattctcgcgatcagttagaacgtgtgttgttcgatgaacttggtctccctcctatcggtaagacagagaagaccggtaaacgtagcacttcagcggcggttttagaagctcttcgcgaagtccatcccattgtggacaagatcttgcagtaccgcgaactcgcgaaattgaaaggcacctatattgaccctcttccggcattagtccacccgaaaacgggacgcctccatacccgcttcaaccaaacagccacggcgaccggtcgtttgtcctcctctgatccaaaccttcagaatattccagtacgtaccccattgggccagaagatccgcaaagcgtttgtagctgaggagggttggcgtttagtggccctcgattatagccaaattgaattacgtgtccttgcccatctttctggcgatgagaacctcatccgcgtgtttcaggaaggccgcgacattcacactcaaacggcaagctggatgtttggattatcagctgaagcgatcgatcctttgatgcgtcgtgcagcgaagaccatcaatttcggtgttctctacggtatgagtgccgcgcgtttgtcgcaggaattaggcattccctatgaagaagctgcggcgttcattcagcgctactttcaaagctatcccaaagttaaagcatggatcgagaagactctcgaagaaggccgcacacgtggttacgtagagaccttatttggacgtcgccgctatgttcccgatttaaacgctcgcgtgaaatctgtccgtgaagccgccgaacgcatggcgtggaacatgcctgtacagggcacggcagctgacctcatgaaacttgcaatggtgcgcctttttccacaattgcgtgaagttggtgcccgcatgctcttgcaggtccacgatgaactcttgttagaagcgccaaaagagcgtgcggaagaggtggcagccctcgcgaaagaggttatggaaggcgtgtggcccttagcggtgcctcttgaagtcgaagttggtattggcgaggattggttggctgccaaaggataatga

SEQ ID NO: 218 - protein, 841 aa, synthetic construct
  REGION 1..841: note = Variant of DNA polymerase I from Thermus sp. strain 2.9
MHHHHHHGGSGMLPLFEPKGRVLLVDGHHLAYRNFFALKGLTTSRGEPVQGVYGFAKSLLKALKEDGDVVIVVFDAKAPSFRHEAYEAYKAGRAPTPEDFPRQLALMKELVDLLGLERLEVPGFEADDVLATLAKKAEREGYEVQILTADRDLFQLLSPRISVLHPEGHRITPEWLWEKYGLRPEQWVDFRALAGDPSDNIPGVKGIGEKTALKLLKEWGSLENLLKNLDQVKPASVREKILAHLEDLKLSRELVRVRTDLPLEVDFRGRREPDWEGLKAFLERLEFGSLLHEFGLLESPLPAEEAPWPPPEGAFLGYRLSRPEPMWAELLALAASAQGRVYRAEDPHGALRGLKEVRGLLAKDLAVVALREGLDLPPTDDPMLLAYLLDSSNTTPEGVARRYGGEWTEDAGERALLAERLHANLLGRLQGEERLLWLYEEVEKPLSRVLAHMEATGVKLDVAYLEALSLEVAAEMRRLEEEVFRLAGHSFNLNSRDQLERVLFDELGLPPIGKTEKTGKRSTSAAVLEALREVHPIVDKILQYRELAKLKGTYIDPLPALVHPKTGRLHTRFNQTATATGRLSSSDPNLQNIPVRTPLGQKIRKAFVAEEGWRLVALDYSQIELRVLAHLSGDENLIRVFQEGRDIHTQTASWMFGLSAEAIDPLMRRAAKTINFGVLYGMSAARLSQELGIPYEEAAAFIQRYFQSYPKVKAWIEKTLEEGRTRGYVETLFGRRRYVPDLNARVKSVREAAERMAWNMPVQGTAADLMKLAMVRLFPQLREVGARMLLQVHDELLLEAPKERAEEVAALAKEVMEGVWPLAVPLEVEVGIGEDWLAAKG

SEQ ID NO: 219 - DNA, 2529 bp, synthetic construct
  misc_feature 1..2529: note = Variant of DNA polymerase I from Thermus sp. strain 2.9
  source 1..2529: mol_type = other DNA
atgcaccatcatcatcatcatggcggtagcggcatgttaccgttgttcgaacctaaaggtcgcgtgcttctggttgatggccatcatctcgcgtatcgtaacttctttgccctgaaaggattaaccaccagccgtggcgagccggtacagggtgtctacggctttgcaaagtcgctcctgaaagctctgaaagaagacggtgatgtggtgattgttgtctttgatgcgaaagcgccaagttttcgccacgaagcgtacgaagcttacaaagccgggcgtgctccaacgccggaagactttcctcgccaattggcgcttatgaaggaattagtggatttgcttggcctcgaacgcttggaagttcccggtttcgaggcagacgacgtattagcgactctcgcaaagaaagccgaacgtgagggctatgaagtccatatcttgacagcagatcgcgatcttttccagcttttatctccgcgcatttccgtgttacacccggaagggcatcgtatcaccccggaatggctctgggagaaatatggtttgcgtcccgaacaatgggtggattttcgcgccttagcgggcgatccgagcgacaatattccgggagttaaaggtatcggcgagaagacggcgctcaagctccttaaagaatgggggtcgttggagaacttgcttaagaatttagatcaggtcaaaccagcttcagtgcgtgagaagattcttgcacacctcgaagacctcaaattaagccgcgaattgtcgcgtgtacgcaccgatttgccgctcgaagttgatttccgtggccgccgcgaacctgactgggagggtcttaaagcgtttttagagcgtcttgaatttggttcgctcttgcatgaattcggccttttagaaagcccgttaccagccgaagaagcaccttggccaccgcccgaaggcgcgtttttaggttaccgtttgagtcgcccggaaccgatgtgggccgaattattggctcttgcagcgtctgcccagggacgtgtgtatcgcgcggaagaccctcatggtgcgctccgtggcctcaaagaagtccgtggactccttgccaaagacttagctgttgttgcattgcgcgaaggtcttgatttacctccgactgatgatccaatgcttcttgcgtacctcttggacccgtcaaacacgacgcccgaaggcgtagcccgtcgttacggcggcgagtggaccgaagatgcaggtgagcgcgcgttattggccgaacgtttgcacgccaatttattaggacgtttgcaaggcgaggaacgtctcctctggctttacgaagaagtggagaaaccattgagtcgcgtgctcgcgcatatggaagctaccggtgtcaaattagacgtggcgtatttggaggcactcagccttgaagttgctgccgaaatgcgccgcttggaggaagaagtattccgtttagcaggccactcctttaaccttaattctcgcgatcagttagaacgtgtgttgttcgatgaacttggtctccctcctatcggcaagacagagaagaccggtaaacgtagcacttcagcggcggttttagaagctcttcgcgaagtccatcccattgtggacaagatcttgcagtaccgcgaactcgcgaaattgaaaggcacctatattgaccgtcttccggcattagtccacccgaaaacgggacgcctccatacccgcttcaaccaaacagccacggcgaccggtcgtttgtcctcctctgatccaaaccttcagaatattccagtacgtaccccattgggccagaaaatccgcaaagcgtttgtagctgaggagggttggcgtttagtggccctcgattatagccaaattgaattacgtgtccttgcccatctttctggcgatgagaacctcatccgcgtgtttcaggaaggccgcgacattcacactcaaacggcaagctggatgtttggagtgtcagcggaagcgatcgatcctttgatgcgtcgtgcagcgaagaccatcaatttcggtgttctctacggtatgagtgcccatcgtttgtcgcaggaattaggcattccctatgaagaagctgcggcgttcattcagcgctactttcaaagctatcccaaagttaaagcatggatcgagaagactctcgaagaaggccgcacacgtggttacgtagagaccttatttggacgtcgccgctatgttcccgatttaaatgctcgcgtgaaatctgtccgtgaagccgccgaacgcatggcgttcaacatgcctgtacagggcacggcagctgacctcatgaaacttgcaatggtgcgcctttttccacaattgcgtgaagttggtgcccgcatgctcttgcaggtccacgatgaactcttgttagaagcgccaaaagagcgtgcggaagaggtggcagccctcgcgaaagaggttatggaaggcgtgtggcccttagcggtgcctcttgaagtcgaagttggtattggcgaggattggttggctgccaaaggataatga

SEQ ID NO: 220 - protein, 841 aa, synthetic construct
  REGION 1..841: note = Variant of DNA polymerase I from Thermus sp. strain 2.9
MHHHHHHGGSGMLPLFEPKGRVLLVDGHHLAYRNFFALKGLTTSRGEPVQGVYGFAKSLLKALKEDGDVVIVVFDAKAPSFRHEAYEAYKAGRAPTPEDFPRQLALMKELVDLLGLERLEVPGFEADDVLATLAKKAEREGYEVHILTADRDLFQLLSPRISVLHPEGHRITPEWLWEKYGLRPEQWVDFRALAGDPSDNIPGVKGIGEKTALKLLKEWGSLENLLKNLDQVKPASVREKILAHLEDLKLSRELSRVRTDLPLEVDFRGRREPDWEGLKAFLERLEFGSLLHEFGLLESPLPAEEAPWPPPEGAFLGYRLSRPEPMWAELLALAASAQGRVYRAEDPHGALRGLKEVRGLLAKDLAVVALREGLDLPPTDDPMLLAYLLDPSNTTPEGVARRYGGEWTEDAGERALLAERLHANLLGRLQGEERLLWLYEEVEKPLSRVLAHMEATGVKLDVAYLEALSLEVAAEMRRLEEEVFRLAGHSFNLNSRDQLERVLFDELGLPPIGKTEKTGKRSTSAAVLEALREVHPIVDKILQYRELAKLKGTYIDRLPALVHPKTGRLHTRFNQTATATGRLSSSDPNLQNIPVRTPLGQKIRKAFVAEEGWRLVALDYSQIELRVLAHLSGDENLIRVFQEGRDIHTQTASWMFGVSAEAIDPLMRRAAKTINFGVLYGMSAHRLSQELGIPYEEAAAFIQRYFQSYPKVKAWIEKTLEEGRTRGYVETLFGRRRYVPDLNARVKSVREAAERMAFNMPVQGTAADLMKLAMVRLFPQLREVGARMLLQVHDELLLEAPKERAEEVAALAKEVMEGVWPLAVPLEVEVGIGEDWLAAKG

SEQ ID NO: 221 - DNA, 2529 bp, synthetic construct
  misc_feature 1..2529: note = Variant of DNA polymerase I from Thermus sp. strain 2.9
  source 1..2529: mol_type = other DNA
atgcaccatcatcatcatcatggcggtagcggcatgttaccgttgttcgaacctaaaggtcgcgtgcttctggttgatggccatcatctcgcgtatcgtaacttctttgccctgaaaggattaaccaccagccgtggcgagccggtacagggtgtctacggctttgcaaagtcgctcctgaaagctctgaaagaagacggtgatgtggtgattgttgtctttgatgcgaaagcgccaagttttcgccacgaagcgtacgaagcttacaaagccgggcgtgctccaacgccggaagactttcctcgccaattggcgcttatgaaggaattagtggatttgcttggcctcgaacgcttggaagttcccggtttcgaggcagacgacgtattagcgactctcgcaaagaaagccgaacgtgagggctatgaagtccagatcttgacagcagatcgcgatcttttccagcttttatctccgcgcatttccgtgttacacccggaagggcatcgtatcaccccggaatggctctgggagaaatatggtttgcgtcccgaacaatgggtggattttcgcgccttagcgggcgatccgagcgacaatattccgggagttaaaggtatcggcgagaagacggcgctcaagctccttaaagaatgggggtcgttggagaacttgcttaagaatttagatcaggtcaaaccagcttcagtgcgtgagaagattcttgcacacctcgaagacctcaaattaagccgcgaattggtccgtgtacgcaccgatttgccgctcgaagttgatttccgtggccgccgcgaacctgactgggagggtcttaaagcgtttttagagcgtcttgaatttggttcgctcttgcatgaattcggccttttagaaagcccgttaccagccgaagaagcaccttggccaccgcccgaaggcgcgtttttaggttaccgtttgagtcgcccggaaccgatgtgggccgaattattggctcttgcagcgtctgcccagggacgtgtgtatcgcgcggaagaccctcatggtgcgctccgtggcctcaaagaagtccgtggactccttgccaaagacttagctgttgttgcattgcgcgaaggtcttgatttacctccgactgatgatccaatgcttcttgcgtacctcttggactcgtcaaacacgacgcccgaaggcgtagcccgtcgttacggcggcgagtggaccgaagatgcaggtgagcgcgcgttattggccgaacgtttgcacgccaatttattaggacgtttgcaaggcgaggaacgtctcctctggctttacgaagaagtggagaaaccattgagtcgcgtgctcgcgcatatggaagctaccggtgtcaaattagacgtggcgtatttggaggcactcagccttgaagtcgctgccgaactgcgccgcttggaggaagaagtattccgtttagcaggccactcctttaaccttaattctcgcgatcagttagaacgtgtgttgttcgatgaacttggtctccctcctatcggtaagacagagaagaccggtaaacgtagcacttcagcggcggttttagaagctcttcgcgaagtccatcccattgtggacaagatcttgcagtaccgcgaactcgcgaaattgaaaggcacctatattgaccgtcttccggcattagtccacccgaaaacgggacgcctccatacccgcttcaaccaaacagccacggcgaccggtcgtttgtcctcctctgatccaaaccttcagaatattccagtacgtaccccattgggccagcatatccgcaaagcgtttgtagctgaggagggttggcgtttagtggccctcgattatagccaaattgaattacgtgtccttgcccatctttctggcgatgagaacctcatccgcgtgtttcaggaaggccgcgacattcacactcaaacggcaagctggatgtttggactgtcatcggaagcgatcgatcctttgatgcgtcgtgcagcgaagaccatcaatttcggtgttctctacggtatgagtgcccatcgtttgtcgcaggaattaggcattccctatgaagaagctgcggcgttcattcagcgctactttcaaagctatcccaaagttaaagcatggatcgagaagactctcgaagaaggccgcacacgtggttacgtagagaccttatttggacgtcgccgctatgttcccgatttaaacgctcgcgtgaaatctgtccgtgaagccgccgaacgcatggcgtggaacatgcctgtacagggcacggcagctgacctcatgaaacttgcaatggtgcgcctttttccacaattgcgtgaagttggtgcccgcatgctcttgcaggtccacgatgaactcttgttagaagcgccaaaagagcgtgcggaagaggtggcagccctcgcgaaagaggttatggaaggcgtgtggcccttagcggtgcctcttgaagtcgaagttggtattggcgaggattggttggctgccaaaggataatga

SEQ ID NO: 222 - protein, 841 aa, synthetic construct
  REGION 1..841: note = Variant of DNA polymerase I from Thermus sp. strain 2.9
MHHHHHHGGSGMLPLFEPKGRVLLVDGHHLAYRNFFALKGLTTSRGEPVQGVYGFAKSLLKALKEDGDVVIVVFDAKAPSFRHEAYEAYKAGRAPTPEDFPRQLALMKELVDLLGLERLEVPGFEADDVLATLAKKAEREGYEVQILTADRDLFQLLSPRISVLHPEGHRITPEWLWEKYGLRPEQWVDFRALAGDPSDNIPGVKGIGEKTALKLLKEWGSLENLLKNLDQVKPASVREKILAHLEDLKLSRELVRVRTDLPLEVDFRGRREPDWEGLKAFLERLEFGSLLHEFGLLESPLPAEEAPWPPPEGAFLGYRLSRPEPMWAELLALAASAQGRVYRAEDPHGALRGLKEVRGLLAKDLAVVALREGLDLPPTDDPMLLAYLLDSSNTTPEGVARRYGGEWTEDAGERALLAERLHANLLGRLQGEERLLWLYEEVEKPLSRVLAHMEATGVKLDVAYLEALSLEVAAELRRLEEEVFRLAGHSFNLNSRDQLERVLFDELGLPPIGKTEKTGKRSTSAAVLEALREVHPIVDKILQYRELAKLKGTYIDRLPALVHPKTGRLHTRFNQTATATGRLSSSDPNLQNIPVRTPLGQHIRKAFVAEEGWRLVALDYSQIELRVLAHLSGDENLIRVFQEGRDIHTQTASWMFGLSSEAIDPLMRRAAKTINFGVLYGMSAHRLSQELGIPYEEAAAFIQRYFQSYPKVKAWIEKTLEEGRTRGYVETLFGRRRYVPDLNARVKSVREAAERMAWNMPVQGTAADLMKLAMVRLFPQLREVGARMLLQVHDELLLEAPKERAEEVAALAKEVMEGVWPLAVPLEVEVGIGEDWLAAKG

SEQ ID NO: 223 - DNA, 2529 bp, synthetic construct
  misc_feature 1..2529: note = Variant of DNA polymerase I from Thermus sp. strain 2.9
  source 1..2529: mol_type = other DNA
atgcaccatcatcatcatcatggcggtagcggcatgttaccgttgttcgaacctaaaggtcgcgtgcttctggttgatggccatcatctcgcgtatcgtaacttctttgccctgaaaggattaaccaccagccgtggcgagccggtacagggtgtctacggctttgcaaagtcgctcctgaaagctctgaaagaagacggtgatgtggtgattgttgtctttgatgcgaaagcgccaagttttcgccacgaagcgtacgaagcttacaaagccgggcgtgctccaacgccggaagactttcctcgccaattggcgcttatgaaggaattagtggatttgcttggcctcgaacgcttggaagttcccggtttcgaggcagacgacgtattagcgactctcgcaaagaaagccgaacgtgagggctatgaagtccagatcttgacagcagatcgcgatcttttccagcttttatctccgcgcgtcgcggtgttacacccggaagggcatcgcatcaccccggaatggctctgggagaaatatggtttgcgtcccgaacaatgggtggattttcgcgccttagcgggcgatccgagcgacaatattccgggagttaaaggtatcggcgagaagacggcgctcaagctccttaaagaatgggggtcgttggagaacttgcttaagaatttagatcaggtcaaaccagcttcagtgcgtgagaagattcttgcacacctcgaagacctcaaattaagccgcgaattgtcccgtgtacgcaccgatttgccgctcgaagttgatttccgtggccgccgcgaacctgactgggagggtcttaaagcgtttttagagcgtcttgaatttggttcgctcttgcatgaattcggccttttagaaagcccgttaccagccgaagaagcaccttggccaccgcccgaaggcgcgtttttaggttaccgtttgagtcgcccggaaccgatgtgggccgaattattggctcttgcagcgtctgcccagggacgtgtgtatcgcgcggaagaccctcatggtgcgctccgcggcctcaaagaagtccgtggactccttgccaaagacttagctgttgttgcattgcgcgaaggtcttgatttacctccgactgatgatccaatgcttcttgcgtacctcttggacccgtcaaacacgacgcccgaaggcgtagcccgtcgttacggcggcgagtggaccgaagatgcaggcgagcgcgcgttattggccgaacgtttgcacgccaatttattaggacgtttgcaaggcgaggaacgtctcctctggctttacgaagaagtggagaaaccattgagtcgcgtgctcgcgcatatggaagctaccggtgtcaaattagacgtggcgtatttggaggcactcagccttgaagttgctgccgaaatgcgccgcttggaggaagaagtattccgtttagcaggccactcctttaaccttaattctcgcgatcagttagaacgtgtgttgttcgatgaacttggtctccctcctatcggcaagacagagaagaccggtaaacgtagcacttcagcggcggttttagaagctcttcgcgaagtccatcccattgtggacaagatcttgcagtaccgcgaactcgcgaaattgaaaggcacctatattgaccctcttccggcattagtccacccgaaaacgggacgcctccatacccgcttcaaccaaacagccacggcgaccggtcgtttgtcctcctctgatccaaaccttcagaatattccagtacgtaccccattgggccagaagatccgcaaagcgtttgtagctgaggagggttggcgtttagtggccctcgattatagccaaattgaattacgtgtccttgcccatctttctggcgatgagaacctcatccgcgtgtttcaggaaggccgtgacattcacactcaaacggcaagctggatgtttggattaccgccggaagcgatcgatcctttgatgcgtcgtgcagcgaagaccgttaatttcggtgttctctacggtatgagtgcccatcgtttgtcgcaggaattaggcattccctatgaagaagctgcggcgttcattcagcgctactttcaaagctatcccaaagttaaagcatggatcgagaagactctcgaagaaggccgcacacgtggttacgtagagaccttatttggacgtcgccgctatgttcccgatttaaacgctcgcgtgaaatctgtccgtgaagccgccgaacgcatggcgttcaacatgcctgtacagggcacggcagctgacctcatgaaacttgcaatggtgcgcctttttccacaattgcgtgaagttggtgcccgcatgctcttgcaggtccacgatgaactcttgttagaagcgccaaaagagcgtgcggaagaggtggcagccctcgcgaaagaggttatggaaggcgtgtggcccttagcggtgcctcttgaagtcgaagttggtattggcgaggattggttggctgccaaaggataatga

SEQ ID NO: 224 - protein, 841 aa, synthetic construct
  REGION 1..841: note = Variant of DNA polymerase I from Thermus sp. strain 2.9
MHHHHHHGGSGMLPLFEPKGRVLLVDGHHLAYRNFFALKGLTTSRGEPVQGVYGFAKSLLKALKEDGDVVIVVFDAKAPSFRHEAYEAYKAGRAPTPEDFPRQLALMKELVDLLGLERLEVPGFEADDVLATLAKKAEREGYEVQILTADRDLFQLLSPRVAVLHPEGHRITPEWLWEKYGLRPEQWVDFRALAGDPSDNIPGVKGIGEKTALKLLKEWGSLENLLKNLDQVKPASVREKILAHLEDLKLSRELSRVRTDLPLEVDFRGRREPDWEGLKAFLERLEFGSLLHEFGLLESPLPAEEAPWPPPEGAFLGYRLSRPEPMWAELLALAASAQGRVYRAEDPHGALRGLKEVRGLLAKDLAVVALREGLDLPPTDDPMLLAYLLDPSNTTPEGVARRYGGEWTEDAGERALLAERLHANLLGRLQGEERLLWLYEEVEKPLSRVLAHMEATGVKLDVAYLEALSLEVAAEMRRLEEEVFRLAGHSFNLNSRDQLERVLFDELGLPPIGKTEKTGKRSTSAAVLEALREVHPIVDKILQYRELAKLKGTYIDPLPALVHPKTGRLHTRFNQTATATGRLSSSDPNLQNIPVRTPLGQKIRKAFVAEEGWRLVALDYSQIELRVLAHLSGDENLIRVFQEGRDIHTQTASWMFGLPPEAIDPLMRRAAKTVNFGVLYGMSAHRLSQELGIPYEEAAAFIQRYFQSYPKVKAWIEKTLEEGRTRGYVETLFGRRRYVPDLNARVKSVREAAERMAFNMPVQGTAADLMKLAMVRLFPQLREVGARMLLQVHDELLLEAPKERAEEVAALAKEVMEGVWPLAVPLEVEVGIGEDWLAAKG

SEQ ID NO: 225 - DNA, 2529 bp, synthetic construct
  misc_feature 1..2529: note = Variant of DNA polymerase I from Thermus sp. strain 2.9
  source 1..2529: mol_type = other DNA
atgcaccatcatcatcatcatggcggtagcggcatgttaccgttgttcgaacctaaaggtcgcgtgcttctggttgatggccatcatctcgcgtatcgtaacttctttgccctgaaaggattaaccaccagccgtggcgagccggtacagggtgtctacggctttgcaaagtcgctcctgaaagctctgaaagaagacggtgatgtggtgattgttgtctttgatgcgaaagcgccaagttttcgccacgaagcgtacgaagcttacaaagccgggcgtgctccaacgccggaagactttcctcgccaattggcgcttatgaaggaattagtggatttgcttggcctcgaacgcttggaagttcccggtttcgaggcagacgacgtattagcgactctcgcaaagaaagccgaacgtgagggctatgaagtccagatcttgacagcagatcgcgatcttttccagcttttatctccgcgcatttccgtgttacacccggaagggcatcgcatcaccccggaatggctctgggagaaatatggtttgcgtcccgaacaatgggtggattttcgcgccttagtaggcgatccgagcgacaatattccgggagttaaaggtatcggcgagaagacggcgctcaagctccttaaagaatgggggtcgttggagaacttgcttaagaatttagatcaggtcaaaccagagtcagtgcgtgagaagattcttgcacacctcgaagacctcaaattaagccgcgaattgtcccgtgtacgcaccgatttgccgctcgaagttgatttccgtggccgccgcgaacctgactgggagggtcttaaagcgtttttagagcgtcttgaatttggttcgctcttgcatgaattcggccttttagaaagcccgttaccagccgaagaagcaccttggccaccgcccgaaggcgcgtttttaggttaccgtttgagtcgcccggaaccgatgtgggccgaattattggctcttgcagcgtctgcccagggacgtgtgtatcgcgcggaagaccctcatggtgcgctccgtggcctcaaagaagtccgtggactccttgccaaagacttagctgttgttgcattgcgcgaaggtcttgatttacctccgactgatgatccaatgcttcttgcgtacctcttggacccgtcaaacacgacgcccgaaggcgtagcccgtcgttacggcggcgagtggaccgaagatgcaggcgagcgcgcgttattggccgaacgtttgcacgccaatttattaggacgtttgcaaggcgaggaacgtctcctctggctttacgaagaagtggagaaaccattgagtcgcgtgctcgcgcatatggaagctaccggtgtcaaattagacgtggcgtatttggaggcactcagccttgaagttgctgccgaaatgcgccgcttggaggaagaagtattccgtttagcaggccactcctttaaccttaattctcgcgatcagttagaacgtgtgttgttcgatgaacttggtctccctcctatcggcaagacagagaagaccggtaaacgtagcacttcagcggcggttttagaagctcttcgcgaagtccatcccattgtggacaagatcttgcagtaccgcgaactcgcgaaattgaaaggcacctatattgaccctcttccggcattagtccacccgaaaacgggacgcctccatacccgcttcaaccaaacagccacggcgaccggtcgtttgtcctcctctgatccaaaccttcagaatattccagtacgtaccccattgggccagaagatccgccgcgcgtttgtagctgaggagggttggcgtttagtggccctcgattatagccaaattgaattacgtgtccttgcccatctttctggcgatgagaacctcatccgcgtgtttcaggaaggccgcgacattcacactcaaacggcaagctggatgtttggattatcggcggaagcgatcgatcctttgatgcgtcgtgcagcgaagaccatcaatttcggtgttctctacggtatgagtgcccatcgtttgtcgcaggaattaggcattccctatgaagaagctgcggcgttcattcagcgctactttcaaagctatcccaaagttaaagcatggatcgagaagactctcgaagaaggccgcacacgtggttacgtagagaccttatttggacgtcgccgctatgttcccgatttaaacgctcgcgtgaaatctgtccgtgaagccgccgaacgcatggcgttcaacatgcctgtacagggcacggcagctgacctcatgaaacttgcaatggtgcgcctttttccacaattgcgtgaagttggtgcccgcatgctcttgcaggtccacgatgaactcttgttagaagcgccaaaagagcgtgcggaagaggtggcagccctcgcgaaagaggttatggaaggcgtgtggcccttagcggtgcctcttgaagtcgaagttggtattggcgaggattggttggctgccaaaggataatga

SEQ ID NO: 226 - protein, 841 aa, synthetic construct
  REGION 1..841: note = Variant of DNA polymerase I from Thermus sp. strain 2.9
MHHHHHHGGSGMLPLFEPKGRVLLVDGHHLAYRNFFALKGLTTSRGEPVQGVYGFAKSLLKALKEDGDVVIVVFDAKAPSFRHEAYEAYKAGRAPTPEDFPRQLALMKELVDLLGLERLEVPGFEADDVLATLAKKAEREGYEVQILTADRDLFQLLSPRISVLHPEGHRITPEWLWEKYGLRPEQWVDFRALVGDPSDNIPGVKGIGEKTALKLLKEWGSLENLLKNLDQVKPESVREKILAHLEDLKLSRELSRVRTDLPLEVDFRGRREPDWEGLKAFLERLEFGSLLHEFGLLESPLPAEEAPWPPPEGAFLGYRLSRPEPMWAELLALAASAQGRVYRAEDPHGALRGLKEVRGLLAKDLAVVALREGLDLPPTDDPMLLAYLLDPSNTTPEGVARRYGGEWTEDAGERALLAERLHANLLGRLQGEERLLWLYEEVEKPLSRVLAHMEATGVKLDVAYLEALSLEVAAEMRRLEEEVFRLAGHSFNLNSRDQLERVLFDELGLPPIGKTEKTGKRSTSAAVLEALREVHPIVDKILQYRELAKLKGTYIDPLPALVHPKTGRLHTRFNQTATATGRLSSSDPNLQNIPVRTPLGQKIRRAFVAEEGWRLVALDYSQIELRVLAHLSGDENLIRVFQEGRDIHTQTASWMFGLSAEAIDPLMRRAAKTINFGVLYGMSAHRLSQELGIPYEEAAAFIQRYFQSYPKVKAWIEKTLEEGRTRGYVETLFGRRRYVPDLNARVKSVREAAERMAFNMPVQGTAADLMKLAMVRLFPQLREVGARMLLQVHDELLLEAPKERAEEVAALAKEVMEGVWPLAVPLEVEVGIGEDWLAAKG

SEQ ID NO: 227 - DNA, 2529 bp, synthetic construct
  misc_feature 1..2529: note = Variant of DNA polymerase I from Thermus sp. strain 2.9
  source 1..2529: mol_type = other DNA
atgcaccatcatcatcatcatggcggtagcggcatgttaccgttgttcgaacctaaaggtcgcgtgcttctggttgatggccatcatctcgcgtatcgtaacttctttgccctgaaaggattaaccaccagccgtggcgagccggtacagggtgtctacggctttgcaaagtcgctcctgaaagctctgaaagaagacggtgatgtggtgattgttgtctttgatgcgaaagcgccaagttttcgccacgaagcgtacgaagcttacaaagccgggcgtgctccaacgccggaagactttcctcgccaattggcgcttatgaaggaattagtggatttgcttggcctcgaacgcttggaagttcccggtttcgaggcagacgacgtattagcgactctcgcaaagaaagccgaacgtgagggctatgaagtccagatcttgacagcagatcgcgatcttttccagcttttatctccgcgcatcgcggtgttacacccggaagggcatcgtatcaccccggaatggctctgggagaaatatggtttgcgtcccgaacaatgggtggattttcgcgccttagcaggcgatccgagcgacaatattccgggagttaaaggtatcggcgagaagacggcgctcaagctccttaaagaatgggggtcgttggagaacttgcttaagaatttagatcaggtcaaaccagcttcagtgcgtgagaagattcttgcacacctcgaagacctcaaattaagccgcgaattgtcccgtgtacgcaccgatttgccgctcgaagttgatttccgtggccgccgcgaacctgactgggagggtcttaaagcgtttttagagcgtcttgaatttggttcgctcttgcatgaattcggccttttagaaagcccgttaccagccgaagaagcaccttggccaccgcccgaaggcgcgtttttaggttaccgtttgagtcgcccggaaccgatgtgggccgaattattggctcttgcagcgtctgcccagggacgtgtgtatcgcgcggaagaccctcatggtgcgctccgcggcctcaaagaagtccgtggactccttgccaaagacttagctgttgttgcattgcgcgaaggtcttgatttacctccgactgatgatccaatgcttcttgcgtacctcttggacccgtcaaacacgacgcccgaaggcgtagcccgtcgttacggcggcgagtggaccgaagatgcaggcgagcgcgcgttattggccgaacgtttgcaccagaatttattaggacgtttgcaaggcgaggaacgtctcctctggctttacgaagaagtggagaaaccattgagtcgcgtgctcgcgcatatggaagctaccggtgtcaaattagacgtggcgtatttggaggcactcagccttgaagttgctgccgaaatgcgccgcttggaggaagaagtattccgtttagcaggccactcctttaaccttaattctcgcgatcagttagaacgtgtgttgttcgatgaacttggtctccctcctatcggcaagacagagaagaccggtaaacgtagcacttcagcggcggttttagaagctcttcgcgaagtccatcccattgtggacaagatcttgcagtaccgcgaactcgcgaaattgaaaggcacctatattgaccctcttccggcattagtccacccgaaaacgggacgcctccatacccgcttcaaccaaacagccacggcgaccggtcgtttgtcctcctctgatccaaaccttcagaatattccagtacgtaccccattgggccagaagatccgcaaagcgtttgtagctgaggagggttggcgtttagtggccctcgattatagccaaattgaattacgtgtccttgcccatctttctggcgatgagaacctcatccgcgtgtttcaggaaggcaaagacattcacactcaaacggcaagctggatgtttggattatcagctgaagcgatcgatcctttgatgcgtcgtgcagcgaagaccatcaatttcggtgttctctacggtatgagtgcccatcgtttgtcgcaggaattaggcattccctatgaagaagctgcggcgttcattcagcgctactttcaaagctatcccaaagttaaagcatggatcgagaagactctcgaagaaggccgcacacgtggttacgtagagaccttatttggacgtcgccgctatgttcccgatttaaacgctcgcgtgaaatctgtccgtgaagccgccgaacgcatggcgttcaacatgcctgtacagggcacggcagctgacctcatgaaacttgcaatggtgcgcctttttccacaattgcgtgaagttggtgcccgcatgctcttgcaggtccacgatgaactcttgttagaagcgccaaaagagcgtgcggaagaggtggcagccctcgcgaaagaggttatggaaggcgtgtggcccttagcggtgcctcttgaagtcgaagttggtattggcgaggattggttggctgccaaaggataatga

SEQ ID NO: 228 - protein, 841 aa, synthetic construct
  REGION 1..841: note = Variant of DNA polymerase I from Thermus sp. strain 2.9
MHHHHHHGGSGMLPLFEPKGRVLLVDGHHLAYRNFFALKGLTTSRGEPVQGVYGFAKSLLKALKEDGDVVIVVFDAKAPSFRHEAYEAYKAGRAPTPEDFPRQLALMKELVDLLGLERLEVPGFEADDVLATLAKKAEREGYEVQILTADRDLFQLLSPRIAVLHPEGHRITPEWLWEKYGLRPEQWVDFRALAGDPSDNIPGVKGIGEKTALKLLKEWGSLENLLKNLDQVKPASVREKILAHLEDLKLSRELSRVRTDLPLEVDFRGRREPDWEGLKAFLERLEFGSLLHEFGLLESPLPAEEAPWPPPEGAFLGYRLSRPEPMWAELLALAASAQGRVYRAEDPHGALRGLKEVRGLLAKDLAVVALREGLDLPPTDDPMLLAYLLDPSNTTPEGVARRYGGEWTEDAGERALLAERLHQNLLGRLQGEERLLWLYEEVEKPLSRVLAHMEATGVKLDVAYLEALSLEVAAEMRRLEEEVFRLAGHSFNLNSRDQLERVLFDELGLPPIGKTEKTGKRSTSAAVLEALREVHPIVDKILQYRELAKLKGTYIDPLPALVHPKTGRLHTRFNQTATATGRLSSSDPNLQNIPVRTPLGQKIRKAFVAEEGWRLVALDYSQIELRVLAHLSGDENLIRVFQEGKDIHTQTASWMFGLSAEAIDPLMRRAAKTINFGVLYGMSAHRLSQELGIPYEEAAAFIQRYFQSYPKVKAWIEKTLEEGRTRGYVETLFGRRRYVPDLNARVKSVREAAERMAFNMPVQGTAADLMKLAMVRLFPQLREVGARMLLQVHDELLLEAPKERAEEVAALAKEVMEGVWPLAVPLEVEVGIGEDWLAAKG

SEQ ID NO: 229 - DNA, 2529 bp, synthetic construct
  misc_feature 1..2529: note = Variant of DNA polymerase I from Thermus sp. strain 2.9
  source 1..2529: mol_type = other DNA
atgcaccatcatcatcatcatggcggtagcggcatgttaccgttgttcgaacctaaaggtcgcgtgcttctggttgatggccatcatctcgcgtatcgtaacttctttgccctgaaaggattaaccaccagccgtggcgagccggtacagggtgtctacggctttgcaaagtcgctcctgaaagctctgaaagaagacggtgatgtggtgattgttgtctttgatgcgaaagcgccaagttttcgccacgaagcgtacgaagcttacaaagccgggcgtgctccaacgccggaagactttcctcgccaattggcgcttatgaaggaattagtggatttgcttggcctcgaacgcttggaagttcccggtttcgaggcagacgacgtattagcgactctcgcaaagaaagccgaacgtgagggctatgaagtccagatcttgacagcagatcgcgatcttttccagcttttatctccgcgcatttccgtgttacacccggaagggcatcgtatcaccccggaatggctctgggagaaatatggtttgcgtcccgaacaatgggtggattttcgcgccttagcgggcgatccgagcgacaatattccgggagttaaaggtatcggcgagaagacggcgctcaagctccttaaagaatgggggtcgttggagaacttgcttaagaatttagatcaggtcaaaccagcttcagtgcgtgagaagattcttgcacacctcgaagacctcaaattaagccgcgaattggtccgtgtacgcaccgctttgccgctcgaagttgatttccgtggccgccgcgaacctgactgggagggtcttaaagcgtttttagagcgtcttgaatttggttcgctcttgcatgaattcggccttttagaaagcccgttaccagccgaagaagcaccttggccaccgcccgaaggcgcgtttttaggttaccgtttgagtcgcccggaaccgatgtgggccgaattattggctcttgcagcgtctgcccagggacgtgtgtatcgcgcggaagaccctcatggtgcgctccgtggcctcaaagaagtccgtggactccttgccaaagacttagctgttgttgcattgcgcgaaggtcttgatttacctccgactgatgatccaatgcttcttgcgtacctcttggacccgtcaaacacgacgcccgaacgcgtagcccgtcgttacggcggcgagtggaccgaagatgcaggtgagcgcgcgttattggccgaacgtttgcacgccaatttattaggacgtttgcaaggcgaggaacgtctcctctggctttacgaagaagtggagaaaccattgagtcgcgtgctcgcgcatatggaagctaccggtgtcaaattagacgtggcgtatttggaggcactcagccttgaagttgctgccgaaatgcgccgcttggaggaagaagtattccgtttagcaggccactcctttaaccttaattctcgcgatcagttagaacgtgtgttgttcgatgaacttggtctccctcctatcggcaagacagagaagaccggtaaacgtagcacttcagcggcggttttagaagctcttcgcgaagtccatcccattgtggacaagatcttgcagtaccgcgaactcgcgaaattgaaaggcacctatattgaccgtcttccggcattagtccacccgaaaacgggacgcctccatacccgcttcaaccaaacagccacggcgaccggtcgtttgtcctcctctgatccaaaccttcagaatattccagtacgtaccccattgggccagaagatccgcaaagcgtttgtagctgaggagggttggcgtttagtggccctcgattatagccaaattgaattacgtgtccttgcccatctttctggcgatgagaacctcatccgcgtgtttcaggaaggccgcgacattcacactcaaacggcaagctggatgtttggattatcagctgaagcgatcgatcctttgatgcgtcgtgcagcgaagaccatcaatttcggtgttctctacggtatgagtgcccatcgtttgtcgcaggaattaggcattccctatgaagaagctgcggcgttcattcagcgctactttcaaagctatcccaaagttaaagcatggatcgagaagactctcgaagaaggccgcacacgtggttacgtagagaccttatttggacgtcgccgctatgttcccgatttaaacgctcgcgtgaaatctgtccgtgaagccgccgaacgcatggcgttcaacatgcctgtacagggcacggcagctgacctcatgaaacttgcaatggtgcgcctttttccacaattgcgtgaagttggtgcccgcatgctcttgcaggtccacgatgaactcttgttagaagcgccaaaagagcgtgcggaagaggtggcagccctcgcgaaagaggttatggaaggcgtgtggcccttagcggtgcctcttgaagtcgaagttggtattggcgaggattggttggctgccaaaggataatga

SEQ ID NO: 230 - protein, 841 aa, synthetic construct
  REGION 1..841: note = Variant of DNA polymerase I from Thermus sp. strain 2.9
MHHHHHHGGSGMLPLFEPKGRVLLVDGHHLAYRNFFALKGLTTSRGEPVQGVYGFAKSLLKALKEDGDVVIVVFDAKAPSFRHEAYEAYKAGRAPTPEDFPRQLALMKELVDLLGLERLEVPGFEADDVLATLAKKAEREGYEVQILTADRDLFQLLSPRISVLHPEGHRITPEWLWEKYGLRPEQWVDFRALAGDPSDNIPGVKGIGEKTALKLLKEWGSLENLLKNLDQVKPASVREKILAHLEDLKLSRELVRVRTALPLEVDFRGRREPDWEGLKAFLERLEFGSLLHEFGLLESPLPAEEAPWPPPEGAFLGYRLSRPEPMWAELLALAASAQGRVYRAEDPHGALRGLKEVRGLLAKDLAVVALREGLDLPPTDDPMLLAYLLDPSNTTPERVARRYGGEWTEDAGERALLAERLHANLLGRLQGEERLLWLYEEVEKPLSRVLAHMEATGVKLDVAYLEALSLEVAAEMRRLEEEVFRLAGHSFNLNSRDQLERVLFDELGLPPIGKTEKTGKRSTSAAVLEALREVHPIVDKILQYRELAKLKGTYIDRLPALVHPKTGRLHTRFNQTATATGRLSSSDPNLQNIPVRTPLGQKIRKAFVAEEGWRLVALDYSQIELRVLAHLSGDENLIRVFQEGRDIHTQTASWMFGLSAEAIDPLMRRAAKTINFGVLYGMSAHRLSQELGIPYEEAAAFIQRYFQSYPKVKAWIEKTLEEGRTRGYVETLFGRRRYVPDLNARVKSVREAAERMAFNMPVQGTAADLMKLAMVRLFPQLREVGARMLLQVHDELLLEAPKERAEEVAALAKEVMEGVWPLAVPLEVEVGIGEDWLAAKG

SEQ ID NO: 231 - DNA, 2529 bp, synthetic construct
  misc_feature 1..2529: note = Variant of DNA polymerase I from Thermus sp. strain 2.9
  source 1..2529: mol_type = other DNA
atgcaccatcatcatcatcatggcggtagcggcatgttaccgttgttcgaacctaaaggtcgcgtgcttctggttgatggccatcatctcgcgtatcgtaacttctttgccctgaaaggattaaccaccagccgtggcgagccggtacagggtgtctacggctttgcaaagtcgctcctgaaagctctgaaagaagacggtgatgtggtgattgttgtctttgatgcgaaagcgccaagttttcgccacgaagcgtacgaagcttacaaagccgggcgtgctccaacgccggaagactttcctcgccaattggcgcttatgaaggaattagtggatttgcttggcctcgaacgcttggaagttcccggtttcgaggcagacgacgtattagcgactctcgcaaagaaagccgaacgtgagggctatgaagtccagatcttgacagcagatcgcgatcttttccagcttttatctccgcgcatttccgtgttacacccggaagggcatcgtatcaccccggaatggctctgggagaaatatggtttgcgtcccgaacaatgggtggattttcgcgccttagcgggcgatccgagcgacaatattccgggagttaaaggtatcggcgagaagacggcgctcaagctccttaaagaatgggggtcgttggagaacttgcttaagaatttagatcaggtcaaaccagcttcagtgcgtgagaagattcttgcacacctcgaagacctcaaattaagccgcgaattgtcccgtgtacgcaccgatttgccgctcgaagttgatttccgtggccgccgcgaacctgactgggagggtcttaaagcgtttttagagcgtcttgaatttggttcgctcttgcatgaattcggccttttagaaagcccgttaccagccgaagaagcaccttggccaccgcccgaaggcgcgtttttaggttaccgtttgagtcgcccggaaccgatgtgggccgaattattggctcttgcagcgtctgcccagggacgtgtgtatcgcgcggaagaccctcatggtgcgctccgtggcctcaaagaagtccgtggactccttgccaaagacttagctgttgttgcattgcgcgaaggtcttgatttacaaccgactgatgatccaatgcttcttgcgtacctcttggacccgtcaaacacgacgcccgaaggcgtagcccgtcgttacggcggcgagtggaccgaagatgcaggtgagcgcgcgttattggccgaacgtttgcacgccaatttattaggacgtttgcaaggcgaggaacgtctcctctggctttacgaagaagtggagaaaccattgagtcgcgtgctcgcgcatatggaagctaccggtgtcaaattagacgtggcgtatttggaggcactcagccttgaagttgctgccgaaatgcgccgcttggaggaagaagtattccgtttagcaggccactcctttaaccttaattctcgcgatcagttagaacgtgtgttgttcgatgaacttggtctccctcctatcggcaagacagagaagaccggtaaacgtagcacttcagcggcggttttagaagctcttcgcgaagtccatcccattgtggacaagatcttgcagtaccgcgaactcgcgaaattgaaaggcacctatattgaccctcttccggcattagtccacccgaaaacgggacgcctccatacccgcttcaaccaaacagccacggcgaccggtcgtttgtcctcctctgatccaaaccttcagaatattccagtacgtaccccattgggccagaagatccgcaaagcgtttgtagctgaggagggttggcgtttagtggccctcgattatagccaaattgaattacgtgtccttgcccatctttctggcgatgagaacctcatccgcgtgtttcaggaaggccgcgacattcacactcaaacggcaagctggatgtttggattatcagctgaagcgatcgatcctttgatgcgtcgtgcagcgaagaccatcaatttcggtgttctctacggtatgagtgcccatcgtttgtcgcaggaattaggcattccctatgaagaagctgcggcgttcattcagcgctactttcaaagctatcccaaagttaaagcatggatcgagaagactctcgaagaaggccgcacacgtggttacgtagagaccttatttggacgtcgccgctatgttcccgatttaaacgctcgcgtgaaatctgtccgtgaagccgccgaacgcatggcgttcaacatgcctgtacagggcacggcagctgacctcatgaaacttgcaatggtgcgcctttttccacaattgcgtgaagttggtgcccgcatgctcttgcaggtccacgatgaactcttgttagaagcgccaaaagagcgtgcggaagaggtggcagccctcgcgaaagaggttatggaaggcgtgtggcccttagcggtgcctcttgaagtcgaagttggtattggcgaggattggttggctgccaaaggataatga

SEQ ID NO: 232 - protein, 841 aa, synthetic construct
  REGION 1..841: note = Variant of DNA polymerase I from Thermus sp. strain 2.9
MHHHHHHGGSGMLPLFEPKGRVLLVDGHHLAYRNFFALKGLTTSRGEPVQGVYGFAKSLLKALKEDGDVVIVVFDAKAPSFRHEAYEAYKAGRAPTPEDFPRQLALMKELVDLLGLERLEVPGFEADDVLATLAKKAEREGYEVQILTADRDLFQLLSPRISVLHPEGHRITPEWLWEKYGLRPEQWVDFRALAGDPSDNIPGVKGIGEKTALKLLKEWGSLENLLKNLDQVKPASVREKILAHLEDLKLSRELSRVRTDLPLEVDFRGRREPDWEGLKAFLERLEFGSLLHEFGLLESPLPAEEAPWPPPEGAFLGYRLSRPEPMWAELLALAASAQGRVYRAEDPHGALRGLKEVRGLLAKDLAVVALREGLDLQPTDDPMLLAYLLDPSNTTPEGVARRYGGEWTEDAGERALLAERLHANLLGRLQGEERLLWLYEEVEKPLSRVLAHMEATGVKLDVAYLEALSLEVAAEMRRLEEEVFRLAGHSFNLNSRDQLERVLFDELGLPPIGKTEKTGKRSTSAAVLEALREVHPIVDKILQYRELAKLKGTYIDPLPALVHPKTGRLHTRFNQTATATGRLSSSDPNLQNIPVRTPLGQKIRKAFVAEEGWRLVALDYSQIELRVLAHLSGDENLIRVFQEGRDIHTQTASWMFGLSAEAIDPLMRRAAKTINFGVLYGMSAHRLSQELGIPYEEAAAFIQRYFQSYPKVKAWIEKTLEEGRTRGYVETLFGRRRYVPDLNARVKSVREAAERMAFNMPVQGTAADLMKLAMVRLFPQLREVGARMLLQVHDELLLEAPKERAEEVAALAKEVMEGVWPLAVPLEVEVGIGEDWLAAKG

SEQ ID NO: 233 - DNA, 2529 bp, synthetic construct
  misc_feature 1..2529: note = Variant of DNA polymerase I from Thermus sp. strain 2.9
  source 1..2529: mol_type = other DNA
atgcaccatcatcatcatcatggcggtagcggcatgttaccgttgttcgaacctaaaggtcgcgtgcttctggttgatggccatcatctcgcgtatcgtaacttctttgccctgaaaggattaaccaccagccgtggcgagccggtacagggtgtctacggctttgcaaagtcgctcctgaaagctctgaaagaagacggtgatgtggtgattgttgtctttgatgcgaaagcgccaagttttcgccacgaagcgtacgaagcttacaaagccgggcgtgctccaacgccggaagactttcctcgccaattggcgcttatgaaggaattagtggatttgcttggcctcgaacgcttggaagttcccggtttcgaggcagacgacgtattagcgactctcgcaaagaaagccgaacgtgagggctatgaagtccagatcttgacagcagatcgcgatcttttccagcttttatctccgcgcatttccgtgttacacccggaagggcatcgtatcaccccggaatggctctgggagaaatatggtttgcgtcccgaacaatgggtggattttcgcgccttagcgggcgatccgagcgacaatattccgggagttaaaggtatcggcgagaagacggcgctcaagctccttaaagaatgggggtcgttggagaacttgcttaagaatttagatcaggtcaaaccagcttcagtgcgtgagaagattcttgcacacctcgaagacctcaaattaagccgcgaattgtcgcgtgtacgcaccgatttgccgctcgaagttgatttccgtggccgccgcgaacctgactgggagggtcttaaagcgtttttagagcgtcttgaatttggttcgctcttgcatgaattcggccttttagaaagcccgttaccagccgaagaagcaccttggccaccgcccgaaggcgcgtttttaggttaccgtttgagtcgcccggaaccgatgtgggccgaattattggctcttgcagcgtctgcccagggacgtgtgtatcgcgcggaagaccctcatggtgcgctccgtggcctcaaagaagtccgtggactccttgccaaagacttagctgttgttgcattgcgcgaaggtcttgatttacctccgactgatgatccaatgcttcttgcgtacctcttggacccgtcaaacacgacgcccgaaggcgtagcccgtcgttacggcggcgagtggaccgaagatgcaggtgagcgcgcgttattggccgaacgtttgcacgccaatttattaggacgtttgcaaggcgaggaacgtctcctctggctttacgaagaagtggagaaaccattgagtcgcgtgctcgcgcatatggaagctaccggtgtcaaattagacgtggcgtatttggaggcactcagccttgaagccgctgccgaaatgcgccgcttggaggaagaagtattccgtttagcaggccactcctttaaccttaattctcgcgatcagttagaacgtgtgttgttcgatgaacttggtctccctcctatcaccaagacagagaagaccggtaaacgtagcacttcagcggcggttttagaagctcttcgcgaagtccatcccattgtggacaagatcttgcagtaccgcgaactcgcgaaattgaaaggcacctatattgaccgtcttccggcattagtccacccgaaaacgggacgcctccatacccgcttcaaccaaacagccacggcgaccggtcgtttgtcctcctctgatccaaaccttcagaatattccagtacgtaccccattgggccagaaaatccgcaaagcgtttgtagctgaggagggttggcgtttagtggccctcgattatagccaaattgaattacgtgtccttgcccatctttctggcgatgagaacctcatccgcgtgtttcaggaaggccgcgacattcacactcaaacggcaagctggatgtttggactgtcatcggaagcgatcgatcctttgatgcgtcgtgcagcgaagaccatcaatttcggtgttctctacggtatgagtgccgcgcgtttgtcgcaggaattaggcattccctatgaagaagctgcggcgttcattcagcgctactttcaaagctatcccaaagttaaagcatggatcgagaagactctcgaagaaggccgcacacgtggttacgtagagaccttatttggacgtcgccgctatgttcccgatttaaatgctcgcgtgaaatctgtccgtgaagccgccgaacgcatggcgtttaacatgcctgtacagggcacggcagctgacctcatgaaacttgcaatggtgcgcctttttccacaattgcgtgaagttggtgcccgcatgctcttgcaggtccacgatgaactcttgttagaagcgccaaaagagcgtgcggaagaggtggcagccctcgcgaaagaggttatggaaggcgtgtggcccttagcggtgcctcttgaagtcgaagttggtattggcgaggattggttggctgccaaaggataatga

SEQ ID NO: 234 - protein, 841 aa, synthetic construct
  REGION 1..841: note = Variant of DNA polymerase I from Thermus sp. strain 2.9
MHHHHHHGGSGMLPLFEPKGRVLLVDGHHLAYRNFFALKGLTTSRGEPVQGVYGFAKSLLKALKEDGDVVIVVFDAKAPSFRHEAYEAYKAGRAPTPEDFPRQLALMKELVDLLGLERLEVPGFEADDVLATLAKKAEREGYEVQILTADRDLFQLLSPRISVLHPEGHRITPEWLWEKYGLRPEQWVDFRALAGDPSDNIPGVKGIGEKTALKLLKEWGSLENLLKNLDQVKPASVREKILAHLEDLKLSRELSRVRTDLPLEVDFRGRREPDWEGLKAFLERLEFGSLLHEFGLLESPLPAEEAPWPPPEGAFLGYRLSRPEPMWAELLALAASAQGRVYRAEDPHGALRGLKEVRGLLAKDLAVVALREGLDLPPTDDPMLLAYLLDPSNTTPEGVARRYGGEWTEDAGERALLAERLHANLLGRLQGEERLLWLYEEVEKPLSRVLAHMEATGVKLDVAYLEALSLEAAAEMRRLEEEVFRLAGHSFNLNSRDQLERVLFDELGLPPITKTEKTGKRSTSAAVLEALREVHPIVDKILQYRELAKLKGTYIDRLPALVHPKTGRLHTRFNQTATATGRLSSSDPNLQNIPVRTPLGQKIRKAFVAEEGWRLVALDYSQIELRVLAHLSGDENLIRVFQEGRDIHTQTASWMFGLSSEAIDPLMRRAAKTINFGVLYGMSAARLSQELGIPYEEAAAFIQRYFQSYPKVKAWIEKTLEEGRTRGYVETLFGRRRYVPDLNARVKSVREAAERMAFNMPVQGTAADLMKLAMVRLFPQLREVGARMLLQVHDELLLEAPKERAEEVAALAKEVMEGVWPLAVPLEVEVGIGEDWLAAKG

SEQ ID NO: 235 - DNA, 2529 bp, synthetic construct
  misc_feature 1..2529: note = Variant of DNA polymerase I from Thermus sp. strain 2.9
  source 1..2529: mol_type = other DNA
atgcaccatcatcatcatcatggcggtagcggcatgttaccgttgttcgaacctaaaggtcgcgtgcttctggttgatggccatcatctcgcgtatcgtaacttctttgccctgaaaggattaaccaccagccgtggcgagccggtacagggtgtctacggctttgcaaagtcgctcctgaaagctctgaaagaagacggtgatgtggtgattgttgtctttgatgcgaaagcgccaagttttcgccacgaagcgtacgaagcttacaaagccgggcgtgctccaacgccggaagactttcctcgccaattggcgcttatgaaggaattagtggatttgcttggcctcgaacgcttggaagttcccggtttcgaggcagacgacgtattagcgactctcgcaaagaaagccgaacgtgagggctatgaagtccagatcttgacagcagatcgcgatcttttccagcttttatctccgcgcatttccgtgttacacccggaagggcatcgcatcaccccggaatggctctgggagaaatatggtttgcgtcccgaacaatgggtggattttcgcgccttagtaggcgatccgagcgacaatattccgggagttaaaggtatcggcgagaagacggcgctcaagctccttaaagaatgggggtcgttggagaacttgcttaagaatttagatcaggtcaaaccagagtcagtgcgtgagaagattcttgcacacctcgaagacctcaaattaagcctggaattgtcccgtgtacgcaccgatttgccgctcgaagttgatttccgtggccgccgcgaacctgactgggagggtcttaaagcgtttttagagcgtcttgaatttggttcgctcttgcatgaattcggccttttagaaagcccgttaccagccgaagaagcaccttggccaccgcccgaaggcgcgtttttaggttacgttttgagtcgcccggaaccgatgtgggccgaattattggctcttgcagcgtctgcccagggacgtgtgtatcgcgcggaagaccctcatggtgcgctccgtggcctcaaagaagtccgtggactccttgccaaagacttagctgttgttgcattgcgcgaaggtcttgatttacctccgactgatgatccaatgcttcttgcgtacctcttggacccgtcaaacacgacgcccgaaggcgtagcccgtcgttacggcggcgagtggaccgaagatgcaggtgagcgcgcgttattggccgaacgtttgcaccagaatttattaggacgtttgcaaggcgaggaacgtctcctctggctttacgaagaagtggagaaaccattgagtcgcgtgctcgcgcatatggaagctaccggtgtcaaattagacgtggcgtatttggaggcactcagccttgaagttgctgccgaaatgcgccgcttggaggaagaagtattccgtttagcaggccactcctttaaccttaattctcgcgatcagttagaacgtgtgttgttcgatgaacttggtctccctcctatcggcaagacagagaagaccggtaaacgtagcacttcagcggcggttttagaagctcttcgcgaagtccatcccattgtggacaagatcttgcagtaccgcgaactcgcgaaattgaaaggcacctatattgaccctcttccggcattagtccacccgaaaacgggacgcctccatacccgcttcaaccaaacagccacggcgaccggtcgtttgtcctcctctgatccaaaccttcagaatattccagtacgtaccccattgggccagaagatccgcaaagcgtttgtagctgaggagggttggcgtttagtggccctcgattatagccaaattgaattacgtgtccttgcccatctttctggcgatgagaacctcatccgcgtgtttcaggaaggccgcgacattcacactcaaacggcaagctggatgtttggattatcagctgaagcgatcgatcctttgatgcgtcgtgcagcgaagaccatcaatttcggtgttctctacggtatgagtgcccatcgtttgtcgcaggaattaggcattccctatgaagaagctgcggcgttcattcagcgctactttcaaagctatcccaaagttaaagcatggatcgagaagactctcgaagaaggccgcacacgtggttacgtagagaccttatttggacgtcgccgctatgttcccgatttaaacgctcgcgtgaaatctgtccgtgaagccgccgaacgcatggcgttcaacatgcctgtacagggcacggcagctgacctcatgaaacttgcaatggtgcgcctttttccacaattgcgtgaagttggtgcccgcatgctcttgcaggtccacgatgaactcttgttagaagcgccaaaagagcgtgcggaagaggtggcagccctcgcgaaagaggttatggaaggcgtgtggcccttagcggtgcctcttgaagtcgaagttggtattggcgaggattggttggctgccaaaggataatga

SEQ ID NO: 236 - protein, 841 aa, synthetic construct
  REGION 1..841: note = Variant of DNA polymerase I from Thermus sp. strain 2.9
MHHHHHHGGSGMLPLFEPKGRVLLVDGHHLAYRNFFALKGLTTSRGEPVQGVYGFAKSLLKALKEDGDVVIVVFDAKAPSFRHEAYEAYKAGRAPTPEDFPRQLALMKELVDLLGLERLEVPGFEADDVLATLAKKAEREGYEVQILTADRDLFQLLSPRISVLHPEGHRITPEWLWEKYGLRPEQWVDFRALVGDPSDNIPGVKGIGEKTALKLLKEWGSLENLLKNLDQVKPESVREKILAHLEDLKLSLELSRVRTDLPLEVDFRGRREPDWEGLKAFLERLEFGSLLHEFGLLESPLPAEEAPWPPPEGAFLGYVLSRPEPMWAELLALAASAQGRVYRAEDPHGALRGLKEVRGLLAKDLAVVALREGLDLPPTDDPMLLAYLLDPSNTTPEGVARRYGGEWTEDAGERALLAERLHQNLLGRLQGEERLLWLYEEVEKPLSRVLAHMEATGVKLDVAYLEALSLEVAAEMRRLEEEVFRLAGHSFNLNSRDQLERVLFDELGLPPIGKTEKTGKRSTSAAVLEALREVHPIVDKILQYRELAKLKGTYIDPLPALVHPKTGRLHTRFNQTATATGRLSSSDPNLQNIPVRTPLGQKIRKAFVAEEGWRLVALDYSQIELRVLAHLSGDENLIRVFQEGRDIHTQTASWMFGLSAEAIDPLMRRAAKTINFGVLYGMSAHRLSQELGIPYEEAAAFIQRYFQSYPKVKAWIEKTLEEGRTRGYVETLFGRRRYVPDLNARVKSVREAAERMAFNMPVQGTAADLMKLAMVRLFPQLREVGARMLLQVHDELLLEAPKERAEEVAALAKEVMEGVWPLAVPLEVEVGIGEDWLAAKG

SEQ ID NO: 237 - DNA, 2529 bp, synthetic construct
  misc_feature 1..2529: note = Variant of DNA polymerase I from Thermus sp. strain 2.9
  source 1..2529: mol_type = other DNA
atgcaccatcatcatcatcatggcggtagcggcatgttaccgttgttcgaacctaaaggtcgcgtgcttctggttgatggccatcatctcgcgtatcgtaacttctttgccctgaaaggattaaccaccagccgtggcgagccggtacagggtgtctacggctttgcaaagtcgctcctgaaagctctgaaagaagacggtgatgtggtgattgttgtctttgatgcgaaagcgccaagttttcgccacgaagcgtacgaagcttacaaagccgggcgtgctccaacgccggaagactttcctcgccaattggcgcttatgaaggaattagtggatttgcttggcctcgaacgcttggaagttcccggtttcgaggcagacgacgtattagcgactctcgcaaagaaagccgaacgtgagggctatgaagtccatatcttgacagcagatcgcgatcttttccagcttttatctccgcgcatttccgtgttacacccggaagggcatcgtatcaccccggaatggctctgggagaaatatggtttgcgtcccgaacaatgggtggattttcgcgccttagcgggcgatccgagcgacaatattccgggagttaaaggtatcggcgagaagacggcgctcaagctccttaaagaatgggggtcgttggagaacttgcttaagaatttagatcaggtcaaaccagcttcagtgcgtgagaagattcttgcacacctcgaagacctcaaattaagccgcgaattggtccgtgtacgcaccgatttgccgctcgaagttgatttccgtggccgccgcgaacctgactgggagggtcttaaagcgtttttagagcgtcttgaactgggttcgctcttgcatgaattcggccttttagaaagcccgttaccagccgaagaagcaccttggccaccgcccgaaggcgcgtttttaggttaccgtttgagtcgcccggaaccgatgtgggccgaattattggctcttgcagcgtctgcccagggacgtgtgtatcgcgcggaagaccctcatggtgcgctccgtggcctcaaagaagtccgtggactccttgccaaagacttagctgttgttgcattgcgcgaaggtcttgatttacctccgactgatgatccaatgcttcttgcgtacctcttggactcgtcaaacacgacgcccgaaggcgtagcccgtcgttacggcggcgagtggaccgaagatgcaggtgagcgcgcgttattggccgaacgtttgcacgccaatttattaggacgtttgcaaggcgaggaacgtctcctctggctttacgaagaagtggagaaaccattgagtcgcgtgctcgcgcatatggaagctaccggtgtcaaattagacgtggcgtatttggaggcactcagccttgaagtcgctgccgaactgcgccgcttggaggaagaagtattccgtttagcaggccactcctttaaccttaattctcgcgatcagttagaacgtgtgttgttcgatgaacttggtctccctcctatcaccaagacagagaagaccggtaaacgtagcacttcagcggcggttttagaagctcttcgcgaagtccatcccattgtggacaagatcttgcagtaccgcgaactcgcgaaattgaaaggcacctatattgaccctcttccggcattagtccacccgaaaacgggacgcctccatacccgcttcaaccaaacagccacggcgaccggtcgtttgtcctcctctgatccaaaccttcagaatattccagtacgtaccccattgggccagaaaatccgcaaagcgtttgtagctgaggagggttggcgtttagtggccctcgattatagccaaattgaattacgtgtccttgcccatctttctggcgatgagaacctcatccgcgtgtttcaggaaggccgcgacattcacactcaaacggcaagctggatgtttggattatcagctgaagcgatcgatcctttgatgcgtcgtgcagcgaagaccatcaatttcggtgttctctacggtatgagtgcccatcgtttgtcgcaggaattaggcattccctatgaagaagctgcggcgttcattcagcgctactttcaaagctatcccaaagttaaagcatggatcgagaagactctcgaagaaggccgcacacgtggttacgtagagaccttatttggacgtcgccgctatgttcccgatttaaacgctcgcgtgaaatctgtccgtgaagccgccgaacgcatggcgttcaacatgcctgtacagggcacggcagctgacctcatgaaacttgcaatggtgcgcctttttccacaattgcgtgaagttggtgcccgcatgctcttgcaggtccacgatgaactcttgttagaagcgccaaaagagcgtgcggaagaggtggcagccctcgcgaaagaggttatggaaggcgtgtggcccttagcggtgcctcttgaagtcgaagttggtattggcgaggattggttggctgccaaaggataatga

SEQ ID NO: 238 - protein, 841 aa, synthetic construct
  REGION 1..841: note = Variant of DNA polymerase I from Thermus sp. strain 2.9
MHHHHHHGGSGMLPLFEPKGRVLLVDGHHLAYRNFFALKGLTTSRGEPVQGVYGFAKSLLKALKEDGDVVIVVFDAKAPSFRHEAYEAYKAGRAPTPEDFPRQLALMKELVDLLGLERLEVPGFEADDVLATLAKKAEREGYEVHILTADRDLFQLLSPRISVLHPEGHRITPEWLWEKYGLRPEQWVDFRALAGDPSDNIPGVKGIGEKTALKLLKEWGSLENLLKNLDQVKPASVREKILAHLEDLKLSRELVRVRTDLPLEVDFRGRREPDWEGLKAFLERLELGSLLHEFGLLESPLPAEEAPWPPPEGAFLGYRLSRPEPMWAELLALAASAQGRVYRAEDPHGALRGLKEVRGLLAKDLAVVALREGLDLPPTDDPMLLAYLLDSSNTTPEGVARRYGGEWTEDAGERALLAERLHANLLGRLQGEERLLWLYEEVEKPLSRVLAHMEATGVKLDVAYLEALSLEVAAELRRLEEEVFRLAGHSFNLNSRDQLERVLFDELGLPPITKTEKTGKRSTSAAVLEALREVHPIVDKILQYRELAKLKGTYIDPLPALVHPKTGRLHTRFNQTATATGRLSSSDPNLQNIPVRTPLGQKIRKAFVAEEGWRLVALDYSQIELRVLAHLSGDENLIRVFQEGRDIHTQTASWMFGLSAEAIDPLMRRAAKTINFGVLYGMSAHRLSQELGIPYEEAAAFIQRYFQSYPKVKAWIEKTLEEGRTRGYVETLFGRRRYVPDLNARVKSVREAAERMAFNMPVQGTAADLMKLAMVRLFPQLREVGARMLLQVHDELLLEAPKERAEEVAALAKEVMEGVWPLAVPLEVEVGIGEDWLAAKG

SEQ ID NO: 239 - DNA, 2529 bp, synthetic construct
  misc_feature 1..2529: note = Variant of DNA polymerase I from Thermus sp. strain 2.9
  source 1..2529: mol_type = other DNA
atgcaccatcatcatcatcatggcggtagcggcatgttaccgttgttcgaacctaaaggtcgcgtgcttctggttgatggccatcatctcgcgtatcgtaacttctttgccctgaaaggattaaccaccagccgtggcgagccggtacagggtgtctacggctttgcaaagtcgctcctgaaagctctgaaagaagacggtgatgtggtgattgttgtctttgatgcgaaagcgccaagttttcgccacgaagcgtacgaagcttacaaagccgggcgtgctccaacgccggaagactttcctcgccaattggcgcttatgaaggaattagtggatttgcttggcctcgaacgcttggaagttcccggtttcgaggcagacgacgtattagcgactctcgcaaagaaagccgaacgtgagggctatgaagtccagatcttgacagcagatcgcgatcttttccagcttttatctccgcgcatttccgtgttacacccggaagggcatcgtatcaccccggaatggctctgggagaaatatggtttgcgtcccgaacaatgggtggattttcgcgccttagcgggcgatccgagcgacaatattccgggagttaaaggtatcggcgagaagacggcgctcaagctccttaaagaatgggggtcgttggagaacttgcttaagaatttagatcaggtcaaaccagcttcagtgcgtgagaagattcttgcacacctcgaagacctcaaattaagccgcgaattgtcccgtgtacgcaccgatttgccgctcgaagttgatttccgtggccgccgcgaacctgactgggagggtcttaaagcgtttttagagcgtcttgaatttggttcgctcttgcatgaattcggccttttagaaagcccgttaccagccgaagaagcaccttggccaccgcccgaaggcgcgtttttaggttaccgtttgagtcgcccggaaccgatgtgggccgaattattggctcttgcagcgtctgcccagggacgtgtgtatcgcgcggaagaccctcatggtgcgctccgtggcctcaaagaagtccgtggactccttgccaaagacttagctgttgttgcattgcgcaatggtcttgatttacctccgactgatgatccaatgcttcttgcgtacctcttggacccgtcaaacacgacgcccgaaggcgtagcccgtcgttacggcggcgagtggaccgaagatgcaggtgagcgcgcgttattggccgaacgtttgcacgccaatttattaggacgtttgcaaggcgaggaacgtctcctctggctttacgaagaagtggagaaaccattgagtcgcgtgctcgcgcatatggaagctaccggtgtcaaattagacgtggcgtatttggaggcactcagccttgaagttgctgccgaaatgcgccgcttggaggaagaagtattccgtttagcaggccactcctttaaccttaattctcgcgatcagttagaacgtgtgttgttcgatgaacttggtctccctcctatcggcaagacagagaagaccggtaaacgtagcacttcagcggcggttttagaagctcttcgcgaagtccatcccattgtggacaagatcttgcagtaccgcgaactcgcgaaattgaaaggcacctatattgaccctcttccggcattagtccacccgaaaacgggacgcctccatacccgcttcaaccaaacagccacggcgaccggtcgtttgtcctcctctgatccaaaccttcagaatattccagtacgtaccccattgggccagaagatccgcaaagcgtttgtagctgaggagggttggcgtttagtggccctcgattatagccaaattgaattacgtgtccttgcccatctttctggcgatgagaacctcatccgcgtgtttcaggaaggccgcgacattcacactcaaacggcaagctggatgtttggattatcagctgaagcgatcgatcctttgatgcgtcgtgcagcgaagaccatcaatttcggtgttctctacggtatgagtgcccatcgtttgtcgcaggaattaggcattccctatgaagaagctgcggcgttcattcagcgctactttcaaagctatcccaaagttaaagcatggatcgagaagactctcgaagaaggccgcacacgtggttacgtagagaccttatttggacgtcgccgctatgttcccgatttaaacgctcgcgtgaaatctgtccgtgaagccgccgaacgcatggcgttcaacatgcctgtacagggcacggcagctgacctcatgaaacttgcaatggtgcgcctttttccacaattgcgtgaagttggtgcccgcatgctcttgcaggtccacgatgaactcttgttagaagcgccaaaagagcgtgcggaagaggtggcagccctcgcgaaagaggttatggaaggcgtgtggcccttagcggtgcctcttgaagtcgaagttggtattggcgaggattggttggctgccaaaggataatga

SEQ ID NO: 240 - protein, 841 aa, synthetic construct
  REGION 1..841: note = Variant of DNA polymerase I from Thermus sp. strain 2.9
MHHHHHHGGSGMLPLFEPKGRVLLVDGHHLAYRNFFALKGLTTSRGEPVQGVYGFAKSLLKALKEDGDVVIVVFDAKAPSFRHEAYEAYKAGRAPTPEDFPRQLALMKELVDLLGLERLEVPGFEADDVLATLAKKAEREGYEVQILTADRDLFQLLSPRISVLHPEGHRITPEWLWEKYGLRPEQWVDFRALAGDPSDNIPGVKGIGEKTALKLLKEWGSLENLLKNLDQVKPASVREKILAHLEDLKLSRELSRVRTDLPLEVDFRGRREPDWEGLKAFLERLEFGSLLHEFGLLESPLPAEEAPWPPPEGAFLGYRLSRPEPMWAELLALAASAQGRVYRAEDPHGALRGLKEVRGLLAKDLAVVALRNGLDLPPTDDPMLLAYLLDPSNTTPEGVARRYGGEWTEDAGERALLAERLHANLLGRLQGEERLLWLYEEVEKPLSRVLAHMEATGVKLDVAYLEALSLEVAAEMRRLEEEVFRLAGHSFNLNSRDQLERVLFDELGLPPIGKTEKTGKRSTSAAVLEALREVHPIVDKILQYRELAKLKGTYIDPLPALVHPKTGRLHTRFNQTATATGRLSSSDPNLQNIPVRTPLGQKIRKAFVAEEGWRLVALDYSQIELRVLAHLSGDENLIRVFQEGRDIHTQTASWMFGLSAEAIDPLMRRAAKTINFGVLYGMSAHRLSQELGIPYEEAAAFIQRYFQSYPKVKAWIEKTLEEGRTRGYVETLFGRRRYVPDLNARVKSVREAAERMAFNMPVQGTAADLMKLAMVRLFPQLREVGARMLLQVHDELLLEAPKERAEEVAALAKEVMEGVWPLAVPLEVEVGIGEDWLAAKG

SEQ ID NO: 241 - DNA, 2529 bp, synthetic construct
  misc_feature 1..2529: note = Variant of DNA polymerase I from Thermus sp. strain 2.9
  source 1..2529: mol_type = other DNA
atgcaccatcatcatcatcatggcggtagcggcatgttaccgttgttcgaacctaaaggtcgcgtgcttctggttgatggccatcatctcgcgtatcgtaacttctttgccctgaaaggattaaccaccagccgtggcgagccggtacagggtgtctacggctttgcaaagtcgctcctgaaagctctgaaagaagacggtgatgtggtgattgttgtctttgatgcgaaagcgccaagttttcgccacgaagcgtacgaagcttacaaagccgggcgtgctccaacgccggaagactttcctcgccaattggcgcttatgaaggaattagtggatttgcttggcctcgaacgcttggaagttcccggtttcgaggcagacgacgtattagcgactctcgcaaagaaagccgaacgtgagggctatgaagtccagatcttgacagcagatcgcgatcttttccagcttttatctccgcgcatctcggtgttacacccggaagggcatcgcatcaccccggaatggctctgggagaaatatggtttgcgtcccgaacaatgggtggattttcgcgccttagcgggcgatccgagcgacaatattccgggagttaaaggtatcggcgagaagacggcgctcaagctccttaaagaatgggggtcgttggagaacttgcttaagaatttagatcaggtcaaaccagagtcagtgcgtgagaagattcttgcacacctcgaagacctcaaattaagccgcgaattgtcccgtgtacgcaccgatttgccgctcgaagttgatttccgtcgccgccgcgaacctgactgggagggtcttaaagcgtttttagagcgtcttgaatttggttcgctcttgcatgaattcggccttttagaaagcccgttaccagccgaagaagcaccttggccaccgcccgaaggcgcgtttttaggttaccgtttgagtcgctcggaaccgatgtgggccgaattattggctcttgcagcgtctgcccagggacgtgtgtatcgcgcggaagaccctcatggtgcgctccgtggcctcaaagaagtccgtggactccttgccaaagacttagctgttgttgcattgcgcgaaggtcttgatttacctccgactgatgatccaatgcttcttgcgtacctcttggacccgtcaaacacgacgcccgaaggcgtagcccgtcgttacggcggcgagtggaccgaagatgcagccgagcgcgcgttattggccgaacgtttgcacgccaatttattaggacgtttgcaaggcgaggaaaagctcctctggctttacgaagaagtggagaaaccattgagtcgcgtgctcgcgcatatggaagctaccggtgtcaaattagacgtggcgtatttggaggcactcagccttgaagttgctgccgaaatgcgccgcttggaggaagaagtattccgtttagcaggccactcctttaaccttaattctcgcgatcagttagaacgtgtgttgttcgatgaacttggtctccctcctatcggcaagacagagaagaccggtaaacgtagcacttcagcggcggttttagaagctcttcgcgaagtccatcccattgtggacaagatcttgcagtaccgcgaactcgcgaaattgaaaggcacctatattgaccctcttccggcattagtccacccgaaaacgggacgcctccatacccgcttcaaccaaacagccacggcgaccggtcgtttgtcctcctctgatccaaaccttcagaatattccagtacgtaccccattgggccagaagatccgcaaagcgtttgtagctgaggagggttggcgtttagtggccctcgattatagccaaattgaattacgtgtccttgcccatctttctggcgatgagaacctcatccgcgtgtttcaggaaggccgtgacattcacactcaaacggcaagctggatgtttggattaccggcggaagcgatcgatcctttgatgcgtcgtgcagcgaagaccgttaatttcggtgttctctacggtatgagtgcccatcgtttgtcgcaggaattaggcattccctatgaagaagctgtggcgttcattcagcgctactttcaaagctatcccaaagttaaagcatggatcgagaagactctcgaagaaggccgcacacgtggttacgtagagaccttatttggacgtcgccgctatgttcccgatttaaacgctcgcgtgaaatctgtccgtgaagccgccgaacgcatggcgttcaacatgcctgtacagggcacggcagctgacctcatgaaacttgcaatggtgcgcctttttccacaattgcgtgaagttggtgcccgcatgctcttgcaggtccacgatgaactcttgttagaagcgccaaaagagcgtgcggaagaggtggcagccctcgcgaaagaggttatggaaggcgtgtggcccttagcggtgcctcttgaagtcgaagttggtattggcgaggattggttggctgccaaaggataatga

SEQ ID NO: 242 - protein, 841 aa, synthetic construct
  REGION 1..841: note = Variant of DNA polymerase I from Thermus sp. strain 2.9
MHHHHHHGGSGMLPLFEPKGRVLLVDGHHLAYRNFFALKGLTTSRGEPVQGVYGFAKSLLKALKEDGDVVIVVFDAKAPSFRHEAYEAYKAGRAPTPEDFPRQLALMKELVDLLGLERLEVPGFEADDVLATLAKKAEREGYEVQILTADRDLFQLLSPRISVLHPEGHRITPEWLWEKYGLRPEQWVDFRALAGDPSDNIPGVKGIGEKTALKLLKEWGSLENLLKNLDQVKPESVREKILAHLEDLKLSRELSRVRTDLPLEVDFRRRREPDWEGLKAFLERLEFGSLLHEFGLLESPLPAEEAPWPPPEGAFLGYRLSRSEPMWAELLALAASAQGRVYRAEDPHGALRGLKEVRGLLAKDLAVVALREGLDLPPTDDPMLLAYLLDPSNTTPEGVARRYGGEWTEDAAERALLAERLHANLLGRLQGEEKLLWLYEEVEKPLSRVLAHMEATGVKLDVAYLEALSLEVAAEMRRLEEEVFRLAGHSFNLNSRDQLERVLFDELGLPPIGKTEKTGKRSTSAAVLEALREVHPIVDKILQYRELAKLKGTYIDPLPALVHPKTGRLHTRFNQTATATGRLSSSDPNLQNIPVRTPLGQKIRKAFVAEEGWRLVALDYSQIELRVLAHLSGDENLIRVFQEGRDIHTQTASWMFGLPAEAIDPLMRRAAKTVNFGVLYGMSAHRLSQELGIPYEEAVAFIQRYFQSYPKVKAWIEKTLEEGRTRGYVETLFGRRRYVPDLNARVKSVREAAERMAFNMPVQGTAADLMKLAMVRLFPQLREVGARMLLQVHDELLLEAPKERAEEVAALAKEVMEGVWPLAVPLEVEVGIGEDWLAAKG

SEQ ID NO: 243 - DNA, 2529 bp, synthetic construct
  misc_feature 1..2529: note = Variant of DNA polymerase I from Thermus sp. strain 2.9
  source 1..2529: mol_type = other DNA
atgcaccatcatcatcatcatggcggtagcggcatgttaccgttgttcgaacctaaaggtcgcgtgcttctggttgatggccatcatctcgcgtatcgtaacttctttgccctgaaaggattaaccaccagccgtggcgagccggtacagggtgtctacggctttgcaaagtcgctcctgaaagctctgaaagaagacggtgatgtggtgattgttgtctttgatgcgaaagcgccaagttttcgccacgaagcgtacgaagcttacaaagccgggcgtgctccaacgccggaagactttcctcgccaattggcgcttatgaaggaattagtggatttgcttggcctcgaacgcttggaagttcccggtttcgaggcagacgacgtattagcgactctcgcaaagaaagccgaacgtgagggctatgaagtccagatcttgacagcagatcgcgatcttttccagcttttatctccgcgcatctcggtgttacacccggaagggcatctgatcaccccggaatggctctgggagaaatatggtttgcgtcccgaacaatgggtggattttcgcgccttagcgggcgatccgagcgacaatattccgggagttaaaggtatcggcgagaagacggcgctcaagctccttaaagaatgggggtcgttggagaacttgcttaagaatttagatcaggtcaaaccagagtcagtgcgtgagaagattcttgcacacctcgaagacctcaaattaagccgcgaattgtcccgtgtacgcaccgatttgccgctcgaagttgatttccgtggccgccgcgaacctgactgggagggtcttaaagcgtttttagagcgtcttgaatttggttcgctcttgcatgaattcggccttttagaaagcccgttaccagccgaagaagcaccttggccaccgcccgaaggcgcgtttttaggttaccgtttgagtcgcccggaaccgatgtgggccgaattattggctcttgcagcgtctgcccagggacgtgtgtatcgcgcggaagaccctcatggtgcgctccgcggcctcaaagaagtccgtggactccttgccaaagacttagctgttgttgcattgcgcgaaggtcttgatttacctccgactgatgatccaatgcttcttgcgtacctcttggacccgtcaaacacgacgcccgaaggcgtagcccgtcgttacggcggcgagtggaccgaagatgcaggcgagcgcgcgttattggccgaacgtttgcacgccaatttattaggacgtttgcaaggcgaggaacgcctcctctggctttacgaagaagtggagaaaccattgagtcgcgtgctcgcgcatatggaagctaccggtgtcaaattagacgtggcgtatttggaggcactcagccttgaagttgctgccgaaatgcgccgcttggaggaagaagtattccgtttagcaggccactcctttaaccttaattctcgcgatcagttagaacgtgtgttgttcgatgaacttggtctccctcctatcggcaagacagagaagaccggtaaacgtagcacttcagcggcggttttagaagctcttcgcgaagtccatcccattgtggacaagatcttgcagtaccgcgaactcgcgaaattgaaaggcacctatattgaccctcttccggcattagtccacccgaaaacgggacgcctccatacccgcttcaaccaaacagccacggcgaccggtcgtttgtcctcctctgatccaaaccttcagaatattccagtacgtaccccattgggccagaagatccgcaaagcgtttgtagctgaggagggttggcgtttagtggccctcgattatagccaaattgaattacgtgtccttgcccatctttctggcgatgagaacctcatccgcgtgtttcaggaaggccgcgacattcacactcaaacggcaagctggatgtttggattatcgccggaagcgatcgatcctttgatgcgtcgtgcagcgaagaccattaatttcggtgttctctacggtatgagtgcccatcgtttgtcgcaggaattaggcattccctatgaagaagctgcggcgttcattcagcgctactttcaaagctatcccaaagttaaagcatggatcgagaagactctcgaagaaggccgcacacgtggttacgtagagaccttatttggacgtcgccgctatgttcccgatttaaacgctcgcgtgaaatctgtccgtgaagccgccgaacgcatggcgttcaacatgcctgtacagggcacggcagctgacctcatgaaacttgcaatggtgcgcctttttccacaattgcgtgaagttggtgcccgcatgctcttgcaggtccacgatgaactcttgttagaagcgccaaaagagcgtgcggaagaggtggcagccctcgcgaaagaggttatggaaggcgtgtggcccttagcggtgcctcttgaagtcgaagttggtattggcgaggattggttggctgccaaaggataatga

SEQ ID NO: 244 - protein, 841 aa, synthetic construct
  REGION 1..841: note = Variant of DNA polymerase I from Thermus sp. strain 2.9
MHHHHHHGGSGMLPLFEPKGRVLLVDGHHLAYRNFFALKGLTTSRGEPVQGVYGFAKSLLKALKEDGDVVIVVFDAKAPSFRHEAYEAYKAGRAPTPEDFPRQLALMKELVDLLGLERLEVPGFEADDVLATLAKKAEREGYEVQILTADRDLFQLLSPRISVLHPEGHLITPEWLWEKYGLRPEQWVDFRALAGDPSDNIPGVKGIGEKTALKLLKEWGSLENLLKNLDQVKPESVREKILAHLEDLKLSRELSRVRTDLPLEVDFRGRREPDWEGLKAFLERLEFGSLLHEFGLLESPLPAEEAPWPPPEGAFLGYRLSRPEPMWAELLALAASAQGRVYRAEDPHGALRGLKEVRGLLAKDLAVVALREGLDLPPTDDPMLLAYLLDPSNTTPEGVARRYGGEWTEDAGERALLAERLHANLLGRLQGEERLLWLYEEVEKPLSRVLAHMEATGVKLDVAYLEALSLEVAAEMRRLEEEVFRLAGHSFNLNSRDQLERVLFDELGLPPIGKTEKTGKRSTSAAVLEALREVHPIVDKILQYRELAKLKGTYIDPLPALVHPKTGRLHTRFNQTATATGRLSSSDPNLQNIPVRTPLGQKIRKAFVAEEGWRLVALDYSQIELRVLAHLSGDENLIRVFQEGRDIHTQTASWMFGLSPEAIDPLMRRAAKTINFGVLYGMSAHRLSQELGIPYEEAAAFIQRYFQSYPKVKAWIEKTLEEGRTRGYVETLFGRRRYVPDLNARVKSVREAAERMAFNMPVQGTAADLMKLAMVRLFPQLREVGARMLLQVHDELLLEAPKERAEEVAALAKEVMEGVWPLAVPLEVEVGIGEDWLAAKG

SEQ ID NO: 245 - DNA, 2529 bp, synthetic construct
  misc_feature 1..2529: note = Variant of DNA polymerase I from Thermus sp. strain 2.9
  source 1..2529: mol_type = other DNA
atgcaccatcatcatcatcatggcggtagcggcatgttaccgttgttcgaacctaaaggtcgcgtgcttctggttgatggccatcatctcgcgtatcgtaacttctttgccctgaaaggattaaccaccagccgtggcgagccggtacagggtgtctacggctttgcaaagtcgctcctgaaagctctgaaagaagacggtgatgtggtgattgttgtctttgatgcgaaagcgccaagttttcgccacgaagcgtacgaagcttacaaagccgggcgtgctccaacgccggaagactttcctcgccaattggcgcttatgaaggaattagtggatttgcttggcctcgaacgcttggaagttcccggtttcgaggcagacgacgtattagcgactctcgcaaagaaagccgaacgtgagggctatgaagtccagatcttgacagcagatcgcgatcttttccagcttttatctccgcgcatttccgtgttacacccggaagggcatcgtatcaccccggaatggctctgggagaaatatggtttgcgtcccgaacaatgggtggattttcgcgccttagtaggcgatccgagcgacaatattccgggagttaaaggtatcggcgagaagacggcgctcaagctccttaaagaatgggggtcgttggagaacttgcttaagaatttagatcaggtcaaaccagagtcagtgcgtgagaagattcttgcacacctcgaagacctcaaattaagcctggaattgtcccgtgtacgcaccgatttgccgctcgaagttgatttccgtggccgccgcgaacctgactgggagggtcttaaagcgtttttagagcgtcttgaatttggttcgctcttgcatgaattcggccttttagaaagcccgttaccagccgaagaagcaccttggccaccgcccgaaggcgcgtttttaggttaccgtttgagtcgcccggaaccgatgtgggccgaattattggctcttgcagcgtctgcccagggacgtgtgtatcgcgcggaagaccctcatggtgcgctccgtggcctcaaagaagtccgtggactccttgccaaagacttagctgttgttgcattgcgcgaaggtcttgatttacctccgactgatgatccaatgcttcttgcgtacctcttggacccgtcaaacacgacgcccgaaggcgtagcccgtcgttacggcggcgagtggaccgaagatgcaggtgagcgcgcgttattggccgaacgtttgcacgccaatttattaggacgtttgcaaggcgaggaacgtctcctctggctttacgaagaagtggagaaaccattgagtcgcgtgctcgcgcatatggaagctaccggtgtcaaattagacgtggcgtatttggaggcactcagccttgaagttgctgccgaaatgcgccgcttggaggaagaagtattccgtttagcaggccactcctttaaccttaattctcgcgatcagttagaacgtgtgttgttcgatgaacttggtctccctcctatcggcaagacagagaagaccggtaaacgtagcacttcagcggcggttttagaagctcttcgcgaagtccatcccattgtggacaagatcttgcagtaccgcgaactcgcgaaattgaaaggcacctatattgaccctcttccggcattagtccacccgaaaacgggacgcctccatacccgcttcaaccaaacagccacggcgaccggtcgtttgtcctcctctgatccaaaccttcagaatattccagtacgtaccccattgggccagaagatccgcaaagcgtttgtagctgaggagggttggcgtttagtggccctcgattatagccaaattgaattacgtgtccttgcccatctttctggcgatgagaacctcatccgcgtgtttcaggaaggccgtgacattcacactcaaacggcaagctggatgtttggattatcagctgaagcgatcgatcctttgatgcgtcgtgcagcgaagaccatcaatttcggtgttctctacggtatgagtgcccatcgtttgtcgcaggaattaggcattccctatgaagaagctgcggcgttcattcagcgctactttcaaagctatcccaaagttaaagcatggatcgagaagactctcgaagaaggccgcacacgtggttacgtagagaccttatttggacgtcgccgctatgttcccgatttaaacgctcgcgtgaaatctgtccgtgaagccgccgaacgcatggcgttcaacatgcctgtacagggcacggcagctgacctcatgaaacttgcaatggtgcgcctttttccacaattgcgtgaagttggtgcccgcatgctcttgcaggtccacgatgaactcttgttagaagcgccaaaagagcgtgcggaagaggtggcagccctcgcgaaagaggttatggaaggcgtgtggcccttagcggtgcctcttgaagtcgaagttggtattggcgaggattggttggctgccaaaggataatga

SEQ ID NO: 246 - protein, 841 aa, synthetic construct
  REGION 1..841: note = Variant of DNA polymerase I from Thermus sp. strain 2.9
MHHHHHHGGSGMLPLFEPKGRVLLVDGHHLAYRNFFALKGLTTSRGEPVQGVYGFAKSLLKALKEDGDVVIVVFDAKAPSFRHEAYEAYKAGRAPTPEDFPRQLALMKELVDLLGLERLEVPGFEADDVLATLAKKAEREGYEVQILTADRDLFQLLSPRISVLHPEGHRITPEWLWEKYGLRPEQWVDFRALVGDPSDNIPGVKGIGEKTALKLLKEWGSLENLLKNLDQVKPESVREKILAHLEDLKLSLELSRVRTDLPLEVDFRGRREPDWEGLKAFLERLEFGSLLHEFGLLESPLPAEEAPWPPPEGAFLGYRLSRPEPMWAELLALAASAQGRVYRAEDPHGALRGLKEVRGLLAKDLAVVALREGLDLPPTDDPMLLAYLLDPSNTTPEGVARRYGGEWTEDAGERALLAERLHANLLGRLQGEERLLWLYEEVEKPLSRVLAHMEATGVKLDVAYLEALSLEVAAEMRRLEEEVFRLAGHSFNLNSRDQLERVLFDELGLPPIGKTEKTGKRSTSAAVLEALREVHPIVDKILQYRELAKLKGTYIDPLPALVHPKTGRLHTRFNQTATATGRLSSSDPNLQNIPVRTPLGQKIRKAFVAEEGWRLVALDYSQIELRVLAHLSGDENLIRVFQEGRDIHTQTASWMFGLSAEAIDPLMRRAAKTINFGVLYGMSAHRLSQELGIPYEEAAAFIQRYFQSYPKVKAWIEKTLEEGRTRGYVETLFGRRRYVPDLNARVKSVREAAERMAFNMPVQGTAADLMKLAMVRLFPQLREVGARMLLQVHDELLLEAPKERAEEVAALAKEVMEGVWPLAVPLEVEVGIGEDWLAAKG

SEQ ID NO: 247 - DNA, 2529 bp, synthetic construct
  misc_feature 1..2529: note = Variant of DNA polymerase I from Thermus sp. strain 2.9
  source 1..2529: mol_type = other DNA
atgcaccatcatcatcatcatggcggtagcggcatgttaccgttgttcgaacctaaaggtcgcgtgcttctggttgatggccatcatctcgcgtatcgtaacttctttgccctgaaaggattaaccaccagccgtggcgagccggtacagggtgtctacggctttgcaaagtcgctcctgaaagctctgaaagaagacggtgatgtggtgattgttgtctttgatgcgaaagcgccaagttttcgccacgaagcgtacgaagcttacaaagccgggcgtgctccaacgccggaagactttcctcgccaattggcgcttatgaaggaattagtggatttgcttggcctcgaacgcttggaagttcccggtttcgaggcagacgacgtattagcgactctcgcaaagaaagccgaacgtgagggctatgaagtccagatcttgacagcagatcgcgatcttttccagcttttatctccgcgcgtctcggtgttacacccggaagggcatctgatcaccccggaatggctctgggagaaatatggtttgcgtcccgaacaatgggtggattttcgcgccttagcaggcgatccgagcgacaatattccgggagttaaaggtatcggcgagaagacggcgctcaagctccttaaagaatgggggtcgttggagaacttgcttaagaatttagatcaggtcaaaccagagtcagtgcgtgagaagattcttgcacacctcgaagacctcaaattaagccgcgaattgtcccgtgtacgcaccgatttgccgctcgaagttgatttccgtcgccgccgcgaacctgactgggagggtcttaaagcgtttttagagcgtcttgaatttggttcgctcttgcatgaattcggccttttagaaagcccgttaccagccgaagaagcaccttggccaccgcccgaaggcgcgtttttaggttacgttttgagtcgcccggaaccgatgtgggccgaattattggctcttgcagcgtctgcccagggacgtgtgtatcgcgcggaagaccctcatggtgcgctccgtggcctcaaagaagtccgtggactccttgccaaagacttagctgttgttgcattgcgcgaaggtcttgatttacctccgactgatgatccaatgcttcttgcgtacctcttggacccgtcaaacacgacgcccgaaggcgtagcccgtcgttacggcggcgagtggaccgaagatgcaggcgagcgcgcgttattggccgaacgtttgcacgccaatttattaggacgtttgcaaggcgaggaacgtctcctctggctttacgaagaagtggagaaaccattgagtcgcgtgctcgcgcatatggaagctaccggtgtcaaattagacgtggcgtatttggaggcactcagccttgaagttgctgccgaaatgcgccgcttggaggaagaagtattccgtttagcaggccactcctttaaccttaattctcgcgatcagttagaacgtgtgttgttcgatgaacttggtctccctcctatcggcaagacagagaagaccggtaaacgtagcacttcagcggcggttttagaagctcttcgcgaagtccatcccattgtggacaagatcttgcagtaccgcgaactcgcgaaattgaaaggcacctatattgaccctcttccggcattagtccacccgaaaacgggacgcctccatacccgcttcaaccaaacagccacggcgaccggtcgtttgtcctcctctgatccaaaccttcagaatattccagtacgtaccccattgggccagaagatccgcaaagcgtttgtagctgaggagggttggcgtttagtggccctcgattatagccaaattgaattacgtgtccttgcccatctttctggcgatgagaacctcatccgcgtgtttcaggaaggccgtgacattcacactcaaacggcaagctggatgtttggattatcggcggaagcgatcgatcctttgatgcgtcgtgcagcgaagaccatcaatttcggtgttctctacggtatgagtgcccatcgtttgtcgcaggaattaggcattccctatgaagaagctgcggcgttcattcagcgctactttcaaagctatcccaaagttaaagcatggatcgagaagactctcgaagaaggccgcacacgtggttacgtagagaccttatttggacgtcgccgctatgttcccgatttaaacgctcgcgtgaaatctgtccgtgaagccgccgaacgcatggcgttcaacatgcctgtacagggcacggcagctgacctcatgaaacttgcaatggtgcgcctttttccacaattgcgtgaagttggtgcccgcatgctcttgcaggtccacgatgaactcttgttagaagcgccaaaagagcgtgcggaagaggtggcagccctcgcgaaagaggttatggaaggcgtgtggcccttagcggtgcctcttgaagtcgaagttggtattggcgaggattggttggctgccaaaggataatga

SEQ ID NO: 248 - protein, 841 aa, synthetic construct
  REGION 1..841: note = Variant of DNA polymerase I from Thermus sp. strain 2.9
MHHHHHHGGSGMLPLFEPKGRVLLVDGHHLAYRNFFALKGLTTSRGEPVQGVYGFAKSLLKALKEDGDVVIVVFDAKAPSFRHEAYEAYKAGRAPTPEDFPRQLALMKELVDLLGLERLEVPGFEADDVLATLAKKAEREGYEVQILTADRDLFQLLSPRVSVLHPEGHLITPEWLWEKYGLRPEQWVDFRALAGDPSDNIPGVKGIGEKTALKLLKEWGSLENLLKNLDQVKPESVREKILAHLEDLKLSRELSRVRTDLPLEVDFRRRREPDWEGLKAFLERLEFGSLLHEFGLLESPLPAEEAPWPPPEGAFLGYVLSRPEPMWAELLALAASAQGRVYRAEDPHGALRGLKEVRGLLAKDLAVVALREGLDLPPTDDPMLLAYLLDPSNTTPEGVARRYGGEWTEDAGERALLAERLHANLLGRLQGEERLLWLYEEVEKPLSRVLAHMEATGVKLDVAYLEALSLEVAAEMRRLEEEVFRLAGHSFNLNSRDQLERVLFDELGLPPIGKTEKTGKRSTSAAVLEALREVHPIVDKILQYRELAKLKGTYIDPLPALVHPKTGRLHTRFNQTATATGRLSSSDPNLQNIPVRTPLGQKIRKAFVAEEGWRLVALDYSQIELRVLAHLSGDENLIRVFQEGRDIHTQTASWMFGLSAEAIDPLMRRAAKTINFGVLYGMSAHRLSQELGIPYEEAAAFIQRYFQSYPKVKAWIEKTLEEGRTRGYVETLFGRRRYVPDLNARVKSVREAAERMAFNMPVQGTAADLMKLAMVRLFPQLREVGARMLLQVHDELLLEAPKERAEEVAALAKEVMEGVWPLAVPLEVEVGIGEDWLAAKG

SEQ ID NO: 249 - DNA, 2529 bp, synthetic construct
  misc_feature 1..2529: note = Variant of DNA polymerase I from Thermus sp. strain 2.9
  source 1..2529: mol_type = other DNA
atgcaccatcatcatcatcatggcggtagcggcatgttaccgttgttcgaacctaaaggtcgcgtgcttctggttgatggccatcatctcgcgtatcgtaacttctttgccctgaaaggattaaccaccagccgtggcgagccggtacagggtgtctacggctttgcaaagtcgctcctgaaagctctgaaagaagacggtgatgtggtgattgttgtctttgatgcgaaagcgccaagttttcgccacgaagcgtacgaagcttacaaagccgggcgtgctccaacgccggaagactttcctcgccaattggcgcttatgaaggaattagtggatttgcttggcctcgaacgcttggaagttcccggtttcgaggcagacgacgtattagcgactctcgcaaagaaagccgaacgtgagggctatgaagtccatatcttgacagcagatcgcgatcttttccagcttttatctccgcgcatttccgtgttacacccggaagggcatcgtatcaccccggaatggctctgggagaaatatggtttgcgtcccgaacaatgggtggattttcgcgccttagcgggcgatccgagcgacaatattccgggagttaaaggtatcggcgagaagacggcgctcaagctccttaaagaatgggggtcgttggagaacttgcttaagaatttagatcaggtcaaaccagcttcagtgcgtgagaagattcttgcacacctcgaagacctcaaattaagccgcgaattggtccgtgtacgcaccgatctgccgctcgaagttgatttccgtggccgccgcgaacctgactgggagggtcttaaagcgtttttagagcgtcttgaatttggttcgctcttgcatgaattcggccttttagaaagcccgttaccagccgaagaagcaccttggccaccgcccgaaggcgcgtttttaggttaccgtttgagtcgcccggaaccgatgtgggccgaattattggctcttgcagcgtctgcccagggacgtgtgtatcgcgcggaagaccctcatggtgcgctccgtggcctcaaagaagtccgtggactccttgccaaagacttagctgttgttgcattgcgcgaaggtcttgatttacctccgactgatgatccaatgcttcttgcgtacctcttggactcgtcaaacacgacgcccgaaggcgtagcccgtcgttacggcggcgagtggaccgaagatgcaggtgagcgcgcgttattggccgaacgtttgcacgccaatttattaggacgtttgcaaggcgaggaacgtctcctctggctttacgaagaagtggagaaaccattgagtcgcgtgctcgcgcatatggaagctaccggtgtcaaattagacgtggcgtatttggaggcactcagccttgaagtcgctgccgaactgcgccgcttggaggaagaagtattccgtttagcaggccactcctttaaccttaattctcgcgatcagttagaacgtgtgttgttcgatgaacttggtctccctcctatcggtaagacagagaagaccggtaaacgtagcacttcagcggcggttttagaagctcttcgcgaagtccatcccattgtggacaagatcttgcagtaccgcgaactcgcgaaattgaaaggcacctatattgaccgtcttccggcattagtccacccgaaaacgggacgcctccatacccgcttcaaccaaacagccacggcgaccggtcgtttgtcctcctctgatccaaaccttcagaatattccagtacgtaccccattgggccagcatatccgcaaagcgtttgtagctgaggagggttggcgtttagtggccctcgattatagccaaattgaattacgtgtccttgcccatctttctggcgatgagaacctcatccgcgtgtttcaggaaggccgcgacattcacactcaaacggcaagctggatgtttggactgtcatcggaagcgatcgatcctttgatgcgtcgtgcagcgaagaccatcaatttcggtgttctctacggtatgagtgcccatcgtttgtcgcaggaattaggcattccctatgaagaagctgcggcgttcattcagcgctactttcaaagctatcccaaagttaaagcatggatcgagaagactctcgaagaaggccgcacacgtggttacgtagagaccttatttggacgtcgccgctatgttcccgatttaactgctcgcgtgaaatctgtccgtgaagccgccgaacgcatggcgttcaacatgcctgtacagggcacggcagctgacctcatgaaacttgcaatggtgcgcctttttccacaattgcgtgaagttggtgcccgcatgctcttgcaggtccacgatgaactcttgttagaagcgccaaaagagcgtgcggaagaggtggcagccctcgcgaaagaggttatggaaggcgtgtggcccttagcggtgcctcttgaagtcgaagttggtattggcgaggattggttggctgccaaaggataatga

SEQ ID NO: 250 - protein, 841 aa, synthetic construct
  REGION 1..841: note = Variant of DNA polymerase I from Thermus sp. strain 2.9
MHHHHHHGGSGMLPLFEPKGRVLLVDGHHLAYRNFFALKGLTTSRGEPVQGVYGFAKSLLKALKEDGDVVIVVFDAKAPSFRHEAYEAYKAGRAPTPEDFPRQLALMKELVDLLGLERLEVPGFEADDVLATLAKKAEREGYEVHILTADRDLFQLLSPRISVLHPEGHRITPEWLWEKYGLRPEQWVDFRALAGDPSDNIPGVKGIGEKTALKLLKEWGSLENLLKNLDQVKPASVREKILAHLEDLKLSRELVRVRTDLPLEVDFRGRREPDWEGLKAFLERLEFGSLLHEFGLLESPLPAEEAPWPPPEGAFLGYRLSRPEPMWAELLALAASAQGRVYRAEDPHGALRGLKEVRGLLAKDLAVVALREGLDLPPTDDPMLLAYLLDSSNTTPEGVARRYGGEWTEDAGERALLAERLHANLLGRLQGEERLLWLYEEVEKPLSRVLAHMEATGVKLDVAYLEALSLEVAAELRRLEEEVFRLAGHSFNLNSRDQLERVLFDELGLPPIGKTEKTGKRSTSAAVLEALREVHPIVDKILQYRELAKLKGTYIDRLPALVHPKTGRLHTRFNQTATATGRLSSSDPNLQNIPVRTPLGQHIRKAFVAEEGWRLVALDYSQIELRVLAHLSGDENLIRVFQEGRDIHTQTASWMFGLSSEAIDPLMRRAAKTINFGVLYGMSAHRLSQELGIPYEEAAAFIQRYFQSYPKVKAWIEKTLEEGRTRGYVETLFGRRRYVPDLTARVKSVREAAERMAFNMPVQGTAADLMKLAMVRLFPQLREVGARMLLQVHDELLLEAPKERAEEVAALAKEVMEGVWPLAVPLEVEVGIGEDWLAAKG

SEQ ID NO: 251 - DNA, 2529 bp, synthetic construct
  misc_feature 1..2529: note = Variant of DNA polymerase I from Thermus sp. strain 2.9
  source 1..2529: mol_type = other DNA
atgcaccatcatcatcatcatggcggtagcggcatgttaccgttgttcgaacctaaaggtcgcgtgcttctggttgatggccatcatctcgcgtatcgtaacttctttgccctgaaaggattaaccaccagccgtggcgagccggtacagggtgtctacggctttgcaaagtcgctcctgaaagctctgaaagaagacggtgatgtggtgattgttgtctttgatgcgaaagcgccaagttttcgccacgaagcgtacgaagcttacaaagccgggcgtgctccaacgccggaagactttcctcgccaattggcgcttatgaaggaattagtggatttgcttggcctcgaacgcttggaagttcccggtttcgaggcagacgacgtattagcgactctcgcaaagaaagccgaacgtgagggctatgaagtccagatcttgacagcagatcgcgatcttttccagcttttatctccgcgcatttccgtgttacacccggaagggcatcgtatcaccccggaatggctctgggagaaatatggtttgcgtcccgaacaatgggtggattttcgcgccttagcgggcgatccgagcgacaatattccgggagttaaaggtatcggcgagaagacggcgctcaagctccttaaagaatgggggtcgttggagaacttgcttaagaatttagatcaggtcaaaccagcttcagtgcgtgagaagattcttgcacacctcgaagacctcaaattaagccgcgaattggtccgtgtacgcaccgatttgccgctcgaagttgatttccgtggccgccgcgaacctgactgggagggtcttaaagcgtttttagagcgtcttgaatttggttcgctcttgcatgaattcggccttttagaaagcccgttaccagccgaagaagcaccttggccaccgcccgaaggcgcgtttttaggttaccgtttgagtcgcccggaaccgatgtgggccgaattattggctcttgcagcgtctgcccagggacgtgtgtatcgcgcggaagaccctcatggtgcgctccgtggcctcaaagaagtccgtggactccttgccaaagacttagctgttgttgcattgcgcgaaggtcttgatttacctccgactgatgatccaatgcttcttgcgtacctcttggacccgtcaaacacgacgcccgaacgcgtagcccgtcgttacggcggcgagtggaccgaagatgcaggtgagcgcgcgttattggccgaacgtttgcacgccaatttattaggacgtttgcaaggcgaggaacgtctcctctggctttacgaagaagtggagaaaccattgagtcgcgtgctcgcgcatatggaagctaccggtgtcaaattagacgtggcgtatttggaggcactcagccttgaagccgctgccgaactgcgccgcttggaggaagaagtattccgtttagcaggccactcctttaaccttaattctcgcgatcagttagaacgtgtgttgttcgatgaacttggtctccctcctatcggtaagacagagaagaccggtaaacgtagcacttcagcggcggttttagaagctcttcgcgaagtccatcccattgtggacaagatcttgcagtaccgcgaactcgcgaaattgaaaggcacctatattgaccgtcttccggcattagtccacccgaaaacgggacgcctccatacccgcttcaaccaaacagccacggcgaccggtcgtttgtcctcctctgatccaaaccttcagaatattccagtacgtaccccattgggccagaaaatccgcaaagcgtttgtagctgaggagggttggcgtttagtggccctcgattatagccaaattgaattacgtgtccttgcccatctttctggcgatgagaacctcatccgcgtgtttcaggaaggccgcgacattcacactcaaacggcaagctggatgtttggagtgtcagcggaagcgatcgatcctttgatgcgtcgtgcagcgaagaccatcaatttcggtgttctctacggtatgagtgcccatcgtttgtcgcaggaattaggcattccctatgaagaagctgcggcgttcattcagcgctactttcaaagctatcccaaagttaaagcatggatcgagaagactctcgaagaaggccgcacacgtggttacgtagagaccttatttggacgtcgccgctatgttcccgatttaaatgctcgcgtgaaatctgtccgtgaagccgccgaacgcatggcgtttaacatgcctgtacagggcacggcagctgacctcatgaaacttgcaatggtgcgcctttttccacaattgcgtgaagttggtgcccgcatgctcttgcaggtccacgatgaactcttgttagaagcgccaaaagagcgtgcggaagaggtggcagccctcgcgaaagaggttatggaaggcgtgtggcccttagcggtgcctcttgaagtcgaagttggtattggcgaggattggttggctgccaaaggataatga

SEQ ID NO: 252 - protein, 841 aa, synthetic construct
  REGION 1..841: note = Variant of DNA polymerase I from Thermus sp. strain 2.9
MHHHHHHGGSGMLPLFEPKGRVLLVDGHHLAYRNFFALKGLTTSRGEPVQGVYGFAKSLLKALKEDGDVVIVVFDAKAPSFRHEAYEAYKAGRAPTPEDFPRQLALMKELVDLLGLERLEVPGFEADDVLATLAKKAEREGYEVQILTADRDLFQLLSPRISVLHPEGHRITPEWLWEKYGLRPEQWVDFRALAGDPSDNIPGVKGIGEKTALKLLKEWGSLENLLKNLDQVKPASVREKILAHLEDLKLSRELVRVRTDLPLEVDFRGRREPDWEGLKAFLERLEFGSLLHEFGLLESPLPAEEAPWPPPEGAFLGYRLSRPEPMWAELLALAASAQGRVYRAEDPHGALRGLKEVRGLLAKDLAVVALREGLDLPPTDDPMLLAYLLDPSNTTPERVARRYGGEWTEDAGERALLAERLHANLLGRLQGEERLLWLYEEVEKPLSRVLAHMEATGVKLDVAYLEALSLEAAAELRRLEEEVFRLAGHSFNLNSRDQLERVLFDELGLPPIGKTEKTGKRSTSAAVLEALREVHPIVDKILQYRELAKLKGTYIDRLPALVHPKTGRLHTRFNQTATATGRLSSSDPNLQNIPVRTPLGQKIRKAFVAEEGWRLVALDYSQIELRVLAHLSGDENLIRVFQEGRDIHTQTASWMFGVSAEAIDPLMRRAAKTINFGVLYGMSAHRLSQELGIPYEEAAAFIQRYFQSYPKVKAWIEKTLEEGRTRGYVETLFGRRRYVPDLNARVKSVREAAERMAFNMPVQGTAADLMKLAMVRLFPQLREVGARMLLQVHDELLLEAPKERAEEVAALAKEVMEGVWPLAVPLEVEVGIGEDWLAAKG

SEQ ID NO: 253 - DNA, 2529 bp, synthetic construct
  misc_feature 1..2529: note = Variant of DNA polymerase I from Thermus sp. strain 2.9
  source 1..2529: mol_type = other DNA
atgcaccatcatcatcatcatggcggtagcggcatgttaccgttgttcgaacctaaaggtcgcgtgcttctggttgatggccatcatctcgcgtatcgtaacttctttgccctgaaaggattaaccaccagccgtggcgagccggtacagggtgtctacggctttgcaaagtcgctcctgaaagctctgaaagaagacggtgatgtggtgattgttgtctttgatgcgaaagcgccaagttttcgccacgaagcgtacgaagcttacaaagccgggcgtgctccaacgccggaagactttcctcgccaattggcgcttatgaaggaattagtggatttgcttggcctcgaacgcttggaagttcccggtttcgaggcagacgacgtattagcgactctcgcaaagaaagccgaacgtgagggctatgaagtccagatcttgacagcagatcgcgatcttttccagcttttatctccgcgcatttccgtgttacacccggaagggcatcgtatcaccccggaatggctctgggagaaatatggtttgcgtcccgaacaatgggtggattttcgcgccttagcgggcgatccgagcgacaatattccgggagttaaaggtatcggcgagaagacggcgctcaagctccttaaagaatgggggtcgttggagaacttgcttaagaatttagatcaggtcaaaccagcttcagtgcgtgagaagattcttgcacacctcgaagacctcaaattaagccgcgaattgtcccgtgtacgcaccgatttgccgctcgaagttgatttccgtggccgccgcgaacctgactgggagggtcttaaagcgtttttagagcgtcttgaatttggttcgctcttgcatgaattcggccttttagaaagcccgttaccagccgaagaagcaccttggccaccgcccgaaggcgcgtttttaggttaccgtttgagtcgcccggaaccgatgtgggccgaattattggctcttgcagcgtctgcccagggacgtgtgtatcgcgcggaagaccctcatggtgcgctccgtggcctcaaagaagtccgtggactccttgccaaagacttagctgttgttgcattgcgcgaaggtcttgatttacctccgactgatgatccaatgcttcttgcgtacctcttggacccgtcaaacacgacgcccgaaggcgtagcccgtcgttacggcggcgagtggaccgaagatgcaggtgagcgcgcgttattggccgaacgtttgcacgccaatttattaggacgtttgcaaggcgaggaacgtctcctctggctttacgaagaagtggagaaaccattgagtcgcgtgctcgcgcatatggaagctaccggtgtcaaattagacgtggcgtatttggaggcactcagccttgaagttgctgccgaaatgcgccgcttggaggaagaagtattccgtttagcaggccactcctttaaccttaattctcgcgatcagttagaacgtgtgttgttcgatgaacttggtctccctcctatcggcaagacagagaagaccggtaaacgtagcacttcagcggcggttttagaagctcttcgcgaagtccatcccattgtggacaagatcttgcagtaccgcgaactcgcgaaattgaaaggcacctatattgaccctcttccggcattagtccacccgaaaacgggacgcctccatacccgcttcaaccaaacagccacggcgaccggtcgtttgtcctcctctgatccaaaccttcagaatattccagtacgtaccccattgggccagaagatccgcaaagcgtttgtagctgaggagggttggcgtttagtggccctcgattatagccaaattgaattacgtgtccttgcccatctttctggcgatgagaacctcatccgcgtgtttcaggaaggccgcgacattcacactcaaacggcaagctggatgtttggattatcagctgaagcgatcgatcctttgatgcgtcgtgcagcgaagaccatcaatttcggtgttctctacggtatgagtgcccatcgtttgtcgcaggaattaggcattccctatgaagaagctgcggcgttcattcagaagtactttcaaagctatcccaaagttaaagcatggatcgagaagactctcgaagaaggccgcacacgtggttacgtagagaccttatttggacgtcgccgctatgttcccgatttaaacgctcgcgtgaaatctgtccgtgaagccgccgaacgcatggcgttcaacatgcctgtacagggcacggcagctgacctcatgaaacttgcaatggtgcgcctttttccacaattgcgtgaagttggtgcccgcatgctcttgcaggtccacgatgaactcttgttagaagcgccaaaagagcgtgcggaagaggtggcagccctcgcgaaagaggttatggaaggcgtgtggcccttagcggtgcctcttgaagtcgaagttggtattggcgaggattggttggctgccaaaggataatga

SEQ ID NO: 254 - protein, 841 aa, synthetic construct
  REGION 1..841: note = Variant of DNA polymerase I from Thermus sp. strain 2.9
MHHHHHHGGSGMLPLFEPKGRVLLVDGHHLAYRNFFALKGLTTSRGEPVQGVYGFAKSLLKALKEDGDVVIVVFDAKAPSFRHEAYEAYKAGRAPTPEDFPRQLALMKELVDLLGLERLEVPGFEADDVLATLAKKAEREGYEVQILTADRDLFQLLSPRISVLHPEGHRITPEWLWEKYGLRPEQWVDFRALAGDPSDNIPGVKGIGEKTALKLLKEWGSLENLLKNLDQVKPASVREKILAHLEDLKLSRELSRVRTDLPLEVDFRGRREPDWEGLKAFLERLEFGSLLHEFGLLESPLPAEEAPWPPPEGAFLGYRLSRPEPMWAELLALAASAQGRVYRAEDPHGALRGLKEVRGLLAKDLAVVALREGLDLPPTDDPMLLAYLLDPSNTTPEGVARRYGGEWTEDAGERALLAERLHANLLGRLQGEERLLWLYEEVEKPLSRVLAHMEATGVKLDVAYLEALSLEVAAEMRRLEEEVFRLAGHSFNLNSRDQLERVLFDELGLPPIGKTEKTGKRSTSAAVLEALREVHPIVDKILQYRELAKLKGTYIDPLPALVHPKTGRLHTRFNQTATATGRLSSSDPNLQNIPVRTPLGQKIRKAFVAEEGWRLVALDYSQIELRVLAHLSGDENLIRVFQEGRDIHTQTASWMFGLSAEAIDPLMRRAAKTINFGVLYGMSAHRLSQELGIPYEEAAAFIQKYFQSYPKVKAWIEKTLEEGRTRGYVETLFGRRRYVPDLNARVKSVREAAERMAFNMPVQGTAADLMKLAMVRLFPQLREVGARMLLQVHDELLLEAPKERAEEVAALAKEVMEGVWPLAVPLEVEVGIGEDWLAAKG

SEQ ID NO: 255 - DNA, 2529 bp, synthetic construct
  misc_feature 1..2529: note = Variant of DNA polymerase I from Thermus sp. strain 2.9
  source 1..2529: mol_type = other DNA
atgcaccatcatcatcatcatggcggtagcggcatgttaccgttgttcgaacctaaaggtcgcgtgcttctggttgatggccatcatctcgcgtatcgtaacttctttgccctgaaaggattaaccaccagccgtggcgagccggtacagggtgtctacggctttgcaaagtcgctcctgaaagctctgaaagaagacggtgatgtggtgattgttgtctttgatgcgaaagcgccaagttttcgccacgaagcgtacgaagcttacaaagccgggcgtgctccaacgccggaagactttcctcgccaattggcgcttatgaaggaattagtggatttgcttggcctcgaacgcttggaagttcccggtttcgaggcagacgacgtattagcgactctcgcaaagaaagccgaacgtgagggctatgaagtccagatcttgacagcagatcgcgatcttttccagcttttatctccgcgcatttccgtgttacacccggaagggcatcgtatcaccccggaatggctctgggagaaatatggtttgcgtcccgaacaatgggtggattttcgcgccttagcgggcgatccgagcgacaatattccgggagttaaaggtatcggcgagaagacggcgctcaagctccttaaagaatgggggtcgttggagaacttgcttaagaatttagatcaggtcaaaccagcttcagtgcgtgagaagattcttgcacacctcgaagacctcaaattaagccgcgaattgtcccgtgtacgcaccgatttgccgctcgaagttgatttccgtggccgccgcgaacctgactgggagggtcttaaagcgtttttagagcgtcttgaatttggttcgctcttgcatgaattcggccttttagaaagcccgttaccagccgaagaagcaccttggccaccgcccgaaggcgcgtttttaggttaccgtttgagtcgcccggaaccgatgtgggcccaattattggctcttgcagcgtctgcccagggacgtgtgtatcgcgcggaagaccctcatggtgcgctccgtggcctcaaagaagtccgtggactccttgccaaagacttagctgttgttgcattgcgcgaaggtcttgatttacctccgactgatgatccaatgcttcttgcgtacctcttggacccgtcaaacacgacgcccgaaggcgtagcccgtcgttacggcggcgagtggaccgaagatgcaggtgagcgcgcgttattggccgaacgtttgcacgccaatttattaggacgtttgcaaggcgaggaacgtctcctctggctttacgaagaagtggagaaaccattgagtcgcgtgctcgcgcatatggaagctaccggtgtcaaattagacgtggcgtatttggaggcactcagccttgaagttgctgccgaaatgcgccgcttggaggaagaagtattccgtttagcaggccactcctttaaccttaattctcgcgatcagttagaacgtgtgttgttcgatgaacttggtctccctcctatcggcaagacagagaagaccggtaaacgtagcacttcagcggcggttttagaagctcttcgcgaagtccatcccattgtggacaagatcttgcagtaccgcgaactcgcgaaattgaaaggcacctatattgaccctcttccggcattagtccacccgaaaacgggacgcctccatacccgcttcaaccaaacagccacggcgaccggtcgtttgtcctcctctgatccaaaccttcagaatattccagtacgtaccccattgggccagaagatccgcaaagcgtttgtagctgaggagggttggcgtttagtggccctcgattatagccaaattgaattacgtgtccttgcccatctttctggcgatgagaacctcatccgcgtgtttcaggaaggccgcgacattcacactcaaacggcaagctggatgtttggattatcagctgaagcgatcgatcctttgatgcgtcgtgcagcgaagaccatcaatttcggtgttctctacggtatgagtgcccatcgtttgtcgcaggaattaggcattccctatgaagaagctgcggcgttcattcagcgctactttcaaagctatcccaaagttaaagcatggatcgagaagactctcgaagaaggccgcacacgtggttacgtagagaccttatttggacgtcgccgctatgttcccgatttaaacgctcgcgtgaaatctgtccgtgaagccgccgaacgcatggcgttcaacatgcctgtacagggcacggcagctgacctcatgaaacttgcaatggtgcgcctttttccacaattgcgtgaagttggtgcccgcatgctcttgcaggtccacgatgaactcttgttagaagcgccaaaagagcgtgcggaagaggtggcagccctcgcgaaagaggttatggaaggcgtgtggcccttagcggtgcctcttgaagtcgaagttggtattggcgaggattggttggctgccaaaggataatga

SEQ ID NO: 256 - protein, 841 aa, synthetic construct
  REGION 1..841: note = Variant of DNA polymerase I from Thermus sp. strain 2.9
MHHHHHHGGSGMLPLFEPKGRVLLVDGHHLAYRNFFALKGLTTSRGEPVQGVYGFAKSLLKALKEDGDVVIVVFDAKAPSFRHEAYEAYKAGRAPTPEDFPRQLALMKELVDLLGLERLEVPGFEADDVLATLAKKAEREGYEVQILTADRDLFQLLSPRISVLHPEGHRITPEWLWEKYGLRPEQWVDFRALAGDPSDNIPGVKGIGEKTALKLLKEWGSLENLLKNLDQVKPASVREKILAHLEDLKLSRELSRVRTDLPLEVDFRGRREPDWEGLKAFLERLEFGSLLHEFGLLESPLPAEEAPWPPPEGAFLGYRLSRPEPMWAQLLALAASAQGRVYRAEDPHGALRGLKEVRGLLAKDLAVVALREGLDLPPTDDPMLLAYLLDPSNTTPEGVARRYGGEWTEDAGERALLAERLHANLLGRLQGEERLLWLYEEVEKPLSRVLAHMEATGVKLDVAYLEALSLEVAAEMRRLEEEVFRLAGHSFNLNSRDQLERVLFDELGLPPIGKTEKTGKRSTSAAVLEALREVHPIVDKILQYRELAKLKGTYIDPLPALVHPKTGRLHTRFNQTATATGRLSSSDPNLQNIPVRTPLGQKIRKAFVAEEGWRLVALDYSQIELRVLAHLSGDENLIRVFQEGRDIHTQTASWMFGLSAEAIDPLMRRAAKTINFGVLYGMSAHRLSQELGIPYEEAAAFIQRYFQSYPKVKAWIEKTLEEGRTRGYVETLFGRRRYVPDLNARVKSVREAAERMAFNMPVQGTAADLMKLAMVRLFPQLREVGARMLLQVHDELLLEAPKERAEEVAALAKEVMEGVWPLAVPLEVEVGIGEDWLAAKG

SEQ ID NO: 257 - DNA, 2529 bp, synthetic construct
  misc_feature 1..2529: note = Variant of DNA polymerase I from Thermus sp. strain 2.9
  source 1..2529: mol_type = other DNA
atgcaccatcatcatcatcatggcggtagcggcatgttaccgttgttcgaacctaaaggtcgcgtgcttctggttgatggccatcatctcgcgtatcgtaacttctttgccctgaaaggattaaccaccagccgtggcgagccggtacagggtgtctacggctttgcaaagtcgctcctgaaagctctgaaagaagacggtgatgtggtgattgttgtctttgatgcgaaagcgccaagttttcgccacgaagcgtacgaagcttacaaagccgggcgtgctccaacgccggaagactttcctcgccaattggcgcttatgaaggaattagtggatttgcttggcctcgaacgcttggaagttcccggtttcgaggcagacgacgtattagcgactctcgcaaagaaagccgaacgtgagggctatgaagtccagatcttgacagcagatcgcgatcttttccagcttttatctccgcgcatttccgtgttacacccggaagggcatcgtatcaccccggaatggctctgggagaaatatggtttgcgtcccgaacaatgggtggattttcgcgccttagcgggcgatccgagcgacaatattccgggagttaaaggtatcggcgagaagacggcgctcaagctccttaaagaatgggggtcgttggagaacttgcttaagaatttagatcaggtcaaaccagcttcagtgcgtgagaagattcttgcacacctcgaagacctcaaattaagccgcgaattggtccgtgtacgcaccgatttgccgctcgaagttgatttccgtggccgccgcgaacctgactgggagggtcttaaagcgtttttagagcgtcttgaatttggttcgctcttgcatgaattcggccttttagaaagcccgttaccagccgaagaagcaccttggccaccgcccgaaggcgcgtttttaggttaccgtttgagtcgcccggaaccgatgtgggccgaattattggctcttgcagcgtctgcccagggacgtgtgtatcgcgcggaagaccctcatggtgcgctccgtggcctcaaagaagtccgtggactccttgccaaagacttagctgttgttgcattgcgcgaaggtcttgatttacctccgactgatgatccaatgcttcttgcgtacctcttggactcgtcaaacacgacgcccgaaggcgtagcccgtcgttacggcggcgagtggaccgaagatgcaggtgagcgcgcgttattggccgaacgtttgcacgccaatttattaggacgtttgcaaggcgaggaacgtctcctctggctttacgaagaagtggagaaaccattgagtcgcgtgctcgcgcatatggaagctaccggtgtcaaattagacgtggcgtatttggaggcactcagccttgaagtcgctgccgaactgcgccgcttggaggaagaagtattccgtttagcaggccactcctttaaccttaattctcgcgatcagttagaacgtgtgttgttcgatgaacttggtctccctcctatcggcaagacagagaagaccggtaaacgtagcacttcagcggcggttttagaagctcttcgcgaagtccatcccattgtggacaagatcttgcagtaccgcgaactcgcgaaattgaaaggcacctatattgaccgtcttccggcattagtccacccgaaaacgggacgcctccatacccgcttcaaccaaacagccacggcgaccggtcgtttgtcctcctctgatccaaaccttcagaatattccagtacgtaccccattgggccagaagatccgcaaagcgtttgtagctgaggagggttggcgtttagtggccctcgattatagccaaattgaattacgtgtccttgcccatctttctggcgatgagaacctcatccgcgtgtttcaggaaggccgcgacattcacactcaaacggcaagctggatgtttggagtgtcagcggaagcgatcgatcctttgatgcgtcgtgcagcgaagaccatcaatttcggtgttctctacggtatgagtgcccatcgtttgtcgcaggaattaggcattccctatgaagaagctgcggcgttcattcagcgctactttcaaagctatcccaaagttaaagcatggatcgagaagactctcgaagaaggccgcacacgtggttacgtagagaccttatttggacgtcgccgctatgttcccgatttaaacgctcgcgtgaaatctgtccgtgaagccgccgaacgcatggcgtttaacatgcctgtacagggcacggcagctgacctcatgaaacttgcaatggtgcgcctttttccacaattgcgtgaagttggtgcccgcatgctcttgcaggtccacgatgaactcttgttagaagcgccaaaagagcgtgcggaagaggtggcagccctcgcgaaagaggttatggaaggcgtgtggcccttagcggtgcctcttgaagtcgaagttggtattggcgaggattggttggctgccaaaggataatga

SEQ ID NO: 258 - protein, 841 aa, synthetic construct
  REGION 1..841: note = Variant of DNA polymerase I from Thermus sp. strain 2.9
MHHHHHHGGSGMLPLFEPKGRVLLVDGHHLAYRNFFALKGLTTSRGEPVQGVYGFAKSLLKALKEDGDVVIVVFDAKAPSFRHEAYEAYKAGRAPTPEDFPRQLALMKELVDLLGLERLEVPGFEADDVLATLAKKAEREGYEVQILTADRDLFQLLSPRISVLHPEGHRITPEWLWEKYGLRPEQWVDFRALAGDPSDNIPGVKGIGEKTALKLLKEWGSLENLLKNLDQVKPASVREKILAHLEDLKLSRELVRVRTDLPLEVDFRGRREPDWEGLKAFLERLEFGSLLHEFGLLESPLPAEEAPWPPPEGAFLGYRLSRPEPMWAELLALAASAQGRVYRAEDPHGALRGLKEVRGLLAKDLAVVALREGLDLPPTDDPMLLAYLLDSSNTTPEGVARRYGGEWTEDAGERALLAERLHANLLGRLQGEERLLWLYEEVEKPLSRVLAHMEATGVKLDVAYLEALSLEVAAELRRLEEEVFRLAGHSFNLNSRDQLERVLFDELGLPPIGKTEKTGKRSTSAAVLEALREVHPIVDKILQYRELAKLKGTYIDRLPALVHPKTGRLHTRFNQTATATGRLSSSDPNLQNIPVRTPLGQKIRKAFVAEEGWRLVALDYSQIELRVLAHLSGDENLIRVFQEGRDIHTQTASWMFGVSAEAIDPLMRRAAKTINFGVLYGMSAHRLSQELGIPYEEAAAFIQRYFQSYPKVKAWIEKTLEEGRTRGYVETLFGRRRYVPDLNARVKSVREAAERMAFNMPVQGTAADLMKLAMVRLFPQLREVGARMLLQVHDELLLEAPKERAEEVAALAKEVMEGVWPLAVPLEVEVGIGEDWLAAKG

SEQ ID NO: 259 - DNA, 2529 bp, synthetic construct
  misc_feature 1..2529: note = Variant of DNA polymerase I from Thermus sp. strain 2.9
  source 1..2529: mol_type = other DNA
atgcaccatcatcatcatcatggcggtagcggcatgttaccgttgttcgaacctaaaggtcgcgtgcttctggttgatggccatcatctcgcgtatcgtaacttctttgccctgaaaggattaaccaccagccgtggcgagccggtacagggtgtctacggctttgcaaagtcgctcctgaaagctctgaaagaagacggtgatgtggtgattgttgtctttgatgcgaaagcgccaagttttcgccacgaagcgtacgaagcttacaaagccgggcgtgctccaacgccggaagactttcctcgccaattggcgcttatgaaggaattagtggatttgcttggcctcgaacgcttggaagttcccggtttcgaggcagacgacgtattagcgactctcgcaaagaaagccgaacgtgagggctatgaagtccagatcttgacagcagatcgcgatcttttccagcttttatctccgcgcatttccgtgttacacccggaagggcatcgtatcaccccggaatggctctgggagaaatatggtttgcgtcccgaacaatgggtggattttcgcgccttagcgggcgatccgagcgacaatattccgggagttaaaggtatcggcgagaagacggcgctcaagctccttacggaatgggggtcgttggagaacttgcttaagaatttagatcaggtcaaaccagcttcagtgcgtgagaagattcttgcacacctcgaagacctcaaattaagccgcgaattgtcccgtgtacgcaccgatttgccgctcgaagttgatttccgtggccgccgcgaacctgactgggagggtcttaaagcgtttttagagcgtcttgaatttggttcgctcttgcatgaattcggccttttagaaagcccgttaccagccgaagaagcaccttggccaccgcccgaaggcgcgtttttaggttaccgtttgagtcgcccggaaccgatgtgggccgaattattggctcttgcagcgtctgcccagggacgtgtgtatcgcgcggaagaccctcatggtgcgctccgtggcctcaaagaagtccgtggactccttgccaaagacttagctgttgttgcattgcgcgaaggtcttgatttacctccgactgatgatccaatgcttcttgcgtacctcttggacccgtcaaacacgacgcccgaaggcgtagcccgtcgttacggcggcgagtggaccgaagatgcaggtgagcgcgcgttattggccgaacgtttgcacgccaatttattaggacgtttgcaaggcgaggaacgtctcctctggctttacgaagaagtggagaaaccattgagtcgcgtgctcgcgcatatggaagctaccggtgtcaaattagacgtggcgtatttggaggcactcagccttgaagttgctgccgaaatgcgccgcttggaggaagaagtattccgtttagcaggccactcctttaaccttaattctcgcgatcagttagaacgtgtgttgttcgatgaacttggtctccctcctatcggcaagacagagaagaccggtaaacgtagcacttcagcggcggttttagaagctcttcgcgaagtccatcccattgtggacaagatcttgcagtaccgcgaactcgcgaaattgaaaggcacctatattgaccctcttccggcattagtccacccgaaaacgggacgcctccatacccgcttcaaccaaacagccacggcgaccggtcgtttgtcctcctctgatccaaaccttcagaatattccagtacgtaccccattgggccagaagatccgcaaagcgtttgtagctgaggagggttggcgtttagtggccctcgattatagccaaattgaattacgtgtccttgcccatctttctggcgatgagaacctcatccgcgtgtttcaggaaggccgcgacattcacactcaaacggcaagctggatgtttggattatcagctgaagcgatcgatcctttgatgcgtcgtgcagcgaagaccatcaatttcggtgttctctacggtatgagtgcccatcgtttgtcgcaggaattaggcattccctatgaagaagctgcggcgttcattcagcgctactttcaaagctatcccaaagttaaagcatggatcgagaagactctcgaagaaggccgcacacgtggttacgtagagaccttatttggacgtcgccgctatgttcccgatttaaacgctcgcgtgaaatctgtccgtgaagccgccgaacgcatggcgttcaacatgcctgtacagggcacggcagctgacctcatgaaacttgcaatggtgcgcctttttccacaattgcgtgaagttggtgcccgcatgctcttgcaggtccacgatgaactcttgttagaagcgccaaaagagcgtgcggaagaggtggcagccctcgcgaaagaggttatggaaggcgtgtggcccttagcggtgcctcttgaagtcgaagttggtattggcgaggattggttggctgccaaaggataatga

SEQ ID NO: 260 - protein, 841 aa, synthetic construct
  REGION 1..841: note = Variant of DNA polymerase I from Thermus sp. strain 2.9
MHHHHHHGGSGMLPLFEPKGRVLLVDGHHLAYRNFFALKGLTTSRGEPVQGVYGFAKSLLKALKEDGDVVIVVFDAKAPSFRHEAYEAYKAGRAPTPEDFPRQLALMKELVDLLGLERLEVPGFEADDVLATLAKKAEREGYEVQILTADRDLFQLLSPRISVLHPEGHRITPEWLWEKYGLRPEQWVDFRALAGDPSDNIPGVKGIGEKTALKLLTEWGSLENLLKNLDQVKPASVREKILAHLEDLKLSRELSRVRTDLPLEVDFRGRREPDWEGLKAFLERLEFGSLLHEFGLLESPLPAEEAPWPPPEGAFLGYRLSRPEPMWAELLALAASAQGRVYRAEDPHGALRGLKEVRGLLAKDLAVVALREGLDLPPTDDPMLLAYLLDPSNTTPEGVARRYGGEWTEDAGERALLAERLHANLLGRLQGEERLLWLYEEVEKPLSRVLAHMEATGVKLDVAYLEALSLEVAAEMRRLEEEVFRLAGHSFNLNSRDQLERVLFDELGLPPIGKTEKTGKRSTSAAVLEALREVHPIVDKILQYRELAKLKGTYIDPLPALVHPKTGRLHTRFNQTATATGRLSSSDPNLQNIPVRTPLGQKIRKAFVAEEGWRLVALDYSQIELRVLAHLSGDENLIRVFQEGRDIHTQTASWMFGLSAEAIDPLMRRAAKTINFGVLYGMSAHRLSQELGIPYEEAAAFIQRYFQSYPKVKAWIEKTLEEGRTRGYVETLFGRRRYVPDLNARVKSVREAAERMAFNMPVQGTAADLMKLAMVRLFPQLREVGARMLLQVHDELLLEAPKERAEEVAALAKEVMEGVWPLAVPLEVEVGIGEDWLAAKG

SEQ ID NO: 261 - DNA, 2529 bp, synthetic construct
  misc_feature 1..2529: note = Variant of DNA polymerase I from Thermus sp. strain 2.9
  source 1..2529: mol_type = other DNA
atgcaccatcatcatcatcatggcggtagcggcatgttaccgttgttcgaacctaaaggtcgcgtgcttctggttgatggccatcatctcgcgtatcgtaacttctttgccctgaaaggattaaccaccagccgtggcgagccggtacagggtgtctacggctttgcaaagtcgctcctgaaagctctgaaagaagacggtgatgtggtgattgttgtctttgatgcgaaagcgccaagttttcgccacgaagcgtacgaagcttacaaagccgggcgtgctccaacgccggaagactttcctcgccaattggcgcttatgaaggaattagtggatttgcttggcctcgaacgcttggaagttcccggtttcgaggcagacgacgtattagcgactctcgcaaagaaagccgaacgtgagggctatgaagtccagatcttgacagcagatcgcgatcttttccagcttttatctccgcgcatttccgtgttacacccggaagggcatcgcatcaccccggaatggctctgggagaaatatggtttgcgtcccgaacaatgggtggattttcgcgccttagcaggcgatccgagcgacaatattccgggagttaaaggtatcggcgagaagacggcgctcaagctccttaaagaatgggggtcgttggagaacttgcttaagaatttagatcaggtcaaaccagcttcagtgcgtgagaagattcttgcacacctcgaagacctcaaattaagccgcgaattgtcccgtgtacgcaccgatttgccgctcgaagttgatttccgtggccgccgcgaacctgactgggagggtcttaaagcgtttttagagcgtcttgaatttggttcgctcttgcatgaattcggccttttagaaagcccgttaccagccgaagaagcaccttggccaccgcccgaaggcgcgtttttaggttaccgtttgagtcgcccggaaccgatgtgggccgaattattggctcttgcagcgtctgcccagggacgtgtgtatcgcgcggaagaccctcatggtgcgctccgtggcctcaaagaagtccgtggactccttgccaaagacttagctgttgttgcattgcgcgaaggtcttgatttacctccgactgatgatccaatgcttcttgcgtacctcttggacccgtcaaacacgacgcccgaaggcgtagcccgtcgttacggcggcgagtggaccgaagatgcaggtgagcgcgcgttattggccgaacgtttgcacgccaatttattaggacgtttgcaaggcgaggaacgtctcctctggctttacgaagaagtggagaaaccattgagtcgcgtgctcgcgcatatggaagctaccggtgtcaaattagacgtggcgtatttggaggcactcagccttgaagttgctgccgaaatgcgccgcttggaggaagaagtattccgtttagcaggccactcctttaaccttaattctcgcgatcagttagaacgtgtgttgttcgatgaacttggtctccctcctatcggcaagacagagaagaccggtaaacgtagcacttcagcggcggttttagaagctcttcgcgaagtccatcccattgtggacaagatcttgcagtaccgcgaactcgcgaaattgaaaggcacctatattgaccctcttccggcattagtccacccgaaaacgggacgcctccatacccgcttcaaccaaacagccacggcgaccggtcgtttgtcctcctctgatccaaaccttcagaatattccagtacgtaccccattgggccagaagatccgcaaagcgtttgtagctgaggagggttggcgtttagtggccctcgattatagccaaattgaattacgtgtccttgcccatctttctggcgatgagaacctcatccgcgtgtttcaggaaggccgtgacattcacactcaaacggcaagctggatgtttggattatcagctgaagcgatcgatcctttgatgcgtcgtgcagcgaagaccgttaatttcggtgttctctacggtatgagtgcccatcgtttgtcgcaggaattaggcattccctatgaagaagctgcggcgttcattcagcgctactttcaaagctatcccaaagttaaagcatggatcgagaagactctcgaagaaggccgcacacgtggttacgtagagaccttatttggacgtcgccgctatgttcccgatttaaacgctcgcgtgaaatctgtccgtgaagccgccgaacgcatggcgttcaacatgcctgtacagggcacggcagctgacctcatgaaacttgcaatggtgcgcctttttccacaattgcgtgaagttggtgcccgcatgctcttgcaggtccacgatgaactcttgttagaagcgccaaaagagcgtgcggaagaggtggcagccctcgcgaaagaggttatggaaggcgtgtggcccttagcggtgcctcttgaagtcgaagttggtattggcgaggattggttggctgccaaaggataatga

SEQ ID NO: 262 - protein, 841 aa, synthetic construct
  REGION 1..841: note = Variant of DNA polymerase I from Thermus sp. strain 2.9
MHHHHHHGGSGMLPLFEPKGRVLLVDGHHLAYRNFFALKGLTTSRGEPVQGVYGFAKSLLKALKEDGDVVIVVFDAKAPSFRHEAYEAYKAGRAPTPEDFPRQLALMKELVDLLGLERLEVPGFEADDVLATLAKKAEREGYEVQILTADRDLFQLLSPRISVLHPEGHRITPEWLWEKYGLRPEQWVDFRALAGDPSDNIPGVKGIGEKTALKLLKEWGSLENLLKNLDQVKPASVREKILAHLEDLKLSRELSRVRTDLPLEVDFRGRREPDWEGLKAFLERLEFGSLLHEFGLLESPLPAEEAPWPPPEGAFLGYRLSRPEPMWAELLALAASAQGRVYRAEDPHGALRGLKEVRGLLAKDLAVVALREGLDLPPTDDPMLLAYLLDPSNTTPEGVARRYGGEWTEDAGERALLAERLHANLLGRLQGEERLLWLYEEVEKPLSRVLAHMEATGVKLDVAYLEALSLEVAAEMRRLEEEVFRLAGHSFNLNSRDQLERVLFDELGLPPIGKTEKTGKRSTSAAVLEALREVHPIVDKILQYRELAKLKGTYIDPLPALVHPKTGRLHTRFNQTATATGRLSSSDPNLQNIPVRTPLGQKIRKAFVAEEGWRLVALDYSQIELRVLAHLSGDENLIRVFQEGRDIHTQTASWMFGLSAEAIDPLMRRAAKTVNFGVLYGMSAHRLSQELGIPYEEAAAFIQRYFQSYPKVKAWIEKTLEEGRTRGYVETLFGRRRYVPDLNARVKSVREAAERMAFNMPVQGTAADLMKLAMVRLFPQLREVGARMLLQVHDELLLEAPKERAEEVAALAKEVMEGVWPLAVPLEVEVGIGEDWLAAKG

SEQ ID NO: 263 - DNA, 2529 bp, synthetic construct
  misc_feature 1..2529: note = Variant of DNA polymerase I from Thermus sp. strain 2.9
  source 1..2529: mol_type = other DNA
atgcaccatcatcatcatcatggcggtagcggcatgttaccgttgttcgaacctaaaggtcgcgtgcttctggttgatggccatcatctcgcgtatcgtaacttctttgccctgaaaggattaaccaccagccgtggcgagccggtacagggtgtctacggctttgcaaagtcgctcctgaaagctctgaaagaagacggtgatgtggtgattgttgtctttgatgcgaaagcgccaagttttcgccacgaagcgtacgaagcttacaaagccgggcgtgctccaacgccggaagactttcctcgccaattggcgcttatgaaggaattagtggatttgcttggcctcgaacgcttggaagttcccggtttcgaggcagacgacgtattagcgactctcgcaaagaaagccgaacgtgagggctatgaagtccagatcttgacagcagatcgcgatcttttccagcttttatctccgcgcatttccgtgttacacccggaagggcatctgatcaccccggaatggctctgggagaaatatggtttgcgtcccgaacaatgggtggattttcgcgccttagcgggcgatccgagcgacaatattccgggagttaaaggtatcggcgagaagacggcgctcaagctccttaaagaatgggggtcgttggagaacttgcttaagaatttagatcaggtcaaaccagagtcagtgcgtgagaagattcttgcacacctcgaagacctcaaattaagccgcgaattgtcccgtgtacgcaccgatttgccgctcgaagttgatttccgtggccgccgcgaacctgactgggagggtcttaaagcgtttttagagcgtcttgaatttggttcgctcttgcatgaattcggccttttagaaagcccgttaccagccgaagaagcaccttggccaccgcccgaaggcgcgtttttaggttacgttttgagtcgcccggaaccgatgtgggccgaattattggctcttgcagcgtctgcccagggacgtgtgtatcgcgcggaagaccctcatggtgcgctcaaaggcctcaaagaagtccgtggactccttgccaaagacttagctgttgttgcattgcgcgaaggtcttgatttacctccgactgatgatccaatgcttcttgcgtacctcttggacccgtcaaacacgacgcccgaaggcgtagcccgtcgttacggcggcgagtggaccgaagatgcagccgagcgcgcgttattggccgaacgtttgcacgccaatttattaggacgtttgcaaggcgaggaaaagctcctctggctttacgaagaagtggagaaaccattgagtcgcgtgctcgcgcatatggaagctaccggtgtcaaattagacgtggcgtatttggaggcactcagccttgaagttgctgccgaaattcgccgcttggaggaagaagtattccgtttagcaggccactcctttaaccttaattctcgcgatcagttagaacgtgtgttgttcgatgaacttggtctccctcctatcggcaagacagagaagaccggtaaacgtagcacttcagcggcggttttagaagctcttcgcgaagtccatcccattgtggacaagatcttgcagtaccgcgaactcgcgaaattgaaaggcacctatattgaccctcttccggcattagtccacccgaaaacgggacgcctccatacccgcttcaaccaaacagccacggcgaccggtcgtttgtcctcctctgatccaaaccttcagaatattccagtacgtaccccattgggccagaagatccgcaaagcgtttgtagctgaggagggttggcgtttagtggccctcgattatagccaaattgaattacgtgtccttgcccatctttctggcgatgagaacctcatccgcgtgtttcaggaaggcaaagacattcacactcaaacggcaagctggatgtttggattatcgccggaagcgatcgatcctttgatgcgtcgtgcagcgaagaccgttaatttcggtgttctctacggtatgagtgcccatcgtttgtcgcaggaattaggcattccctatgaagaagctgcggcgttcattcagcgctactttcaaagctatcccaaagttaaagcatggatcgagaagactctcgaagaaggccgcacacgtggttacgtagagaccttatttggacgtcgccgctatgttcccgatttaaacgctcgcgtgaaatctgtccgtgaagccgccgaacgcatggcgttcaacatgcctgtacagggcacggcagctgacctcatgaaacttgcaatggtgcgcctttttccacaattgcgtgaagttggtgcccgcatgctcttgcaggtccacgatgaactcttgttagaagcgccaaaagagcgtgcggaagaggtggcagccctcgcgaaagaggttatggaaggcgtgtggcccttagcggtgcctcttgaagtcgaagttggtattggcgaggattggttggctgccaaaggataatga

SEQ ID NO: 264 - protein, 841 aa, synthetic construct
  REGION 1..841: note = Variant of DNA polymerase I from Thermus sp. strain 2.9
MHHHHHHGGSGMLPLFEPKGRVLLVDGHHLAYRNFFALKGLTTSRGEPVQGVYGFAKSLLKALKEDGDVVIVVFDAKAPSFRHEAYEAYKAGRAPTPEDFPRQLALMKELVDLLGLERLEVPGFEADDVLATLAKKAEREGYEVQILTADRDLFQLLSPRISVLHPEGHLITPEWLWEKYGLRPEQWVDFRALAGDPSDNIPGVKGIGEKTALKLLKEWGSLENLLKNLDQVKPESVREKILAHLEDLKLSRELSRVRTDLPLEVDFRGRREPDWEGLKAFLERLEFGSLLHEFGLLESPLPAEEAPWPPPEGAFLGYVLSRPEPMWAELLALAASAQGRVYRAEDPHGALKGLKEVRGLLAKDLAVVALREGLDLPPTDDPMLLAYLLDPSNTTPEGVARRYGGEWTEDAAERALLAERLHANLLGRLQGEEKLLWLYEEVEKPLSRVLAHMEATGVKLDVAYLEALSLEVAAEIRRLEEEVFRLAGHSFNLNSRDQLERVLFDELGLPPIGKTEKTGKRSTSAAVLEALREVHPIVDKILQYRELAKLKGTYIDPLPALVHPKTGRLHTRFNQTATATGRLSSSDPNLQNIPVRTPLGQKIRKAFVAEEGWRLVALDYSQIELRVLAHLSGDENLIRVFQEGKDIHTQTASWMFGLSPEAIDPLMRRAAKTVNFGVLYGMSAHRLSQELGIPYEEAAAFIQRYFQSYPKVKAWIEKTLEEGRTRGYVETLFGRRRYVPDLNARVKSVREAAERMAFNMPVQGTAADLMKLAMVRLFPQLREVGARMLLQVHDELLLEAPKERAEEVAALAKEVMEGVWPLAVPLEVEVGIGEDWLAAKG

SEQ ID NO: 265 - DNA, 2529 bp, synthetic construct
  misc_feature 1..2529: note = Variant of DNA polymerase I from Thermus sp. strain 2.9
  source 1..2529: mol_type = other DNA
atgcaccatcatcatcatcatggcggtagcggcatgttaccgttgttcgaacctaaaggtcgcgtgcttctggttgatggccatcatctcgcgtatcgtaacttctttgccctgaaaggattaaccaccagccgtggcgagccggtacagggtgtctacggctttgcaaagtcgctcctgaaagctctgaaagaagacggtgatgtggtgattgttgtctttgatgcgaaagcgccaagttttcgccacgaagcgtacgaagcttacaaagccgggcgtgctccaacgccggaagactttcctcgccaattggcgcttatgaaggaattagtggatttgcttggcctcgaacgcttggaagttcccggtttcgaggcagacgacgtattagcgactctcgcaaagaaagccgaacgtgagggctatgaagtccagatcttgacagcagatcgcgatcttttccagcttttatctccgcgcatttccgtgttacacccggaagggcatcgtatcaccccggaatggctctgggagaaatatggtttgcgtcccgaacaatgggtggattttcgcgccttagcgggcgatccgagcgacaatattccgggagttaaaggtatcggcgagaagacggcgctcaagctccttaaagaatgggggtcgttggagaacttgcttaagaatttagatcaggtcaaaccagcttcagtgcgtgagaagattcttgcacacctcgaagacctcaaattaagccgcgaattgtcccgtgtacgcaccgatttgccgctcgaagttgatttccgtggccgccgcgaacctgactgggagggtcttaaagcgtttttagagcgtcttgaatttggttcgctcttgcatgaattcggccttttagaaagcccgttaccagccgaagaagcaccttggccaccgcccgaaggcgcgtttttaggttaccgtttgagtcgcccggaaccgatgtgggccgaattattggctcttgcagcgtctgcccaggagcgtgtgtatcgcgcggaagaccctcatggtgcgctccgtggcctcaaagaagtccgtggactccttgccaaagacttagctgttgttgcattgcgcgaaggtcttgatttacctccgactgatgatccaatgcttcttgcgtacctcttggacccgtcaaacacgacgcccgaaggcgtagcccgtcgttacggcggcgagtggaccgaagatgcaggtgagcgcgcgttattggccgaacgtttgcacgccaatttattaggacgtttgcaaggcgaggaacgtctcctctggctttacgaagaagtggagaaaccattgagtcgcgtgctcgcgcatatggaagctaccggtgtcaaattagacgtggcgtatttggaggcactcagccttgaagttgctgccgaaatgcgccgcttggaggaagaagtattccgtttagcaggccactcctttaaccttaattctcgcgatcagttagaacgtgtgttgttcgatgaacttggtctccctcctatcggcaagacagagaagaccggtaaacgtagcacttcagcggcggttttagaagctcttcgcgaagtccatcccattgtggacaagatcttgcagtaccgcgaactcgcgaaattgaaaggcacctatattgaccctcttccggcattagtccacccgaaaacgggacgcctccatacccgcttcaaccaaacagccacggcgaccggtcgtttgtcctcctctgatccaaaccttcagaatattccagtacgtaccccattgggccagaagatccgcaaagcgtttgtagctgaggagggttggcgtttagtggccctcgattatagccaaattgaattacgtgtccttgcccatctttctggcgatgagaacctcatccgcgtgtttcaggaaggccgcgacattcacactcaaacggcaagctggatgtttggattatcagctgaagcgatcgatcctttgatgcgtcgtgcagcgaagaccatcaatttcggtgttctctacggtatgagtgcccatcgtttgtcgcaggaattaggcattccctatgaagaagctgcggcgttcattcagcgctactttcaaagctatcccaaagttaaagcatggatcgagaagactctcgaagaaggccgcacacgtggttacgtagagaccttatttggacgtcgccgctatgttcccgatttaaacgctcgcgtgaaatctgtccgtgaagccgccgaacgcatggcgttcaacatgcctgtacagggcacggcagctgacctcatgaaacttgcaatggtgcgcctttttccacaattgcgtgaagttggtgcccgcatgctcttgcaggtccacgatgaactcttgttagaagcgccaaaagagcgtgcggaagaggtggcagccctcgcgaaagaggttatggaaggcgtgtggcccttagcggtgcctcttgaagtcgaagttggtattggcgaggattggttggctgccaaaggataatga

SEQ ID NO: 266 - protein, 841 aa, synthetic construct
  REGION 1..841: note = Variant of DNA polymerase I from Thermus sp. strain 2.9
MHHHHHHGGSGMLPLFEPKGRVLLVDGHHLAYRNFFALKGLTTSRGEPVQGVYGFAKSLLKALKEDGDVVIVVFDAKAPSFRHEAYEAYKAGRAPTPEDFPRQLALMKELVDLLGLERLEVPGFEADDVLATLAKKAEREGYEVQILTADRDLFQLLSPRISVLHPEGHRITPEWLWEKYGLRPEQWVDFRALAGDPSDNIPGVKGIGEKTALKLLKEWGSLENLLKNLDQVKPASVREKILAHLEDLKLSRELSRVRTDLPLEVDFRGRREPDWEGLKAFLERLEFGSLLHEFGLLESPLPAEEAPWPPPEGAFLGYRLSRPEPMWAELLALAASAQERVYRAEDPHGALRGLKEVRGLLAKDLAVVALREGLDLPPTDDPMLLAYLLDPSNTTPEGVARRYGGEWTEDAGERALLAERLHANLLGRLQGEERLLWLYEEVEKPLSRVLAHMEATGVKLDVAYLEALSLEVAAEMRRLEEEVFRLAGHSFNLNSRDQLERVLFDELGLPPIGKTEKTGKRSTSAAVLEALREVHPIVDKILQYRELAKLKGTYIDPLPALVHPKTGRLHTRFNQTATATGRLSSSDPNLQNIPVRTPLGQKIRKAFVAEEGWRLVALDYSQIELRVLAHLSGDENLIRVFQEGRDIHTQTASWMFGLSAEAIDPLMRRAAKTINFGVLYGMSAHRLSQELGIPYEEAAAFIQRYFQSYPKVKAWIEKTLEEGRTRGYVETLFGRRRYVPDLNARVKSVREAAERMAFNMPVQGTAADLMKLAMVRLFPQLREVGARMLLQVHDELLLEAPKERAEEVAALAKEVMEGVWPLAVPLEVEVGIGEDWLAAKG

SEQ ID NO: 267 - DNA, 2529 bp, synthetic construct
  misc_feature 1..2529: note = Variant of DNA polymerase I from Thermus sp. strain 2.9
  source 1..2529: mol_type = other DNA
atgcaccatcatcatcatcatggcggtagcggcatgttaccgttgttcgaacctaaaggtcgcgtgcttctggttgatggccatcatctcgcgtatcgtaacttctttgccctgaaaggattaaccaccagccgtggcgagccggtacagggtgtctacggctttgcaaagtcgctcctgaaagctctgaaagaagacggtgatgtggtgattgttgtctttgatgcgaaagcgccaagttttcgccacgaagcgtacgaagcttacaaagccgggcgtgctccaacgccggaagactttcctcgccaattggcgcttatgaaggaattagtggatttgcttggcctcgaacgcttggaagttcccggtttcgaggcagacgacgtattagcgactctcgcaaagaaagccgaacgtgagggctatgaagtccagatcttgacagcagatcgcgatcttttccagcttttatctccgcgcatttccgtgttacacccggaagggcatcgtatcaccccggaatggctctgggagaaatatggtttgcgtcccgaacaatgggtggattttcgcgccttagcgggcgatccgagcgacaatattccgggagttaaaggtatcggcgagaagacggcgctcaagctccttaaagaatgggggtcgttggagaacttgcttgaaaatttagatcaggtcaaaccagcttcagtgcgtgagaagattcttgcacacctcgaagacctcaaattaagccgcgaattgtcccgtgtacgcaccgatttgccgctcgaagttgatttccgtggccgccgcgaacctgactgggagggtcttaaagcgtttttagagcgtcttgaatttggttcgctcttgcatgaattcggccttttagaaagcccgttaccagccgaagaagcaccttggccaccgcccgaaggcgcgtttttaggttaccgtttgagtcgcccggaaccgatgtgggccgaattattggctcttgcagcgtctgcccagggacgtgtgtatcgcgcggaagaccctcatggtgcgctccgtggcctcaaagaagtccgtggactccttgccaaagacttagctgttgttgcattgcgcgaaggtcttgatttacctccgactgatgatccaatgcttcttgcgtacctcttggacccgtcaaacacgacgcccgaaggcgtagcccgtcgttacggcggcgagtggaccgaagatgcaggtgagcgcgcgttattggccgaacgtttgcacgccaatttattaggacgtttgcaaggcgaggaacgtctcctctggctttacgaagaagtggagaaaccattgagtcgcgtgctcgcgcatatggaagctaccggtgtcaaattagacgtggcgtatttggaggcactcagccttgaagttgctgccgaaatgcgccgcttggaggaagaagtattccgtttagcaggccactcctttaaccttaattctcgcgatcagttagaacgtgtgttgttcgatgaacttggtctccctcctatcggcaagacagagaagaccggtaaacgtagcacttcagcggcggttttagaagctcttcgcgaagtccatcccattgtggacaagatcttgcagtaccgcgaactcgcgaaattgaaaggcacctatattgaccctcttccggcattagtccacccgaaaacgggacgcctccatacccgcttcaaccaaacagccacggcgaccggtcgtttgtcctcctctgatccaaaccttcagaatattccagtacgtaccccattgggccagaagatccgcaaagcgtttgtagctgaggagggttggcgtttagtggccctcgattatagccaaattgaattacgtgtccttgcccatctttctggcgatgagaacctcatccgcgtgtttcaggaaggccgcgacattcacactcaaacggcaagctggatgtttggattatcagctgaagcgatcgatcctttgatgcgtcgtgcagcgaagaccatcaatttcggtgttctctacggtatgagtgcccatcgtttgtcgcaggaattaggcattccctatgaagaagctgcggcgttcattcagcgctactttcaaagctatcccaaagttaaagcatggatcgagaagactctcgaagaaggccgcacacgtggttacgtagagaccttatttggacgtcgccgctatgttcccgatttaaacgctcgcgtgaaatctgtccgtgaagccgccgaacgcatggcgttcaacatgcctgtacagggcacggcagctgacctcatgaaacttgcaatggtgcgcctttttccacaattgcgtgaagttggtgcccgcatgctcttgcaggtccacgatgaactcttgttagaagcgccaaaagagcgtgcggaagaggtggcagccctcgcgaaagaggttatggaaggcgtgtggcccttagcggtgcctcttgaagtcgaagttggtattggcgaggattggttggctgccaaaggataatga

SEQ ID NO: 268 - protein, 841 aa, synthetic construct
  REGION 1..841: note = Variant of DNA polymerase I from Thermus sp. strain 2.9
MHHHHHHGGSGMLPLFEPKGRVLLVDGHHLAYRNFFALKGLTTSRGEPVQGVYGFAKSLLKALKEDGDVVIVVFDAKAPSFRHEAYEAYKAGRAPTPEDFPRQLALMKELVDLLGLERLEVPGFEADDVLATLAKKAEREGYEVQILTADRDLFQLLSPRISVLHPEGHRITPEWLWEKYGLRPEQWVDFRALAGDPSDNIPGVKGIGEKTALKLLKEWGSLENLLENLDQVKPASVREKILAHLEDLKLSRELSRVRTDLPLEVDFRGRREPDWEGLKAFLERLEFGSLLHEFGLLESPLPAEEAPWPPPEGAFLGYRLSRPEPMWAELLALAASAQGRVYRAEDPHGALRGLKEVRGLLAKDLAVVALREGLDLPPTDDPMLLAYLLDPSNTTPEGVARRYGGEWTEDAGERALLAERLHANLLGRLQGEERLLWLYEEVEKPLSRVLAHMEATGVKLDVAYLEALSLEVAAEMRRLEEEVFRLAGHSFNLNSRDQLERVLFDELGLPPIGKTEKTGKRSTSAAVLEALREVHPIVDKILQYRELAKLKGTYIDPLPALVHPKTGRLHTRFNQTATATGRLSSSDPNLQNIPVRTPLGQKIRKAFVAEEGWRLVALDYSQIELRVLAHLSGDENLIRVFQEGRDIHTQTASWMFGLSAEAIDPLMRRAAKTINFGVLYGMSAHRLSQELGIPYEEAAAFIQRYFQSYPKVKAWIEKTLEEGRTRGYVETLFGRRRYVPDLNARVKSVREAAERMAFNMPVQGTAADLMKLAMVRLFPQLREVGARMLLQVHDELLLEAPKERAEEVAALAKEVMEGVWPLAVPLEVEVGIGEDWLAAKG

SEQ ID NO: 269 - DNA, 2529 bp, synthetic construct
  misc_feature 1..2529: note = Variant of DNA polymerase I from Thermus sp. strain 2.9
  source 1..2529: mol_type = other DNA
atgcaccatcatcatcatcatggcggtagcggcatgttaccgttgttcgaacctaaaggtcgcgtgcttctggttgatggccatcatctcgcgtatcgtaacttctttgccctgaaaggattaaccaccagccgtggcgagccggtacagggtgtctacggctttgcaaagtcgctcctgaaagctctgaaagaagacggtgatgtggtgattgttgtctttgatgcgaaagcgccaagttttcgccacgaagcgtacgaagcttacaaagccgggcgtgctccaacgccggaagactttcctcgccaattggcgcttatgaaggaattagtggatttgcttggcctcgaacgcttggaagttcccggtttcgaggcagacgacgtattagcgactctcgcaaagaaagccgaacgtgagggctatgaagtccagatcttgacagcagatcgcgatcttttccagcttttatctccgcgcatttccgtgttacacccggaagggcatctgatcaccccggaatggctctgggagaaatatggtttgcgtcccgaacaatgggtggattttcgcgccttagcgggcgatccgagcgacaatattccgggagttaaaggtatcggcgagaagacggcgctcaagctccttaaagaatgggggtcgttggagaacttgcttaagaatttagatcaggtcaaaccagcgtcagtgcgtgagaagattcttgcacacctcgaagacctcaaattaagccgcgaattgtcccgtgtacgcaccgatttgccgctcgaagttgatttccgtcgccgccgcgaacctgactgggagggtcttaaagcgtttttagagcgtcttgaatttggttcgctcttgcatgaattcggccttttagaaagcccgttaccagccgaagaagcaccttggccaccgcccgaaggcgcgtttttaggttaccgtttgagtcgcccggaaccgatgtgggccgaattattggctcttgcagcgtctgcccagggacgtgtgtatcgcgcggaagaccctcatggtgcgctcaaaggcctcaaagaagtccgtggactccttgccaaagacttagctgttgttgcattgcgcgaaggtcttgatttacctccgactgatgatccaatgcttcttgcgtacctcttggacccgtcaaacacgacgcccgaaggcgtagcccgtcgttacggcggcgagtggaccgaagatgcaggcgagcgcgcgttattggccgaacgtttgcaccagaatttattaggacgtttgcaaggcgaggaacgtctcctctggctttacgaagaagtggagaaaccattgagtcgcgtgctcgcgcatatggaagctaccggtgtcaaattagacgtggcgtatttggaggcactcagccttgaagttgctgccgaaattcgccgcttggaggaagaagtattccgtttagcaggccactcctttaaccttaattctcgcgatcagttagaacgtgtgttgttcgatgaacttggtctccctcctatcggcaagacagagaagaccggtaaacgtagcacttcagcggcggttttagaagctcttcgcgaagtccatcccattgtggacaagatcttgcagtaccgcgaactcgcgaaattgaaaggcacctatattgaccctcttccggcattagtccacccgaaaacgggacgcctccatacccgcttcaaccaaacagccacggcgaccggtcgtttgtcctcctctgatccaaaccttcagaatattccagtacgtaccccattgggccagaagatccgccgcgcgtttgtagctgaggagggttggcgtttagtggccctcgattatagccaaattgaattacgtgtccttgcccatctttctggcgatgagaacctcatccgcgtgtttcaggaaggccgtgacattcacactcaaacggcaagctggatgtttggattaccgccggaagcgatcgatcctttgatgcgtcgtgcagcgaagaccatcaatttcggtgttctctacggtatgagtgcccatcgtttgtcgcaggaattaggcattccctatgaagaagctgtggcgttcattcagcgctactttcaaagctatcccaaagttaaagcatggatcgagaagactctcgaagaaggccgcacacgtggttacgtagagaccttatttggacgtcgccgctatgttcccgatttaaacgctcgcgtgaaatctgtccgtgaagccgccgaacgcatggcgttcaacatgcctgtacagggcacggcagctgacctcatgaaacttgcaatggtgcgcctttttccacaattgcgtgaagttggtgcccgcatgctcttgcaggtccacgatgaactcttgttagaagcgccaaaagagcgtgcggaagaggtggcagccctcgcgaaagaggttatggaaggcgtgtggcccttagcggtgcctcttgaagtcgaagttggtattggcgaggattggttggctgccaaaggataatga

SEQ ID NO: 270 - protein, 841 aa, synthetic construct
  REGION 1..841: note = Variant of DNA polymerase I from Thermus sp. strain 2.9
MHHHHHHGGSGMLPLFEPKGRVLLVDGHHLAYRNFFALKGLTTSRGEPVQGVYGFAKSLLKALKEDGDVVIVVFDAKAPSFRHEAYEAYKAGRAPTPEDFPRQLALMKELVDLLGLERLEVPGFEADDVLATLAKKAEREGYEVQILTADRDLFQLLSPRISVLHPEGHLITPEWLWEKYGLRPEQWVDFRALAGDPSDNIPGVKGIGEKTALKLLKEWGSLENLLKNLDQVKPASVREKILAHLEDLKLSRELSRVRTDLPLEVDFRRRREPDWEGLKAFLERLEFGSLLHEFGLLESPLPAEEAPWPPPEGAFLGYRLSRPEPMWAELLALAASAQGRVYRAEDPHGALKGLKEVRGLLAKDLAVVALREGLDLPPTDDPMLLAYLLDPSNTTPEGVARRYGGEWTEDAGERALLAERLHQNLLGRLQGEERLLWLYEEVEKPLSRVLAHMEATGVKLDVAYLEALSLEVAAEIRRLEEEVFRLAGHSFNLNSRDQLERVLFDELGLPPIGKTEKTGKRSTSAAVLEALREVHPIVDKILQYRELAKLKGTYIDPLPALVHPKTGRLHTRFNQTATATGRLSSSDPNLQNIPVRTPLGQKIRRAFVAEEGWRLVALDYSQIELRVLAHLSGDENLIRVFQEGRDIHTQTASWMFGLPPEAIDPLMRRAAKTINFGVLYGMSAHRLSQELGIPYEEAVAFIQRYFQSYPKVKAWIEKTLEEGRTRGYVETLFGRRRYVPDLNARVKSVREAAERMAFNMPVQGTAADLMKLAMVRLFPQLREVGARMLLQVHDELLLEAPKERAEEVAALAKEVMEGVWPLAVPLEVEVGIGEDWLAAKG

SEQ ID NO: 271 - DNA, 2529 bp, synthetic construct
  misc_feature 1..2529: note = Variant of DNA polymerase I from Thermus sp. strain 2.9
  source 1..2529: mol_type = other DNA
atgcaccatcatcatcatcatggcggtagcggcatgttaccgttgttcgaacctaaaggtcgcgtgcttctggttgatggccatcatctcgcgtatcgtaacttctttgccctgaaaggattaaccaccagccgtggcgagccggtacagggtgtctacggctttgcaaagtcgctcctgaaagctctgaaagaagacggtgatgtggtgattgttgtctttgatgcgaaagcgccaagttttcgccacgaagcgtacgaagcttacaaagccgggcgtgctccaacgccggaagactttcctcgccaattggcgcttatgaaggaattagtggatttgcttggcctcgaacgcttggaagttcccggtttcgaggcagacgacgtattagcgactctcgcaaagaaagccgaacgtgagggctatgaagtccagatcttgacagcagatcgcgatcttttccagcttttatctccgcgcatttccgtgttacacccggaagggcatcgcatcaccccggaatggctctgggagaaatatggtttgcgtcccgaacaatgggtggattttcgcgccttagcgggcgatccgagcgacaatattccgggagttaaaggtatcggcgagaagacggcgctcaagctccttaaagaatgggggtcgttggagaacttgcttaagaatttagatcaggtcaaaccagagtcagtgcgtgagaagattcttgcacacctcgaagacctcaaattaagccgcgaattgtcccgtgtacgcaccgatttgccgctcgaagttgatttccgtggccgccgcgaacctgactgggagggtcttaaagcgtttttagagcgtcttgaatttggttcgctcttgcatgaattcggccttttagaaagcccgttaccagccgaagaagcaccttggccaccgcccgaaggcgcgtttttaggttaccgtttgagtcgcccggaaccgatgtgggccgaattattggctcttgcagcgtctgcccagggacgtgtgtatcgcgcggaagaccctcatggtgcgctccgtggcctcaaagaagtccgtggactccttgccaaagacttagctgttgttgcattgcgcgaaggtcttgatttacctccgactgatgatccaatgcttcttgcgtacctcttggacccgtcaaacacgacgcccgaaggcgtagcccgtcgttacggcggcgagtggaccgaagatgcaggtgagcgcgcgttattggccgaacgtttgcacgccaatttattaggacgtttgcaaggcgaggaacgcctcctctggctttacgaagaagtggagaaaccattgagtcgcgtgctcgcgcatatggaagctaccggtgtcaaattagacgtggcgtatttggaggcactcagccttgaagttgctgccgaaatgcgccgcttggaggaagaagtattccgtttagcaggccactcctttaaccttaattctcgcgatcagttagaacgtgtgttgttcgatgaacttggtctccctcctatcggcaagacagagaagaccggtaaacgtagcacttcagcggcggttttagaagctcttcgcgaagtccatcccattgtggacaagatcttgcagtaccgcgaactcgcgaaattgaaaggcacctatattgaccctcttccggcattagtccacccgaaaacgggacgcctccatacccgcttcaaccaaacagccacggcgaccggtcgtttgtcctcctctgatccaaaccttcagaatattccagtacgtaccccattgggccagaagatccgcaaagcgtttgtagctgaggagggttggcgtttagtggccctcgattatagccaaattgaattacgtgtccttgcccatctttctggcgatgagaacctcatccgcgtgtttcaggaaggccgcgacattcacactcaaacggcaagctggatgtttggattatcagctgaagcgatcgatcctttgatgcgtcgtgcagcgaagaccattaatttcggtgttctctacggtatgagtgcccatcgtttgtcgcaggaattaggcattccctatgaagaagctgcggcgttcattcagcgctactttcaaagctatcccaaagttaaagcatggatcgagaagactctcgaagaaggccgcacacgtggttacgtagagaccttatttggacgtcgccgctatgttcccgatttaaacgctcgcgtgaaatctgtccgtgaagccgccgaacgcatggcgttcaacatgcctgtacagggcacggcagctgacctcatgaaacttgcaatggtgcgcctttttccacaattgcgtgaagttggtgcccgcatgctcttgcaggtccacgatgaactcttgttagaagcgccaaaagagcgtgcggaagaggtggcagccctcgcgaaagaggttatggaaggcgtgtggcccttagcggtgcctcttgaagtcgaagttggtattggcgaggattggttggctgccaaaggataatga

SEQ ID NO: 272 - protein, 841 aa, synthetic construct
  REGION 1..841: note = Variant of DNA polymerase I from Thermus sp. strain 2.9
MHHHHHHGGSGMLPLFEPKGRVLLVDGHHLAYRNFFALKGLTTSRGEPVQGVYGFAKSLLKALKEDGDVVIVVFDAKAPSFRHEAYEAYKAGRAPTPEDFPRQLALMKELVDLLGLERLEVPGFEADDVLATLAKKAEREGYEVQILTADRDLFQLLSPRISVLHPEGHRITPEWLWEKYGLRPEQWVDFRALAGDPSDNIPGVKGIGEKTALKLLKEWGSLENLLKNLDQVKPESVREKILAHLEDLKLSRELSRVRTDLPLEVDFRGRREPDWEGLKAFLERLEFGSLLHEFGLLESPLPAEEAPWPPPEGAFLGYRLSRPEPMWAELLALAASAQGRVYRAEDPHGALRGLKEVRGLLAKDLAVVALREGLDLPPTDDPMLLAYLLDPSNTTPEGVARRYGGEWTEDAGERALLAERLHANLLGRLQGEERLLWLYEEVEKPLSRVLAHMEATGVKLDVAYLEALSLEVAAEMRRLEEEVFRLAGHSFNLNSRDQLERVLFDELGLPPIGKTEKTGKRSTSAAVLEALREVHPIVDKILQYRELAKLKGTYIDPLPALVHPKTGRLHTRFNQTATATGRLSSSDPNLQNIPVRTPLGQKIRKAFVAEEGWRLVALDYSQIELRVLAHLSGDENLIRVFQEGRDIHTQTASWMFGLSAEAIDPLMRRAAKTINFGVLYGMSAHRLSQELGIPYEEAAAFIQRYFQSYPKVKAWIEKTLEEGRTRGYVETLFGRRRYVPDLNARVKSVREAAERMAFNMPVQGTAADLMKLAMVRLFPQLREVGARMLLQVHDELLLEAPKERAEEVAALAKEVMEGVWPLAVPLEVEVGIGEDWLAAKG

SEQ ID NO: 273 - DNA, 2529 bp, synthetic construct
  misc_feature 1..2529: note = Variant of DNA polymerase I from Thermus sp. strain 2.9
  source 1..2529: mol_type = other DNA
atgcaccatcatcatcatcatggcggtagcggcatgttaccgttgttcgaacctaaaggtcgcgtgcttctggttgatggccatcatctcgcgtatcgtaacttctttgccctgaaaggattaaccaccagccgtggcgagccggtacagggtgtctacggctttgcaaagtcgctcctgaaagctctgaaagaagacggtgatgtggtgattgttgtctttgatgcgaaagcgccaagttttcgccacgaagcgtacgaagcttacaaagccgggcgtgctccaacgccggaagactttcctcgccaattggcgcttatgaaggaaatggtggatttgcttggcctcgaacgcttggaagttcccggtttcgaggcagacgacgtattagcgactctcgcaaagaaagccgaacgtgagggctatgaagtccagatcttgacagcagatcgcgatcttttccagcttttatctccgcgcatttccgtgttacacccggaagggcatcgtatcaccccggaatggctctgggagaaatatggtttgcgtcccgaacaatgggtggattttcgcgccttagcgggcgatccgagcgacaatattccgggagttaaaggtatcggcgagaagacggcgctcaagctccttaaagaatgggggtcgttggagaacttgcttaagaatttagatcaggtcaaaccagcttcagtgcgtgagaagattcttgcacacctcgaagacctcaaattaagccgcgaattgtcccgtgtacgcaccgatttgccgctcgaagttgatttccgtggccgccgcgaacctgactgggagggtcttaaagcgtttttagagcgtcttgaatttggttcgctcttgcatgaattcggccttttagaaagcccgttaccagccgaagaagcaccttggccaccgcccgaaggcgcgtttttaggttaccgtttgagtcgcccggaaccgatgtgggccgaattattggctcttgcagcgtctgcccagggacgtgtgtatcgcgcggaagaccctcatggtgcgctccgtggcctcaaagaagtccgtggactccttgccaaagacttagctgttgttgcattgcgcgaaggtcttgatttacctccgactgatgatccaatgcttcttgcgtacctcttggacccgtcaaacacgacgcccgaaggcgtagcccgtcgttacggcggcgagtggaccgaagatgcaggtgagcgcgcgttattggccgaacgtttgcacgccaatttattaggacgtttgcaaggcgaggaacgtctcctctggctttacgaagaagtggagaaaccattgagtcgcgtgctcgcgcatatggaagctaccggtgtcaaattagacgtggcgtatttggaggcactcagccttgaagttgctgccgaaatgcgccgcttggaggaagaagtattccgtttagcaggccactcctttaaccttaattctcgcgatcagttagaacgtgtgttgttcgatgaacttggtctccctcctatcggcaagacagagaagaccggtaaacgtagcacttcagcggcggttttagaagctcttcgcgaagtccatcccattgtggacaagatcttgcagtaccgcgaactcgcgaaattgaaaggcacctatattgaccctcttccggcattagtccacccgaaaacgggacgcctccatacccgcttcaaccaaacagccacggcgaccggtcgtttgtcctcctctgatccaaaccttcagaatattccagtacgtaccccattgggccagaagatccgcaaagcgtttgtagctgaggagggttggcgtttagtggccctcgattatagccaaattgaattacgtgtccttgcccatctttctggcgatgagaacctcatccgcgtgtttcaggaaggccgcgacattcacactcaaacggcaagctggatgtttggattatcagctgaagcgatcgatcctttgatgcgtcgtgcagcgaagaccatcaatttcggtgttctctacggtatgagtgcccatcgtttgtcgcaggaattaggcattccctatgaagaagctgcggcgttcattcagcgctactttcaaagctatcccaaagttaaagcatggatcgagaagactctcgaagaaggccgcacacgtggttacgtagagaccttatttggacgtcgccgctatgttcccgatttaaacgctcgcgtgaaatctgtccgtgaagccgccgaacgcatggcgttcaacatgcctgtacagggcacggcagctgacctcatgaaacttgcaatggtgcgcctttttccacaattgcgtgaagttggtgcccgcatgctcttgcaggtccacgatgaactcttgttagaagcgccaaaagagcgtgcggaagaggtggcagccctcgcgaaagaggttatggaaggcgtgtggcccttagcggtgcctcttgaagtcgaagttggtattggcgaggattggttggctgccaaaggataatga

SEQ ID NO: 274 - protein, 841 aa, synthetic construct
  REGION 1..841: note = Variant of DNA polymerase I from Thermus sp. strain 2.9
MHHHHHHGGSGMLPLFEPKGRVLLVDGHHLAYRNFFALKGLTTSRGEPVQGVYGFAKSLLKALKEDGDVVIVVFDAKAPSFRHEAYEAYKAGRAPTPEDFPRQLALMKEMVDLLGLERLEVPGFEADDVLATLAKKAEREGYEVQILTADRDLFQLLSPRISVLHPEGHRITPEWLWEKYGLRPEQWVDFRALAGDPSDNIPGVKGIGEKTALKLLKEWGSLENLLKNLDQVKPASVREKILAHLEDLKLSRELSRVRTDLPLEVDFRGRREPDWEGLKAFLERLEFGSLLHEFGLLESPLPAEEAPWPPPEGAFLGYRLSRPEPMWAELLALAASAQGRVYRAEDPHGALRGLKEVRGLLAKDLAVVALREGLDLPPTDDPMLLAYLLDPSNTTPEGVARRYGGEWTEDAGERALLAERLHANLLGRLQGEERLLWLYEEVEKPLSRVLAHMEATGVKLDVAYLEALSLEVAAEMRRLEEEVFRLAGHSFNLNSRDQLERVLFDELGLPPIGKTEKTGKRSTSAAVLEALREVHPIVDKILQYRELAKLKGTYIDPLPALVHPKTGRLHTRFNQTATATGRLSSSDPNLQNIPVRTPLGQKIRKAFVAEEGWRLVALDYSQIELRVLAHLSGDENLIRVFQEGRDIHTQTASWMFGLSAEAIDPLMRRAAKTINFGVLYGMSAHRLSQELGIPYEEAAAFIQRYFQSYPKVKAWIEKTLEEGRTRGYVETLFGRRRYVPDLNARVKSVREAAERMAFNMPVQGTAADLMKLAMVRLFPQLREVGARMLLQVHDELLLEAPKERAEEVAALAKEVMEGVWPLAVPLEVEVGIGEDWLAAKG

SEQ ID NO: 275 - DNA, 2529 bp, synthetic construct
  misc_feature 1..2529: note = Variant of DNA polymerase I from Thermus sp. strain 2.9
  source 1..2529: mol_type = other DNA
atgcaccatcatcatcatcatggcggtagcggcatgttaccgttgttcgaacctaaaggtcgcgtgcttctggttgatggccataatctcgcgtatcgtaacttctttgccctgaaaggattaaccaccagccgtggcgagccggtacagggtgtctacggctttgcaaagtcgctcctgaaagctctgaaagaagacggtgatgtggtgattgttgtctttgatgcgaaagcgccaagttttcgccacgaagcgtacgaagcttacaaagccgggcgtgctccaacgccggaagactttcctcgccaattggcgcttatgaaggaattagtggatttgcttggcctcgaacgcttggaagttcccggtttcgaggcagacgacgtattagcgactctcgcaaagaaagccgaacgtgagggctatgaagtccagatcttgacagcagatcgcgatcttttccagcttttatctccgcgcatttccgtgttacacccggaagggcatcgtatcaccccggaatggctctgggagaaatatggtttgcgtcccgaacaatgggtggattttcgcgccttagcgggcgatccgagcgacaatattccgggagttaaaggtatcggcgagaagacggcgctcaagctccttaaagaatgggggtcgttggagaacttgcttaagaatttagatcaggtcaaaccagcttcagtgcgtgagaagattcttgcacacctcgaagacctcaaattaagccgcgaattgtcccgtgtacgcaccgatttgccgctcgaagttgatttccgtggccgccgcgaacctgactgggagggtcttaaagcgtttttagagcgtcttgaatttggttcgctcttgcatgaattcggccttttagaaagcccgttaccagccgaagaagcaccttggccaccgcccgaaggcgcgtttttaggttaccgtttgagtcgcccggaaccgatgtgggccgaattattggctcttgcagcgtctgcccagggacgtgtgtatcgcgcggaagaccctcatggtgcgctccgtggcctcaaagaagtccgtggactccttgccaaagacttagctgttgttgcattgcgcgaaggtcttgatttacctccgactgatgatccaatgcttcttgcgtacctcttggacccgtcaaacacgacgcccgaaggcgtagcccgtcgttacggcggcgagtggaccgaagatgcaggtgagcgcgcgttattggccgaacgtttgcacgccaatttattaggacgtttgcaaggcgaggaacgtctcctctggctttacgaagaagtggagaaaccattgagtcgcgtgctcgcgcatatggaagctaccggtgtcaaattagacgtggcgtatttggaggcactcagccttgaagttgctgccgaaatgcgccgcttggaggaagaagtattccgtttagcaggccactcctttaaccttaattctcgcgatcagttagaacgtgtgttgttcgatgaacttggtctccctcctatcggcaagacagagaagaccggtaaacgtagcacttcagcggcggttttagaagctcttcgcgaagtccatcccattgtggacaagatcttgcagtaccgcgaactcgcgaaattgaaaggcacctatattgaccctcttccggcattagtccacccgaaaacgggacgcctccatacccgcttcaaccaaacagccacggcgaccggtcgtttgtcctcctctgatccaaaccttcagaatattccagtacgtaccccattgggccagaagatccgcaaagcgtttgtagctgaggagggttggcgtttagtggccctcgattatagccaaattgaattacgtgtccttgcccatctttctggcgatgagaacctcatccgcgtgtttcaggaaggccgcgacattcacactcaaacggcaagctggatgtttggattatcagctgaagcgatcgatcctttgatgcgtcgtgcagcgaagaccatcaatttcggtgttctctacggtatgagtgcccatcgtttgtcgcaggaattaggcattccctatgaagaagctgcggcgttcattcagcgctactttcaaagctatcccaaagttaaagcatggatcgagaagactctcgaagaaggccgcacacgtggttacgtagagaccttatttggacgtcgccgctatgttcccgatttaaacgctcgcgtgaaatctgtccgtgaagccgccgaacgcatggcgttcaacatgcctgtacagggcacggcagctgacctcatgaaacttgcaatggtgcgcctttttccacaattgcgtgaagttggtgcccgcatgctcttgcaggtccacgatgaactcttgttagaagcgccaaaagagcgtgcggaagaggtggcagccctcgcgaaagaggttatggaaggcgtgtggcccttagcggtgcctcttgaagtcgaagttggtattggcgaggattggttggctgccaaaggataatga

SEQ ID NO: 276 - protein, 841 aa, synthetic construct
  REGION 1..841: note = Variant of DNA polymerase I from Thermus sp. strain 2.9
MHHHHHHGGSGMLPLFEPKGRVLLVDGHNLAYRNFFALKGLTTSRGEPVQGVYGFAKSLLKALKEDGDVVIVVFDAKAPSFRHEAYEAYKAGRAPTPEDFPRQLALMKELVDLLGLERLEVPGFEADDVLATLAKKAEREGYEVQILTADRDLFQLLSPRISVLHPEGHRITPEWLWEKYGLRPEQWVDFRALAGDPSDNIPGVKGIGEKTALKLLKEWGSLENLLKNLDQVKPASVREKILAHLEDLKLSRELSRVRTDLPLEVDFRGRREPDWEGLKAFLERLEFGSLLHEFGLLESPLPAEEAPWPPPEGAFLGYRLSRPEPMWAELLALAASAQGRVYRAEDPHGALRGLKEVRGLLAKDLAVVALREGLDLPPTDDPMLLAYLLDPSNTTPEGVARRYGGEWTEDAGERALLAERLHANLLGRLQGEERLLWLYEEVEKPLSRVLAHMEATGVKLDVAYLEALSLEVAAEMRRLEEEVFRLAGHSFNLNSRDQLERVLFDELGLPPIGKTEKTGKRSTSAAVLEALREVHPIVDKILQYRELAKLKGTYIDPLPALVHPKTGRLHTRFNQTATATGRLSSSDPNLQNIPVRTPLGQKIRKAFVAEEGWRLVALDYSQIELRVLAHLSGDENLIRVFQEGRDIHTQTASWMFGLSAEAIDPLMRRAAKTINFGVLYGMSAHRLSQELGIPYEEAAAFIQRYFQSYPKVKAWIEKTLEEGRTRGYVETLFGRRRYVPDLNARVKSVREAAERMAFNMPVQGTAADLMKLAMVRLFPQLREVGARMLLQVHDELLLEAPKERAEEVAALAKEVMEGVWPLAVPLEVEVGIGEDWLAAKG

SEQ ID NO: 277 - DNA, 2529 bp, synthetic construct
  misc_feature 1..2529: note = Variant of DNA polymerase I from Thermus sp. strain 2.9
  source 1..2529: mol_type = other DNA
atgcaccatcatcatcatcatggcggtagcggcatgttaccgttgttcgaacctaaaggtcgcgtgcttctggttgatggccatcatctcgcgtatcgtaacttctttgccctgaaaggattaaccaccagccgtggcgagccggtacagggtgtctacggctttgcaaagtcgctcctgaaagctctgaaagaagacggtgatgtggtgattgttgtctttgatgcgaaagcgccaagttttcgccacgaagcgtacgaagcttacaaagccgggcgtgctccaacgccggaagactttcctcgccaattggcgcttatgaaggaattagtggatttgcttggcctcgaacgcttggaagttcccggtttcgaggcagacgacgtattagcgactctcgcaaagaaagccgaacgtgagggctatgaagtccatatcttgacagcagatcgcgatcttttccagcttttatctccgcgcatttccgtgttacacccggaagggcatcgtatcaccccggaatggctctgggagaaatatggtttgcgtcccgaacaatgggtggattttcgcgccttagcgggcgatccgagcgacaatattccgggagttaaaggtatcggcgagaagacggcgctcaagctccttaaagaatgggggtcgttggagaacttgcttaagaatttagatcaggtcaaaccagcttcagtgcgtgagaagattcttgcacacctcgaagacctcaaattaagccgcgaattgtcgcgtgtacgcaccgatttgccgctcgaagttgatttccgtggccgccgcgaacctgactgggagggtcttaaagcgtttttagagcgtcttgaactgggttcgctcttgcatgaattcggccttttagaaagcccgttaccagccgaagaagcaccttggccaccgcccgaaggcgcgtttttaggttaccgtttgagtcgcccggaaccgatgtgggccgaattattggctcttgcagcgtctgcccagggacgtgtgtatcgcgcggaagaccctcatggtgcgctccgtggcctcaaagaagtccgtggactccttgccaaagacttagctgttgttgcattgcgcgaaggtcttgatttacctccgactgatgatccaatgcttcttgcgtacctcttggactcgtcaaacacgacgcccgaaggcgtagcccgtcgttacggcggcgagtggaccgaagatgcaggtgagcgcgcgttattggccgaacgtttgcacgccaatttattaggacgtttgcaaggcgaggaacgtctcctctggctttacgaagaagtggagaaaccattgagtcgcgtgctcgcgcatatggaagctaccggtgtcaaattagacgtggcgtatttggaggcactcagccttgaagccgctgccgaaatgcgccgcttggaggaagaagtattccgtttagcaggccactcctttaaccttaattctcgcgatcagttagaacgtgtgttgttcgatgaacttggtctccctcctatcggtaagacagagaagaccggtaaacgtagcacttcagcggcggttttagaagctcttcgcgaagtccatcccattgtggacaagatcttgcagtaccgcgaactcgcgaaattgaaaggcacctatattgaccgtcttccggcattagtccacccgaaaacgggacgcctccatacccgcttcaaccaaacagccacggcgaccggtcgtttgtcctcctctgatccaaaccttcagaatattccagtacgtaccccattgggccagcatatccgcaaagcgtttgtagctgaggagggttggcgtttagtggccctcgattatagccaaattgaattacgtgtccttgcccatctttctggcgatgagaacctcatccgcgtgtttcaggaaggccgcgacattcacactcaaacggcaagctggatgtttggagtgtcatcggaagcgatcgatcctttgatgcgtcgtgcagcgaagaccatcaatttcggtgttctctacggtatgagtgccgcgcgtttgtcgcaggaattaggcattccctatgaagaagctgcggcgttcattcagcgctactttcaaagctatcccaaagttaaagcatggatcgagaagactctcgaagaaggccgcacacgtggttacgtagagaccttatttggacgtcgccgctatgttcccgatttaaatgctcgcgtgaaatctgtccgtgaagccgccgaacgcatggcgtttaacatgcctgtacagggcacggcagctgacctcatgaaacttgcaatggtgcgcctttttccacaattgcgtgaagttggtgcccgcatgctcttgcaggtccacgatgaactcttgttagaagcgccaaaagagcgtgcggaagaggtggcagccctcgcgaaagaggttatggaaggcgtgtggcccttagcggtgcctcttgaagtcgaagttggtattggcgaggattggttggctgccaaaggataatga

SEQ ID NO: 278 - protein, 841 aa, synthetic construct
  REGION 1..841: note = Variant of DNA polymerase I from Thermus sp. strain 2.9
MHHHHHHGGSGMLPLFEPKGRVLLVDGHHLAYRNFFALKGLTTSRGEPVQGVYGFAKSLLKALKEDGDVVIVVFDAKAPSFRHEAYEAYKAGRAPTPEDFPRQLALMKELVDLLGLERLEVPGFEADDVLATLAKKAEREGYEVHILTADRDLFQLLSPRISVLHPEGHRITPEWLWEKYGLRPEQWVDFRALAGDPSDNIPGVKGIGEKTALKLLKEWGSLENLLKNLDQVKPASVREKILAHLEDLKLSRELSRVRTDLPLEVDFRGRREPDWEGLKAFLERLELGSLLHEFGLLESPLPAEEAPWPPPEGAFLGYRLSRPEPMWAELLALAASAQGRVYRAEDPHGALRGLKEVRGLLAKDLAVVALREGLDLPPTDDPMLLAYLLDSSNTTPEGVARRYGGEWTEDAGERALLAERLHANLLGRLQGEERLLWLYEEVEKPLSRVLAHMEATGVKLDVAYLEALSLEAAAEMRRLEEEVFRLAGHSFNLNSRDQLERVLFDELGLPPIGKTEKTGKRSTSAAVLEALREVHPIVDKILQYRELAKLKGTYIDRLPALVHPKTGRLHTRFNQTATATGRLSSSDPNLQNIPVRTPLGQHIRKAFVAEEGWRLVALDYSQIELRVLAHLSGDENLIRVFQEGRDIHTQTASWMFGVSSEAIDPLMRRAAKTINFGVLYGMSAARLSQELGIPYEEAAAFIQRYFQSYPKVKAWIEKTLEEGRTRGYVETLFGRRRYVPDLNARVKSVREAAERMAFNMPVQGTAADLMKLAMVRLFPQLREVGARMLLQVHDELLLEAPKERAEEVAALAKEVMEGVWPLAVPLEVEVGIGEDWLAAKG

SEQ ID NO: 279 - DNA, 2529 bp, synthetic construct
  misc_feature 1..2529: note = Variant of DNA polymerase I from Thermus sp. strain 2.9
  source 1..2529: mol_type = other DNA
atgcaccatcatcatcatcatggcggtagcggcatgttaccgttgttcgaacctaaaggtcgcgtgcttctggttgatggccatcatctcgcgtatcgtaacttctttgccctgaaaggattaaccaccagccgtggcgagccggtacagggtgtctacggctttgcaaagtcgctcctgaaagctctgaaagaagacggtgatgtggtgattgttgtctttgatgcgaaagcgccaagttttcgccacgaagcgtacgaagcttacaaagccgggcgtgctccaacgccggaagactttcctcgccaattggcgcttatgaaggaattagtggatttgcttggcctcgaacgcttggaagttcccggtttcgaggcagacgacgtattagcgactctcgcaaagaaagccgaacgtgagggctatgaagtccagatcttgacagcagatcgcgatcttttccagcttttatctccgcgcatttccgtgttacacccggaagggcatcgtatcaccccggaatggctctgggagaaatatggtttgcgtcccgaacaatgggtggattttcgcgccttagcgggcgatccgagcgacaatattccgggagttaaaggtatcggcgagaagacggcgctcaagctccttaaagaatgggggtcgttggagaacttgcttaagaatttagatcaggtcaaaccagcttcagtgcgtgagaagattcttgcacacctcgaagacctcaaattaagccgcgaattgtcgcgtgtacgcaccgatttgccgctcgaagttgatttccgtggccgccgcgaacctgactgggagggtcttaaagcgtttttagagcgtcttgaactgggttcgctcttgcatgaattcggccttttagaaagcccgttaccagccgaagaagcaccttggccaccgcccgaaggcgcgtttttaggttaccgtttgagtcgcccggaaccgatgtgggccgaattattggctcttgcagcgtctgcccagggacgtgtgtatcgcgcggaagaccctcatggtgcgctccgtggcctcaaagaagtccgtggactccttgccaaagacttagctgttgttgcattgcgcgaaggtcttgatttacctccgactgatgatccaatgcttcttgcgtacctcttggactcgtcaaacacgacgcccgaaggcgtagcccgtcgttacggcggcgagtggaccgaagatgcaggtgagcgcgcgttattggccgaacgtttgcacgccaatttattaggacgtttgcaaggcgaggaacgtctcctctggctttacgaagaagtggagaaaccattgagtcgcgtgctcgcgcatatggaagctaccggtgtcaaattagacgtggcgtatttggaggcactcagccttgaagccgctgccgaactgcgccgcttggaggaagaagtattccgtttagcaggccactcctttaaccttaattctcgcgatcagttagaacgtgtgttgttcgatgaacttggtctccctcctatcggtaagacagagaagaccggtaaacgtagcacttcagcggcggttttagaagctcttcgcgaagtccatcccattgtggacaagatcttgcagtaccgcgaactcgcgaaattgaaaggcacctatattgaccgtcttccggcattagtccacccgaaaacgggacgcctccatacccgcttcaaccaaacagccacggcgaccggtcgtttgtcctcctctgatccaaaccttcagaatattccagtacgtaccccattgggccagcatatccgcaaagcgtttgtagctgaggagggttggcgtttagtggccctcgattatagccaaattgaattacgtgtccttgcccatctttctggcgatgagaacctcatccgcgtgtttcaggaaggccgcgacattcacactcaaacggcaagctggatgtttggagtgtcatcggaagcgatcgatcctttgatgcgtcgtgcagcgaagaccatcaatttcggtgttctctacggtatgagtgccgcgcgtttgtcgcaggaattaggcattccctatgaagaagctgcggcgttcattcagcgctactttcaaagctatcccaaagttaaagcatggatcgagaagactctcgaagaaggccgcacacgtggttacgtagagaccttatttggacgtcgccgctatgttcccgatttaactgctcgcgtgaaatctgtccgtgaagccgccgaacgcatggcgtttaacatgcctgtacagggcacggcagctgacctcatgaaacttgcaatggtgcgcctttttccacaattgcgtgaagttggtgcccgcatgctcttgcaggtccacgatgaactcttgttagaagcgccaaaagagcgtgcggaagaggtggcagccctcgcgaaagaggttatggaaggcgtgtggcccttagcggtgcctcttgaagtcgaagttggtattggcgaggattggttggctgccaaaggataatga

SEQ ID NO: 280 - protein, 841 aa, synthetic construct
  REGION 1..841: note = Variant of DNA polymerase I from Thermus sp. strain 2.9
MHHHHHHGGSGMLPLFEPKGRVLLVDGHHLAYRNFFALKGLTTSRGEPVQGVYGFAKSLLKALKEDGDVVIVVFDAKAPSFRHEAYEAYKAGRAPTPEDFPRQLALMKELVDLLGLERLEVPGFEADDVLATLAKKAEREGYEVQILTADRDLFQLLSPRISVLHPEGHRITPEWLWEKYGLRPEQWVDFRALAGDPSDNIPGVKGIGEKTALKLLKEWGSLENLLKNLDQVKPASVREKILAHLEDLKLSRELSRVRTDLPLEVDFRGRREPDWEGLKAFLERLELGSLLHEFGLLESPLPAEEAPWPPPEGAFLGYRLSRPEPMWAELLALAASAQGRVYRAEDPHGALRGLKEVRGLLAKDLAVVALREGLDLPPTDDPMLLAYLLDSSNTTPEGVARRYGGEWTEDAGERALLAERLHANLLGRLQGEERLLWLYEEVEKPLSRVLAHMEATGVKLDVAYLEALSLEAAAELRRLEEEVFRLAGHSFNLNSRDQLERVLFDELGLPPIGKTEKTGKRSTSAAVLEALREVHPIVDKILQYRELAKLKGTYIDRLPALVHPKTGRLHTRFNQTATATGRLSSSDPNLQNIPVRTPLGQHIRKAFVAEEGWRLVALDYSQIELRVLAHLSGDENLIRVFQEGRDIHTQTASWMFGVSSEAIDPLMRRAAKTINFGVLYGMSAARLSQELGIPYEEAAAFIQRYFQSYPKVKAWIEKTLEEGRTRGYVETLFGRRRYVPDLTARVKSVREAAERMAFNMPVQGTAADLMKLAMVRLFPQLREVGARMLLQVHDELLLEAPKERAEEVAALAKEVMEGVWPLAVPLEVEVGIGEDWLAAKG

SEQ ID NO: 281 - DNA, 2529 bp, synthetic construct
  misc_feature 1..2529: note = Variant of DNA polymerase I from Thermus sp. strain 2.9
  source 1..2529: mol_type = other DNA
atgcaccatcatcatcatcatggcggtagcggcatgttaccgttgttcgaacctaaaggtcgcgtgcttctggttgatggccatcatctcgcgtatcgtaacttctttgccctgaaaggattaaccaccagccgtggcgagccggtacagggtgtctacggctttgcaaagtcgctcctgaaagctctgaaagaagacggtgatgtggtgattgttgtctttgatgcgaaagcgccaagttttcgccacgaagcgtacgaagcttacaaagccgggcgtgctccaacgccggaagactttcctcgccaattggcgcttatgaaggaattagtggatttgcttggcctcgaacgcttggaagttcccggtttcgaggcagacgacgtattagcgactctcgcaaagaaagccgaacgtgagggctatgaagtccagatcttgacagcagatcgcgatcttttccagcttttatctccgcgcatttccgtgttacacccggaagggcatcgtatcaccccggaatggctctgggagaaatatggtttgcgtcccgaacaatgggtggattttcgcgccttagcgggcgatccgagcgacaatattccgggagttaaaggtatcggcgagaagacggcgctcaagctccttaaagaatgggggtcgttggagaacttgcttaagaatttagatcaggtcaaaccagagtcagtgcgtgagaagattcttgcacacctcgaagacctcaaattaagcctggaattgtcccgtgtacgcaccgatttgccgctcgaagttgatttccgtggccgccgcgaacctgactgggagggtcttaaagcgtttttagagcgtcttgaatttggttcgctcttgcatgaattcggccttttagaaagcccgttaccagccgaagaagcaccttggccaccgcccgaaggcgcgtttttaggttaccgtttgagtcgcccggaaccgatgtgggccgaattattggctcttgcagcgtctgcccagggacgtgtgtatcgcgcggaagaccctcatggtgcgctccgtggcctcaaagaagtccgtggactccttgccaaagacttagctgttgttgcattgcgcgaaggtcttgatttacctccgactgatgatccaatgcttcttgcgtacctcttggacccgtcaaacacgacgcccgaaggcgtagcccgtcgttacggcggcgagtggaccgaagatgcaggtgagcgcgcgttattggccgaacgtttgcacgccaatttattaggacgtttgcaaggcgaggaacgtctcctctggctttacgaagaagtggagaaaccattgagtcgcgtgctcgcgcatatggaagctaccggtgtcaaattagacgtggcgtatttggaggcactcagccttgaagttgctgccgaaatgcgccgcttggaggaagaagtattccgtttagcaggccactcctttaaccttaattctcgcgatcagttagaacgtgtgttgttcgatgaacttggtctccctcctatcggcaagacagagaagaccggtaaacgtagcacttcagcggcggttttagaagctcttcgcgaagtccatcccattgtggacaagatcttgcagtaccgcgaactcgcgaaattgaaaggcacctatattgaccctcttccggcattagtccacccgaaaacgggacgcctccatacccgcttcaaccaaacagccacggcgaccggtcgtttgtcctcctctgatccaaaccttcagaatattccagtacgtaccccattgggccagaagatccgcaaagcgtttgtagctgaggagggttggcgtttagtggccctcgattatagccaaattgaattacgtgtccttgcccatctttctggcgatgagaacctcatccgcgtgtttcaggaaggccgcgacattcacactcaaacggcaagctggatgtttggattatcggcggaagcgatcgatcctttgatgcgtcgtgcagcgaagaccatcaatttcggtgttctctacggtatgagtgcccatcgtttgtcgcaggaattaggcattccctatgaagaagctgcggcgttcattcagcgctactttcaaagctatcccaaagttaaagcatggatcgagaagactctcgaagaaggccgcacacgtggttacgtagagaccttatttggacgtcgccgctatgttcccgatttaaacgctcgcgtgaaatctgtccgtgaagccgccgaacgcatggcgttcaacatgcctgtacagggcacggcagctgacctcatgaaacttgcaatggtgcgcctttttccacaattgcgtgaagttggtgcccgcatgctcttgcaggtccacgatgaactcttgttagaagcgccaaaagagcgtgcggaagaggtggcagccctcgcgaaagaggttatggaaggcgtgtggcccttagcggtgcctcttgaagtcgaagttggtattggcgaggattggttggctgccaaaggataatga

SEQ ID NO: 282 - protein, 841 aa, synthetic construct
  REGION 1..841: note = Variant of DNA polymerase I from Thermus sp. strain 2.9
MHHHHHHGGSGMLPLFEPKGRVLLVDGHHLAYRNFFALKGLTTSRGEPVQGVYGFAKSLLKALKEDGDVVIVVFDAKAPSFRHEAYEAYKAGRAPTPEDFPRQLALMKELVDLLGLERLEVPGFEADDVLATLAKKAEREGYEVQILTADRDLFQLLSPRISVLHPEGHRITPEWLWEKYGLRPEQWVDFRALAGDPSDNIPGVKGIGEKTALKLLKEWGSLENLLKNLDQVKPESVREKILAHLEDLKLSLELSRVRTDLPLEVDFRGRREPDWEGLKAFLERLEFGSLLHEFGLLESPLPAEEAPWPPPEGAFLGYRLSRPEPMWAELLALAASAQGRVYRAEDPHGALRGLKEVRGLLAKDLAVVALREGLDLPPTDDPMLLAYLLDPSNTTPEGVARRYGGEWTEDAGERALLAERLHANLLGRLQGEERLLWLYEEVEKPLSRVLAHMEATGVKLDVAYLEALSLEVAAEMRRLEEEVFRLAGHSFNLNSRDQLERVLFDELGLPPIGKTEKTGKRSTSAAVLEALREVHPIVDKILQYRELAKLKGTYIDPLPALVHPKTGRLHTRFNQTATATGRLSSSDPNLQNIPVRTPLGQKIRKAFVAEEGWRLVALDYSQIELRVLAHLSGDENLIRVFQEGRDIHTQTASWMFGLSAEAIDPLMRRAAKTINFGVLYGMSAHRLSQELGIPYEEAAAFIQRYFQSYPKVKAWIEKTLEEGRTRGYVETLFGRRRYVPDLNARVKSVREAAERMAFNMPVQGTAADLMKLAMVRLFPQLREVGARMLLQVHDELLLEAPKERAEEVAALAKEVMEGVWPLAVPLEVEVGIGEDWLAAKG

SEQ ID NO: 283 - DNA, 2529 bp, synthetic construct
  misc_feature 1..2529: note = Variant of DNA polymerase I from Thermus sp. strain 2.9
  source 1..2529: mol_type = other DNA
atgcaccatcatcatcatcatggcggtagcggcatgttaccgttgttcgaacctaaaggtcgcgtgcttctggttgatggccatcatctcgcgtatcgtaacttctttgccctgaaaggattaaccaccagccgtggcgagccggtacagggtgtctacggctttgcaaagtcgctcctgaaagctctgaaagaagacggtgatgtggtgattgttgtctttgatgcgaaagcgccaagttttcgccacgaagcgtacgaagcttacaaagccgggcgtgctccaacgccggaagactttcctcgccaattggcgcttatgaaggaattagtggatttgcttggcctcgaacgcttggaagttcccggtttcgaggcagacgacgtattagcgactctcgcaaagaaagccgaacgtgagggctatgaagtccagatcttgacagcagatcgcgatcttttccagcttttatctccgcgcatttccgtgttacacccggaagggcatcgtatcaccccggaatggctctgggagaaatatggtttgcgtcccgaacaatgggtggattttcgcgccttagcgggcgatccgagcgacaatattccgggagttaaaggtatcggcgagaagacggcgctcaagctccttaaagaatgggggtcgttggagaacttgcttaagaatttagatcaggtcaaaccagcgtcagtgcgtgagaagattcttgcacacctcgaagacctcaaattaagccgcgaattgtcccgtgtacgcaccgatttgccgctcgaagttgatttccgtggccgccgcgaacctgactgggagggtcttaaagcgtttttagagcgtcttgaatttggttcgctcttgcatgaattcggccttttagaaagcccgttaccagccgaagaagcaccttggccaccgcccgaaggcgcgtttttaggttacgttttgagtcgcccggaaccgatgtgggccgaattattggctcttgcagcgtctgcccagggacgtgtgtatcgcgcggaagaccctcatggtgcgctccgtggcctcaaagaagtccgtggactccttgccaaagacttagctgttgttgcattgcgcgaaggtcttgatttacctccgactgatgatccaatgcttcttgcgtacctcttggacccgtcaaacacgacgcccgaaggcgtagcccgtcgttacggcggcgagtggaccgaagatgcaggtgagcgcgcgttattggccgaacgtttgcacgccaatttattaggacgtttgcaaggcgaggaaaagctcctctggctttacgaagaagtggagaaaccattgagtcgcgtgctcgcgcatatggaagctaccggtgtcaaattagacgtggcgtatttggaggcactcagccttgaagttgctgccgaaattcgccgcttggaggaagaagtattccgtttagcaggccactcctttaaccttaattctcgcgatcagttagaacgtgtgttgttcgatgaacttggtctccctcctatcggcaagacagagaagaccggtaaacgtagcacttcagcggcggttttagaagctcttcgcgaagtccatcccattgtggacaagatcttgcagtaccgcgaactcgcgaaattgaaaggcacctatattgaccctcttccggcattagtccacccgaaaacgggacgcctccatacccgcttcaaccaaacagccacggcgaccggtcgtttgtcctcctctgatccaaaccttcagaatattccagtacgtaccccattgggccagaagatccgcaaagcgtttgtagctgaggagggttggcgtttagtggccctcgattatagccaaattgaattacgtgtccttgcccatctttctggcgatgagaacctcatccgcgtgtttcaggaaggccgcgacattcacactcaaacggcaagctggatgtttggattatcagctgaagcgatcgatcctttgatgcgtcgtgcagcgaagaccattaatttcggtgttctctacggtatgagtgcccatcgtttgtcgcaggaattaggcattccctatgaagaagctgcggcgttcattcagcgctactttcaaagctatcccaaagttaaagcatggatcgagaagactctcgaagaaggccgcacacgtggttacgtagagaccttatttggacgtcgccgctatgttcccgatttaaacgctcgcgtgaaatctgtccgtgaagccgccgaacgcatggcgttcaacatgcctgtacagggcacggcagctgacctcatgaaacttgcaatggtgcgcctttttccacaattgcgtgaagttggtgcccgcatgctcttgcaggtccacgatgaactcttgttagaagcgccaaaagagcgtgcggaagaggtggcagccctcgcgaaagaggttatggaaggcgtgtggcccttagcggtgcctcttgaagtcgaagttggtattggcgaggattggttggctgccaaaggataatga

SEQ ID NO: 284 - protein, 841 aa, synthetic construct
  REGION 1..841: note = Variant of DNA polymerase I from Thermus sp. strain 2.9
MHHHHHHGGSGMLPLFEPKGRVLLVDGHHLAYRNFFALKGLTTSRGEPVQGVYGFAKSLLKALKEDGDVVIVVFDAKAPSFRHEAYEAYKAGRAPTPEDFPRQLALMKELVDLLGLERLEVPGFEADDVLATLAKKAEREGYEVQILTADRDLFQLLSPRISVLHPEGHRITPEWLWEKYGLRPEQWVDFRALAGDPSDNIPGVKGIGEKTALKLLKEWGSLENLLKNLDQVKPASVREKILAHLEDLKLSRELSRVRTDLPLEVDFRGRREPDWEGLKAFLERLEFGSLLHEFGLLESPLPAEEAPWPPPEGAFLGYVLSRPEPMWAELLALAASAQGRVYRAEDPHGALRGLKEVRGLLAKDLAVVALREGLDLPPTDDPMLLAYLLDPSNTTPEGVARRYGGEWTEDAGERALLAERLHANLLGRLQGEEKLLWLYEEVEKPLSRVLAHMEATGVKLDVAYLEALSLEVAAEIRRLEEEVFRLAGHSFNLNSRDQLERVLFDELGLPPIGKTEKTGKRSTSAAVLEALREVHPIVDKILQYRELAKLKGTYIDPLPALVHPKTGRLHTRFNQTATATGRLSSSDPNLQNIPVRTPLGQKIRKAFVAEEGWRLVALDYSQIELRVLAHLSGDENLIRVFQEGRDIHTQTASWMFGLSAEAIDPLMRRAAKTINFGVLYGMSAHRLSQELGIPYEEAAAFIQRYFQSYPKVKAWIEKTLEEGRTRGYVETLFGRRRYVPDLNARVKSVREAAERMAFNMPVQGTAADLMKLAMVRLFPQLREVGARMLLQVHDELLLEAPKERAEEVAALAKEVMEGVWPLAVPLEVEVGIGEDWLAAKG

SEQ ID NO: 285 - DNA, 2529 bp, synthetic construct
  misc_feature 1..2529: note = Variant of DNA polymerase I from Thermus sp. strain 2.9
  source 1..2529: mol_type = other DNA
atgcaccatcatcatcatcatggcggtagcggcatgttaccgttgttcgaacctaaaggtcgcgtgcttctggttgatggccatcatctcgcgtatcgtaacttctttgccctgaaaggattaaccaccagccgtggcgagccggtacagggtgtctacggctttgcaaagtcgctcctgaaagctctgaaagaagacggtgatgtggtgattgttgtctttgatgcgaaagcgccaagttttcgccacgaagcgtacgaagcttacaaagccgggcgtgctccaacgccggaagactttcctcgccaattggcgcttatgaaggaattagtggatttgcttggcctcgaacgcttggaagttcccggtttcgaggcagacgacgtattagcgactctcgcaaagaaagccgaacgtgagggctatgaagtccagatcttgacagcagatcgcgatcttttccagcttttatctccgcgcgtctcggtgttacacccggaagggcatcgcatcaccccggaatggctctgggagaaatatggtttgcgtcccgaacaatgggtggattttcgcgccttagcaggcgatccgagcgacaatattccgggagttaaaggtatcggcgagaagacggcgctcaagctccttaaagaatgggggtcgttggagaacttgcttaagaatttagatcaggtcaaaccagcgtcagtgcgtgagaagattcttgcacacctcgaagacctccgtttaagccgcgaattgtcccgtgtacgcaccgatttgccgctcgaagttgatttccgtggccgccgcgaacctgactgggagggtcttaaagcgtttttagagcgtcttgaatttggttcgctcttgcatgaattcggccttttagaaagcccgttaccagccgaagaagcaccttggccaccgcccgaaggcgcgtttttaggttaccgtttgagtcgcccggaaccgatgtgggccgaattattggctcttgcagcgtctgcccagggacgtgtgtatcgcgcggaagaccctcatggtgcgctccgcggcctcaaagaagtccgtggactccttgccaaagacttagctgttgttgcattgcgcgaaggtcttgatttacctccgactgatgatccaatgcttcttgcgtacctcttggacccgtcaaacacgacgcccgaaggcgtagcccgtcgttacggcggcgagtggaccgaagatgcagccgagcgcgcgttattggccgaacgtttgcacgccaatttattaggacgtttgcaaggcgaggaacgcctcctctggctttacgaagaagtggagaaaccattgagtcgcgtgctcgcgcatatggaagctaccggtgtcaaattagacgtggcgtatttggaggcactcagccttgaagttgctgccgaaattcgccgcttggaggaagaagtattccgtttagcaggccactcctttaaccttaattctcgcgatcagttagaacgtgtgttgttcgatgaacttggtctccctcctatcggcaagacagagaagaccggtaaacgtagcacttcagcggcggttttagaagctcttcgcgaagtccatcccattgtggacaagatcttgcagtaccgcgaactcgcgaaattgaaaggcacctatattgaccctcttccggcattagtccacccgaaaacgggacgcctccatacccgcttcaaccaaacagccacggcgaccggtcgtttgtcctcctctgatccaaaccttcagaatattccagtacgtaccccattgggccagaagatccgccgcgcgtttgtagctgaggagggttggcgtttagtggccctcgattatagccaaattgaattacgtgtccttgcccatctttctggcgatgagaacctcatccgcgtgtttcaggaaggcaaagacattcacactcaaacggcaagctggatgtttggattaccgccggaagcgatcgatcctttgatgcgtcgtgcagcgaagaccgttaatttcggtgttctctacggtatgagtgcccatcgtttgtcgcaggaattaggcattccctatgaagaagctgcggcgttcattcagcgctactttcaaagctatcccaaagttaaagcatggatcgagaagactctcgaagaaggccgcacacgtggttacgtagagaccttatttggacgtcgccgctatgttcccgatttaaacgctcgcgtgaaatctgtccgtgaagccgccgaacgcatggcgttcaacatgcctgtacagggcacggcagctgacctcatgaaacttgcaatggtgcgcctttttccacaattgcgtgaagttggtgcccgcatgctcttgcaggtccacgatgaactcttgttagaagcgccaaaagagcgtgcggaagaggtggcagccctcgcgaaagaggttatggaaggcgtgtggcccttagcggtgcctcttgaagtcgaagttggtattggcgaggattggttggctgccaaaggataatga

SEQ ID NO: 286 - protein, 841 aa, synthetic construct
  REGION 1..841: note = Variant of DNA polymerase I from Thermus sp. strain 2.9
MHHHHHHGGSGMLPLFEPKGRVLLVDGHHLAYRNFFALKGLTTSRGEPVQGVYGFAKSLLKALKEDGDVVIVVFDAKAPSFRHEAYEAYKAGRAPTPEDFPRQLALMKELVDLLGLERLEVPGFEADDVLATLAKKAEREGYEVQILTADRDLFQLLSPRVSVLHPEGHRITPEWLWEKYGLRPEQWVDFRALAGDPSDNIPGVKGIGEKTALKLLKEWGSLENLLKNLDQVKPASVREKILAHLEDLRLSRELSRVRTDLPLEVDFRGRREPDWEGLKAFLERLEFGSLLHEFGLLESPLPAEEAPWPPPEGAFLGYRLSRPEPMWAELLALAASAQGRVYRAEDPHGALRGLKEVRGLLAKDLAVVALREGLDLPPTDDPMLLAYLLDPSNTTPEGVARRYGGEWTEDAAERALLAERLHANLLGRLQGEERLLWLYEEVEKPLSRVLAHMEATGVKLDVAYLEALSLEVAAEIRRLEEEVFRLAGHSFNLNSRDQLERVLFDELGLPPIGKTEKTGKRSTSAAVLEALREVHPIVDKILQYRELAKLKGTYIDPLPALVHPKTGRLHTRFNQTATATGRLSSSDPNLQNIPVRTPLGQKIRRAFVAEEGWRLVALDYSQIELRVLAHLSGDENLIRVFQEGKDIHTQTASWMFGLPPEAIDPLMRRAAKTVNFGVLYGMSAHRLSQELGIPYEEAAAFIQRYFQSYPKVKAWIEKTLEEGRTRGYVETLFGRRRYVPDLNARVKSVREAAERMAFNMPVQGTAADLMKLAMVRLFPQLREVGARMLLQVHDELLLEAPKERAEEVAALAKEVMEGVWPLAVPLEVEVGIGEDWLAAKG

SEQ ID NO: 287 - DNA, 2529 bp, synthetic construct
  misc_feature 1..2529: note = Variant of DNA polymerase I from Thermus sp. strain 2.9
  source 1..2529: mol_type = other DNA
atgcaccatcatcatcatcatggcggtagcggcatgttaccgttgttcgaacctaaaggtcgcgtgcttctggttgatggccatcatctcgcgtatcgtaacttctttgccctgaaaggattaaccaccagccgtggcgagccggtacagggtgtctacggctttgcaaagtcgctcctgaaagctctgaaagaagacggtgatgtggtgattgttgtctttgatgcgaaagcgccaagttttcgccacgaagcgtacgaagcttacaaagccgggcgtgctccaacgccggaagactttcctcgccaattggcgcttatgaaggaattagtggatttgcttggcctcgaacgcttggaagttcccggtttcgaggcagacgacgtattagcgactctcgcaaagaaagccgaacgtgagggctatgaagtccagatcttgacagcagatcgcgatcttttccagcttttatctccgcgcatttccgtgtgccacccggaagggcatcgtatcaccccggaatggctctgggagaaatatggtttgcgtcccgaacaatgggtggattttcgcgccttagcgggcgatccgagcgacaatattccgggagttaaaggtatcggcgagaagacggcgctcaagctccttaaagaatgggggtcgttggagaacttgcttaagaatttagatcaggtcaaaccagcttcagtgcgtgagaagattcttgcacacctcgaagacctcaaattaagccgcgaattgtcccgtgtacgcaccgatttgccgctcgaagttgatttccgtggccgccgcgaacctgactgggagggtcttaaagcgtttttagagcgtcttgaatttggttcgctcttgcatgaattcggccttttagaaagcccgttaccagccgaagaagcaccttggccaccgcccgaaggcgcgtttttaggttaccgtttgagtcgcccggaaccgatgtgggccgaattattggctcttgcagcgtctgcccagggacgtgtgtatcgcgcggaagaccctcatggtgcgctccgtggcctcaaagaagtccgtggactccttgccaaagacttagctgttgttgcattgcgcgaaggtcttgatttacctccgactgatgatccaatgcttcttgcgtacctcttggacccgtcaaacacgacgcccgaaggcgtagcccgtcgttacggcggcgagtggaccgaagatgcaggtgagcgcgcgttattggccgaacgtttgcacgccaatttattaggacgtttgcaaggcgaggaacgtctcctctggctttacgaagaagtggagaaaccattgagtcgcgtgctcgcgcatatggaagctaccggtgtcaaattagacgtggcgtatttggaggcactcagccttgaagttgctgccgaaatgcgccgcttggaggaagaagtattccgtttagcaggccactcctttaaccttaattctcgcgatcagttagaacgtgtgttgttcgatgaacttggtctccctcctatcggcaagacagagaagaccggtaaacgtagcacttcagcggcggttttagaagctcttcgcgaagtccatcccattgtggacaagatcttgcagtaccgcgaactcgcgaaattgaaaggcacctatattgaccctcttccggcattagtccacccgaaaacgggacgcctccatacccgcttcaaccaaacagccacggcgaccggtcgtttgtcctcctctgatccaaaccttcagaatattccagtacgtaccccattgggccagaagatccgcaaagcgtttgtagctgaggagggttggcgtttagtggccctcgattatagccaaattgaattacgtgtccttgcccatctttctggcgatgagaacctcatccgcgtgtttcaggaaggccgcgacattcacactcaaacggcaagctggatgtttggattatcagctgaagcgatcgatcctttgatgcgtcgtgcagcgaagaccatcaatttcggtgttctctacggtatgagtgcccatcgtttgtcgcaggaattaggcattccctatgaagaagctgcggcgttcattcagcgctactttcaaagctatcccaaagttaaagcatggatcgagaagactctcgaagaaggccgcacacgtggttacgtagagaccttatttggacgtcgccgctatgttcccgatttaaacgctcgcgtgaaatctgtccgtgaagccgccgaacgcatggcgttcaacatgcctgtacagggcacggcagctgacctcatgaaacttgcaatggtgcgcctttttccacaattgcgtgaagttggtgcccgcatgctcttgcaggtccacgatgaactcttgttagaagcgccaaaagagcgtgcggaagaggtggcagccctcgcgaaagaggttatggaaggcgtgtggcccttagcggtgcctcttgaagtcgaagttggtattggcgaggattggttggctgccaaaggataatga

SEQ ID NO: 288 - protein, 841 aa, synthetic construct
  REGION 1..841: note = Variant of DNA polymerase I from Thermus sp. strain 2.9
MHHHHHHGGSGMLPLFEPKGRVLLVDGHHLAYRNFFALKGLTTSRGEPVQGVYGFAKSLLKALKEDGDVVIVVFDAKAPSFRHEAYEAYKAGRAPTPEDFPRQLALMKELVDLLGLERLEVPGFEADDVLATLAKKAEREGYEVQILTADRDLFQLLSPRISVCHPEGHRITPEWLWEKYGLRPEQWVDFRALAGDPSDNIPGVKGIGEKTALKLLKEWGSLENLLKNLDQVKPASVREKILAHLEDLKLSRELSRVRTDLPLEVDFRGRREPDWEGLKAFLERLEFGSLLHEFGLLESPLPAEEAPWPPPEGAFLGYRLSRPEPMWAELLALAASAQGRVYRAEDPHGALRGLKEVRGLLAKDLAVVALREGLDLPPTDDPMLLAYLLDPSNTTPEGVARRYGGEWTEDAGERALLAERLHANLLGRLQGEERLLWLYEEVEKPLSRVLAHMEATGVKLDVAYLEALSLEVAAEMRRLEEEVFRLAGHSFNLNSRDQLERVLFDELGLPPIGKTEKTGKRSTSAAVLEALREVHPIVDKILQYRELAKLKGTYIDPLPALVHPKTGRLHTRFNQTATATGRLSSSDPNLQNIPVRTPLGQKIRKAFVAEEGWRLVALDYSQIELRVLAHLSGDENLIRVFQEGRDIHTQTASWMFGLSAEAIDPLMRRAAKTINFGVLYGMSAHRLSQELGIPYEEAAAFIQRYFQSYPKVKAWIEKTLEEGRTRGYVETLFGRRRYVPDLNARVKSVREAAERMAFNMPVQGTAADLMKLAMVRLFPQLREVGARMLLQVHDELLLEAPKERAEEVAALAKEVMEGVWPLAVPLEVEVGIGEDWLAAKG

SEQ ID NO: 289 - DNA, 2529 bp, synthetic construct
  misc_feature 1..2529: note = Variant of DNA polymerase I from Thermus sp. strain 2.9
  source 1..2529: mol_type = other DNA
atgcaccatcatcatcatcatggcggtagcggcatgttaccgttgttcgaacctaaaggtcgcgtgcttctggttgatggccatcatctcgcgtatcgtaacttctttgccctgaaaggattaaccaccagccgtggcgagccggtacagggtgtctacggctttgcaaagtcgctcctgaaagctctgaaagaagacggtgatgtggtgattgttgtctttgatgcgaaagcgccaagttttcgccacgaagcgtacgaagcttacaaagccgggcgtgctccaacgccggaagactttcctcgccaattggcgcttatgaaggaattagtggatttgcttggcctcgaacgcttggaagttcccggtttcgaggcagacgacgtattagcgactctcgcaaagaaagccgaacgtgagggctatgaagtccagatcttgacagcagatcgcgatcttttccagcttttatctccgcgcatttccgtgttacacccggaagggcatcgcatcaccccggaatggctctgggagaaatatggtttgcgtcccgaacaatgggtggattttcgcgccttagcgggcgatccgagcgacaatattccgggagttaaaggtatcggcgagaagacggcgctcaagctccttaaagaatgggggtcgttggagaacttgcttaagaatttagatcaggtcaaaccagcttcagtgcgtgagaagattcttgcacacctcgaagacctcaaattaagccgcgaattgtcccgtgtacgcaccgatttgccgctcgaagttgatttccgtggccgccgcgaacctgactgggagggtcttaaagcgtttttagagcgtcttgaatttggttcgctcttgcatgaattcggccttttagaaagcccgttaccagccgaagaagcaccttggccaccgcccgaaggcgcgtttttaggttaccgtttgagtcgcccggaaccgatgtgggccgaattattggctcttgcagcgtctgcccagggacgtgtgtatcgcgcggaagaccctcatggtgcgctccgtggcctcaaagaagtccgtggactccttgccaaagacttagctgttgttgcattgcgcgaaggtcttgatttacctccgactgatgatccaatgcttcttgcgtacctcttggacccgtcaaacacgacgcccgaaggcgtagcccgtcgttacggcggcgagtggaccgaagatgcaggtgagcgcgcgttattggccgaacgtttgcacgccaatttattaggacgtttgcaaggcgaggaacgtctcctctggctttacgaagaagtggagaaaccattgagtcgcgtgctcgcgcatatggaagctaccggtgtcaaattagacgtggcgtatttggaggcactcagccttgaagttgctgccgaaatgcgccgcttggaggaagaagtattccgtttagcaggccactcctttaaccttaattctcgcgatcagttagaacgtgtgttgttcgatgaacttggtctccctcctatcggcaagacagagaagaccggtaaacgtagcacttcagcggcggttttagaagctcttcgcgaagtccatcccattgtggacaagatcttgcagtaccgcgaactcgcgaaattgaaaggcacctatattgaccctcttccggcattagtccacccgaaaacgggacgcctccatacccgcttcaaccaaacagccacggcgaccggtcgtttgtcctcctctgatccaaaccttcagaatattccagtacgtaccccattgggccagaagatccgccgcgcgtttgtagctgaggagggttggcgtttagtggccctcgattatagccaaattgaattacgtgtccttgcccatctttctggcgatgagaacctcatccgcgtgtttcaggaaggccgcgacattcacactcaaacggcaagctggatgtttggattatcagctgaagcgatcgatcctttgatgcgtcgtgcagcgaagaccatcaatttcggtgttctctacggtatgagtgcccatcgtttgtcgcaggaattaggcattccctatgaagaagctgtggcgttcattcagcgctactttcaaagctatcccaaagttaaagcatggatcgagaagactctcgaagaaggccgcacacgtggttacgtagagaccttatttggacgtcgccgctatgttcccgatttaaacgctcgcgtgaaatctgtccgtgaagccgccgaacgcatggcgttcaacatgcctgtacagggcacggcagctgacctcatgaaacttgcaatggtgcgcctttttccacaattgcgtgaagttggtgcccgcatgctcttgcaggtccacgatgaactcttgttagaagcgccaaaagagcgtgcggaagaggtggcagccctcgcgaaagaggttatggaaggcgtgtggcccttagcggtgcctcttgaagtcgaagttggtattggcgaggattggttggctgccaaaggataatga

SEQ ID NO: 290 - protein, 841 aa, synthetic construct
  REGION 1..841: note = Variant of DNA polymerase I from Thermus sp. strain 2.9
MHHHHHHGGSGMLPLFEPKGRVLLVDGHHLAYRNFFALKGLTTSRGEPVQGVYGFAKSLLKALKEDGDVVIVVFDAKAPSFRHEAYEAYKAGRAPTPEDFPRQLALMKELVDLLGLERLEVPGFEADDVLATLAKKAEREGYEVQILTADRDLFQLLSPRISVLHPEGHRITPEWLWEKYGLRPEQWVDFRALAGDPSDNIPGVKGIGEKTALKLLKEWGSLENLLKNLDQVKPASVREKILAHLEDLKLSRELSRVRTDLPLEVDFRGRREPDWEGLKAFLERLEFGSLLHEFGLLESPLPAEEAPWPPPEGAFLGYRLSRPEPMWAELLALAASAQGRVYRAEDPHGALRGLKEVRGLLAKDLAVVALREGLDLPPTDDPMLLAYLLDPSNTTPEGVARRYGGEWTEDAGERALLAERLHANLLGRLQGEERLLWLYEEVEKPLSRVLAHMEATGVKLDVAYLEALSLEVAAEMRRLEEEVFRLAGHSFNLNSRDQLERVLFDELGLPPIGKTEKTGKRSTSAAVLEALREVHPIVDKILQYRELAKLKGTYIDPLPALVHPKTGRLHTRFNQTATATGRLSSSDPNLQNIPVRTPLGQKIRRAFVAEEGWRLVALDYSQIELRVLAHLSGDENLIRVFQEGRDIHTQTASWMFGLSAEAIDPLMRRAAKTINFGVLYGMSAHRLSQELGIPYEEAVAFIQRYFQSYPKVKAWIEKTLEEGRTRGYVETLFGRRRYVPDLNARVKSVREAAERMAFNMPVQGTAADLMKLAMVRLFPQLREVGARMLLQVHDELLLEAPKERAEEVAALAKEVMEGVWPLAVPLEVEVGIGEDWLAAKG

SEQ ID NO: 291 - DNA, 2529 bp, synthetic construct
  misc_feature 1..2529: note = Variant of DNA polymerase I from Thermus sp. strain 2.9
  source 1..2529: mol_type = other DNA
atgcaccatcatcatcatcatggcggtagcggcatgttaccgttgttcgaacctaaaggtcgcgtgcttctggttgatggccatcatctcgcgtatcgtaacttctttgccctgaaaggattaaccaccagccgtggcgagccggtacagggtgtctacggctttgcaaagtcgctcctgaaagctctgaaagaagacggtgatgtggtgattgttgtctttgatgcgaaagcgccaagttttcgccacgaagcgtacgaagcttacaaagccgggcgtgctccaacgccggaagactttcctcgccaattggcgcttatgaaggaattagtggatttgcttggcctcgaacgcttggaagttcccggtttcgaggcagacgacgtattagcgactctcgcaaagaaagccgaacgtgagggctatgaagtccagatcttgacagcagatcgcgatcttttccagcttttatctccgcgcatttccgtgttacacccggaagggcatcgtatcaccccggaatggctctgggagaaatatggtttgcgtcccgaacaatgggtggattttcgcgccttagcgggcgatccgagcgacaatattccgggagttaaaggtatcggcgagaagacggcgctcaagctccttaaagaatgggggtcgttggagaacttgcttaagaatttagatcaggtcaaaccagcttcagtgcgtgagaagattcttgcacacctcgaagacctcaaattaagccgcgaattgtcccgtgtacgcaccgatttgccgctcgaagttgatttccgtggccgccgcgaacctgactgggagggtcttaaagcgtttttagagcgtcttgaatttggttcgctcttgcatgaattcggccttttagaaagcccgttaccagccgaagaagcaccttggccaccgcccgaaggcgcgtttttaggttaccgtttgagtcgcccggaaccgatgtgggccgaattattggctcttgcagcgtctgcccagggacgtgtgtatcgcgcggaagaccctcatggtgcgctccgtggcctcaaagaagtccgtggactccttgccaaagacttagctgttgttgcattgcgcgaaggtcttgatttacctccgactgatgatccaatgcttcttgcgtacctcttggacccgtcaaacacgacgcccgaaggcgtagcccgtcgttacggcggcgagtggaccgaagatgcaggtgagcgcgcgttattggccgaacgtttgcaccagaatttattaggacgtttgcaaggcgaggaacgtctcctctggctttacgaagaagtggagaaaccattgagtcgcgtgctcgcgcatatggaagctaccggtgtcaaattagacgtggcgtatttggaggcactcagccttgaagttgctgccgaaattcgccgcttggaggaagaagtattccgtttagcaggccactcctttaaccttaattctcgcgatcagttagaacgtgtgttgttcgatgaacttggtctccctcctatcggcaagacagagaagaccggtaaacgtagcacttcagcggcggttttagaagctcttcgcgaagtccatcccattgtggacaagatcttgcagtaccgcgaactcgcgaaattgaaaggcacctatattgaccctcttccggcattagtccacccgaaaacgggacgcctccatacccgcttcaaccaaacagccacggcgaccggtcgtttgtcctcctctgatccaaaccttcagaatattccagtacgtaccccattgggccagaagatccgcaaagcgtttgtagctgaggagggttggcgtttagtggccctcgattatagccaaattgaattacgtgtccttgcccatctttctggcgatgagaacctcatccgcgtgtttcaggaaggcaaagacattcacactcaaacggcaagctggatgtttggattatcggcggaagcgatcgatcctttgatgcgtcgtgcagcgaagaccgttaatttcggtgttctctacggtatgagtgcccatcgtttgtcgcaggaattaggcattccctatgaagaagctgcggcgttcattcagcgctactttcaaagctatcccaaagttaaagcatggatcgagaagactctcgaagaaggccgcacacgtggttacgtagagaccttatttggacgtcgccgctatgttcccgatttaaacgctcgcgtgaaatctgtccgtgaagccgccgaacgcatggcgttcaacatgcctgtacagggcacggcagctgacctcatgaaacttgcaatggtgcgcctttttccacaattgcgtgaagttggtgcccgcatgctcttgcaggtccacgatgaactcttgttagaagcgccaaaagagcgtgcggaagaggtggcagccctcgcgaaagaggttatggaaggcgtgtggcccttagcggtgcctcttgaagtcgaagttggtattggcgaggattggttggctgccaaaggataatga

SEQ ID NO: 292 - protein, 841 aa, synthetic construct
  REGION 1..841: note = Variant of DNA polymerase I from Thermus sp. strain 2.9
MHHHHHHGGSGMLPLFEPKGRVLLVDGHHLAYRNFFALKGLTTSRGEPVQGVYGFAKSLLKALKEDGDVVIVVFDAKAPSFRHEAYEAYKAGRAPTPEDFPRQLALMKELVDLLGLERLEVPGFEADDVLATLAKKAEREGYEVQILTADRDLFQLLSPRISVLHPEGHRITPEWLWEKYGLRPEQWVDFRALAGDPSDNIPGVKGIGEKTALKLLKEWGSLENLLKNLDQVKPASVREKILAHLEDLKLSRELSRVRTDLPLEVDFRGRREPDWEGLKAFLERLEFGSLLHEFGLLESPLPAEEAPWPPPEGAFLGYRLSRPEPMWAELLALAASAQGRVYRAEDPHGALRGLKEVRGLLAKDLAVVALREGLDLPPTDDPMLLAYLLDPSNTTPEGVARRYGGEWTEDAGERALLAERLHQNLLGRLQGEERLLWLYEEVEKPLSRVLAHMEATGVKLDVAYLEALSLEVAAEIRRLEEEVFRLAGHSFNLNSRDQLERVLFDELGLPPIGKTEKTGKRSTSAAVLEALREVHPIVDKILQYRELAKLKGTYIDPLPALVHPKTGRLHTRFNQTATATGRLSSSDPNLQNIPVRTPLGQKIRKAFVAEEGWRLVALDYSQIELRVLAHLSGDENLIRVFQEGKDIHTQTASWMFGLSAEAIDPLMRRAAKTVNFGVLYGMSAHRLSQELGIPYEEAAAFIQRYFQSYPKVKAWIEKTLEEGRTRGYVETLFGRRRYVPDLNARVKSVREAAERMAFNMPVQGTAADLMKLAMVRLFPQLREVGARMLLQVHDELLLEAPKERAEEVAALAKEVMEGVWPLAVPLEVEVGIGEDWLAAKG

SEQ ID NO: 293 - DNA, 2529 bp, synthetic construct
  misc_feature 1..2529: note = Variant of DNA polymerase I from Thermus sp. strain 2.9
  source 1..2529: mol_type = other DNA
atgcaccatcatcatcatcatggcggtagcggcatgttaccgttgttcgaacctaaaggtcgcgtgcttctggttgatggccatcatctcgcgtatcgtaacttctttgccctgaaaggattaaccaccagccgtggcgagccggtacagggtgtctacggctttgcaaagtcgctcctgaaagctctgaaagaagacggtgatgtggtgattgttgtctttgatgcgaaagcgccaagttttcgccacgaagcgtacgaagcttacaaagccgggcgtgctccaacgccggaagactttcctcgccaattggcgcttatgaaggaattagtggatttgcttggcctcgaacgcttggaagttcccggtttcgaggcagacgacgtattagcgactctcgcaaagaaagccgaacgtgagggctatgaagtccagatcttgacagcagatcgcgatcttttccagcttttatctccgcgcatttccgtgttacacccggaagggcatcgcatcaccccggaatggctctgggagaaatatggtttgcgtcccgaacaatgggtggattttcgcgccttagtaggcgatccgagcgacaatattccgggagttaaaggtatcggcgagaagacggcgctcaagctccttaaagaatgggggtcgttggagaacttgcttaagaatttagatcaggtcaaaccagcttcagtgcgtgagaagattcttgcacacctcgaagacctcaaattaagccgcgaattgtcccgtgtacgcaccgatttgccgctcgaagttgatttccgtggccgccgcgaacctgactgggagggtcttaaagcgtttttagagcgtcttgaatttggttcgctcttgcatgaattcggccttttagaaagcccgttaccagccgaagaagcaccttggccaccgcccgaaggcgcgtttttaggttaccgtttgagtcgctcggaaccgatgtgggccgaattattggctcttgcagcgtctgcccagggacgtgtgtatcgcgcggaagaccctcatggtgcgctccgcggcctcaaagaagtccgtggactccttgccaaagacttagctgttgttgcattgcgcgaaggtcttgatttacctccgactgatgatccaatgcttcttgcgtacctcttggacccgtcaaacacgacgcccgaaggcgtagcccgtcgttacggcggcgagtggaccgaagatgcaggtgagcgcgcgttattggccgaacgtttgcacgccaatttattaggacgtttgcaaggcgaggaacgtctcctctggctttacgaagaagtggagaaaccattgagtcgcgtgctcgcgcatatggaagctaccggtgtcaaattagacgtggcgtatttggaggcactcagccttgaagttgctgccgaaatgcgccgcttggaggaagaagtattccgtttagcaggccactcctttaaccttaattctcgcgatcagttagaacgtgtgttgttcgatgaacttggtctccctcctatcggcaagacagagaagaccggtaaacgtagcacttcagcggcggttttagaagctcttcgcgaagtccatcccattgtggacaagatcttgcagtaccgcgaactcgcgaaattgaaaggcacctatattgaccctcttccggcattagtccacccgaaaacgggacgcctccatacccgcttcaaccaaacagccacggcgaccggtcgtttgtcctcctctgatccaaaccttcagaatattccagtacgtaccccattgggccagaagatccgcaaagcgtttgtagctgaggagggttggcgtttagtggccctcgattatagccaaattgaattacgtgtccttgcccatctttctggcgatgagaacctcatccgcgtgtttcaggaaggccgcgacattcacactcaaacggcaagctggatgtttggattatcagctgaagcgatcgatcctttgatgcgtcgtgcagcgaagaccatcaatttcggtgttctctacggtatgagtgcccatcgtttgtcgcaggaattaggcattccctatgaagaagctgtggcgttcattcagcgctactttcaaagctatcccaaagttaaagcatggatcgagaagactctcgaagaaggccgcacacgtggttacgtagagaccttatttggacgtcgccgctatgttcccgatttaaacgctcgcgtgaaatctgtccgtgaagccgccgaacgcatggcgttcaacatgcctgtacagggcacggcagctgacctcatgaaacttgcaatggtgcgcctttttccacaattgcgtgaagttggtgcccgcatgctcttgcaggtccacgatgaactcttgttagaagcgccaaaagagcgtgcggaagaggtggcagccctcgcgaaagaggttatggaaggcgtgtggcccttagcggtgcctcttgaagtcgaagttggtattggcgaggattggttggctgccaaaggataatga

SEQ ID NO: 294 - protein, 841 aa, synthetic construct
  REGION 1..841: note = Variant of DNA polymerase I from Thermus sp. strain 2.9
MHHHHHHGGSGMLPLFEPKGRVLLVDGHHLAYRNFFALKGLTTSRGEPVQGVYGFAKSLLKALKEDGDVVIVVFDAKAPSFRHEAYEAYKAGRAPTPEDFPRQLALMKELVDLLGLERLEVPGFEADDVLATLAKKAEREGYEVQILTADRDLFQLLSPRISVLHPEGHRITPEWLWEKYGLRPEQWVDFRALVGDPSDNIPGVKGIGEKTALKLLKEWGSLENLLKNLDQVKPASVREKILAHLEDLKLSRELSRVRTDLPLEVDFRGRREPDWEGLKAFLERLEFGSLLHEFGLLESPLPAEEAPWPPPEGAFLGYRLSRSEPMWAELLALAASAQGRVYRAEDPHGALRGLKEVRGLLAKDLAVVALREGLDLPPTDDPMLLAYLLDPSNTTPEGVARRYGGEWTEDAGERALLAERLHANLLGRLQGEERLLWLYEEVEKPLSRVLAHMEATGVKLDVAYLEALSLEVAAEMRRLEEEVFRLAGHSFNLNSRDQLERVLFDELGLPPIGKTEKTGKRSTSAAVLEALREVHPIVDKILQYRELAKLKGTYIDPLPALVHPKTGRLHTRFNQTATATGRLSSSDPNLQNIPVRTPLGQKIRKAFVAEEGWRLVALDYSQIELRVLAHLSGDENLIRVFQEGRDIHTQTASWMFGLSAEAIDPLMRRAAKTINFGVLYGMSAHRLSQELGIPYEEAVAFIQRYFQSYPKVKAWIEKTLEEGRTRGYVETLFGRRRYVPDLNARVKSVREAAERMAFNMPVQGTAADLMKLAMVRLFPQLREVGARMLLQVHDELLLEAPKERAEEVAALAKEVMEGVWPLAVPLEVEVGIGEDWLAAKG

SEQ ID NO: 295 - DNA, 2529 bp, synthetic construct
  misc_feature 1..2529: note = Variant of DNA polymerase I from Thermus sp. strain 2.9
  source 1..2529: mol_type = other DNA
atgcaccatcatcatcatcatggcggtagcggcatgttaccgttgttcgaacctaaaggtcgcgtgcttctggttgatggccatcatctcgcgtatcgtaacttctttgccctgaaaggattaaccaccagccgtggcgagccggtacagggtgtctacggctttgcaaagtcgctcctgaaagctctgaaagaagacggtgatgtggtgattgttgtctttgatgcgaaagcgccaagttttcgccacgaagcgtacgaagcttacaaagccgggcgtgctccaacgccggaagactttcctcgccaattggcgcttatgaaggaattagtggatttgcttggcctcgaacgcttggaagttcccggtttcgaggcagacgacgtattagcgactctcgcaaagaaagccgaacgtgagggctatgaagtccagatcttgacagcagatcgcgatcttttccagcttttatctccgcgcatttccgtgttacacccggaagggcatcgtatcaccccggaatggctctgggagaaatatggtttgcgtcccgaacaatgggtggattttcgcgccttagcaggcgatccgagcgacaatattccgggagttaaaggtatcggcgagaagacggcgctcaagctccttaaagaatgggggtcgttggagaacttgcttaagaatttagatcaggtcaaaccagagtcagtgcgtgagaagattcttgcacacctcgaagacctcaaattaagccgcgaattgtcccgtgtacgcaccgatttgccgctcgaagttgatttccgtggccgccgcgaacctgactgggagggtcttaaagcgtttttagagcgtcttgaatttggttcgctcttgcatgaattcggccttttagaaagcccgttaccagccgaagaagcaccttggccaccgcccgaaggcgcgtttttaggttacgttttgagtcgcccggaaccgatgtgggccgaattattggctcttgcagcgtctgcccagggacgtgtgtatcgcgcggaagaccctcatggtgcgctccgcggcctcaaagaagtccgtggactccttgccaaagacttagctgttgttgcattgcgcgaaggtcttgatttacctccgactgatgatccaatgcttcttgcgtacctcttggacccgtcaaacacgacgcccgaaggcgtagcccgtcgttacggcggcgagtggaccgaagatgcaggcgagcgcgcgttattggccgaacgtttgcacgccaatttattaggacgtttgcaaggcgaggaacgtctcctctggctttacgaagaagtggagaaaccattgagtcgcgtgctcgcgcatatggaagctaccggtgtcaaattagacgtggcgtatttggaggcactcagccttgaagttgctgccgaaatgcgccgcttggaggaagaagtattccgtttagcaggccactcctttaaccttaattctcgcgatcagttagaacgtgtgttgttcgatgaacttggtctccctcctatcggcaagacagagaagaccggtaaacgtagcacttcagcggcggttttagaagctcttcgcgaagtccatcccattgtggacaagatcttgcagtaccgcgaactcgcgaaattgaaaggcacctatattgaccctcttccggcattagtccacccgaaaacgggacgcctccatacccgcttcaaccaaacagccacggcgaccggtcgtttgtcctcctctgatccaaaccttcagaatattccagtacgtaccccattgggccagaagatccgccgcgcgtttgtagctgaggagggttggcgtttagtggccctcgattatagccaaattgaattacgtgtccttgcccatctttctggcgatgagaacctcatccgcgtgtttcaggaaggcaaagacattcacactcaaacggcaagctggatgtttggattatcagctgaagcgatcgatcctttgatgcgtcgtgcagcgaagaccgttaatttcggtgttctctacggtatgagtgcccatcgtttgtcgcaggaattaggcattccctatgaagaagctgcggcgttcattcagcgctactttcaaagctatcccaaagttaaagcatggatcgagaagactctcgaagaaggccgcacacgtggttacgtagagaccttatttggacgtcgccgctatgttcccgatttaaacgctcgcgtgaaatctgtccgtgaagccgccgaacgcatggcgttcaacatgcctgtacagggcacggcagctgacctcatgaaacttgcaatggtgcgcctttttccacaattgcgtgaagttggtgcccgcatgctcttgcaggtccacgatgaactcttgttagaagcgccaaaagagcgtgcggaagaggtggcagccctcgcgaaagaggttatggaaggcgtgtggcccttagcggtgcctcttgaagtcgaagttggtattggcgaggattggttggctgccaaaggataatga

SEQ ID NO: 296 - protein, 841 aa, synthetic construct
  REGION 1..841: note = Variant of DNA polymerase I from Thermus sp. strain 2.9
MHHHHHHGGSGMLPLFEPKGRVLLVDGHHLAYRNFFALKGLTTSRGEPVQGVYGFAKSLLKALKEDGDVVIVVFDAKAPSFRHEAYEAYKAGRAPTPEDFPRQLALMKELVDLLGLERLEVPGFEADDVLATLAKKAEREGYEVQILTADRDLFQLLSPRISVLHPEGHRITPEWLWEKYGLRPEQWVDFRALAGDPSDNIPGVKGIGEKTALKLLKEWGSLENLLKNLDQVKPESVREKILAHLEDLKLSRELSRVRTDLPLEVDFRGRREPDWEGLKAFLERLEFGSLLHEFGLLESPLPAEEAPWPPPEGAFLGYVLSRPEPMWAELLALAASAQGRVYRAEDPHGALRGLKEVRGLLAKDLAVVALREGLDLPPTDDPMLLAYLLDPSNTTPEGVARRYGGEWTEDAGERALLAERLHANLLGRLQGEERLLWLYEEVEKPLSRVLAHMEATGVKLDVAYLEALSLEVAAEMRRLEEEVFRLAGHSFNLNSRDQLERVLFDELGLPPIGKTEKTGKRSTSAAVLEALREVHPIVDKILQYRELAKLKGTYIDPLPALVHPKTGRLHTRFNQTATATGRLSSSDPNLQNIPVRTPLGQKIRRAFVAEEGWRLVALDYSQIELRVLAHLSGDENLIRVFQEGKDIHTQTASWMFGLSAEAIDPLMRRAAKTVNFGVLYGMSAHRLSQELGIPYEEAAAFIQRYFQSYPKVKAWIEKTLEEGRTRGYVETLFGRRRYVPDLNARVKSVREAAERMAFNMPVQGTAADLMKLAMVRLFPQLREVGARMLLQVHDELLLEAPKERAEEVAALAKEVMEGVWPLAVPLEVEVGIGEDWLAAKG

SEQ ID NO: 297 - DNA, 2529 bp, synthetic construct
  misc_feature 1..2529: note = Variant of DNA polymerase I from Thermus sp. strain 2.9
  source 1..2529: mol_type = other DNA
atgcaccatcatcatcatcatggcggtagcggcatgttaccgttgttcgaacctaaaggtcgcgtgcttctggttgatggccatcatctcgcgtatcgtaacttctttgccctgaaaggattaaccaccagccgtggcgagccggtacagggtgtctacggctttgcaaagtcgctcctgaaagctctgaaagaagacggtgatgtggtgattgttgtctttgatgcgaaagcgccaagttttcgccacgaagcgtacgaagcttacaaagccgggcgtgctccaacgccggaagactttcctcgccaattggcgcttatgaaggaattagtggatttgcttggcctcgaacgcttggaagttcccggtttcgaggcagacgacgtattagcgactctcgcaaagaaagccgaacgtgagggctatgaagtccagatcttgacagcagatcgcgatcttttccagcttttatctccgcgcatttccgtgttacacccggaagggcatcgtatcaccccggaatggctctgggagaaatatggtttgcgtcccgaacaatgggtggattttcgcgccttagcgggcgatccgagcgacaatattccgggagttaaaggtatcggcgagaagacggcgctcaagctccttaaagaatgggggtcgttggagaacttgcttaagaatttagatcaggtcaaaccagcttcagtgcgtgagaagattcttgcacacctcgaagacctcaaattaagccgcgaattgtcccgtgtacgcaccgatttgccgctcgaagttgatttccgtggccgccgcgaacctgactgggagggtcttaaagcgtttttagagcgtcttgaatttggttcgctcttgcatgaattcggccttttagaaagcccgttaccagccgaagaagcaccttggccaccgcccgaaggcgcgtttttaggttaccgtttgagtcgcccggaaccgatgtgggccgaattattggctcttgcagcgtctgcccagggacgtgtgtatcgcgcggaagaccctcatggtgcgctccgtggcctcaaagaagtccgtggactccttgccaaagacttagctgttgttgcattgcgcgaaggtcttgatttacctccgactgatgatccaatgcttcttgcgtacctcttggacccgtcaaacacgacgcccgaaggcgtagcccgtcgttacggcggcgagtggaccgaagatgcaggtgagcgcgcgttattggccgaacgtttgcacgccaatttattaggacgtttgcaaggcgaggaacgtctcctctggctttacgaagaagtggagaaaccattgagtcgcgtgctcgcgcatatggaagctaccggtgtcaaattagacgtggcgtatttggaggcactcagccttgaagttgctgccgaactgcgccgcttggaggaagaagtattccgtttagcaggccactcctttaaccttaattctcgcgatcagttagaacgtgtgttgttcgatgaacttggtctccctcctatcggcaagacagagaagaccggtaaacgtagcacttcagcggcggttttagaagctcttcgcgaagtccatcccattgtggacaagatcttgcagtaccgcgaactcgcgaaattgaaaggcacctatattgaccctcttccggcattagtccacccgaaaacgggacgcctccatacccgcttcaaccaaacagccacggcgaccggtcgtttgtcctcctctgatccaaaccttcagaatattccagtacgtaccccattgggccagaagatccgcaaagcgtttgtagctgaggagggttggcgtttagtggccctcgattatagccaaattgaattacgtgtccttgcccatctttctggcgatgagaacctcatccgcgtgtttcaggaaggccgcgacattcacactcaaacggcaagctggatgtttggattatcagctgaagcgatcgatcctttgatgcgtcgtgcagcgaagaccatcaatttcggtgttctctacggtatgagtgcccatcgtttgtcgcaggaattaggcattccctatgaagaagctgcggcgttcattcagcgctactttcaaagctatcccaaagttaaagcatggatcgagaagactctcgaagaaggccgcacacgtggttacgtagagaccttatttggacgtcgccgctatgttcccgatttaaatgctcgcgtgaaatctgtccgtgaagccgccgaacgcatggcgtggaacatgcctgtacagggcacggcagctgacctcatgaaacttgcaatggtgcgcctttttccacaattgcgtgaagttggtgcccgcatgctcttgcaggtccacgatgaactcttgttagaagcgccaaaagagcgtgcggaagaggtggcagccctcgcgaaagaggttatggaaggcgtgtggcccttagcggtgcctcttgaagtcgaagttggtattggcgaggattggttggctgccaaaggataatga

SEQ ID NO: 298 - protein, 841 aa, synthetic construct
  REGION 1..841: note = Variant of DNA polymerase I from Thermus sp. strain 2.9
MHHHHHHGGSGMLPLFEPKGRVLLVDGHHLAYRNFFALKGLTTSRGEPVQGVYGFAKSLLKALKEDGDVVIVVFDAKAPSFRHEAYEAYKAGRAPTPEDFPRQLALMKELVDLLGLERLEVPGFEADDVLATLAKKAEREGYEVQILTADRDLFQLLSPRISVLHPEGHRITPEWLWEKYGLRPEQWVDFRALAGDPSDNIPGVKGIGEKTALKLLKEWGSLENLLKNLDQVKPASVREKILAHLEDLKLSRELSRVRTDLPLEVDFRGRREPDWEGLKAFLERLEFGSLLHEFGLLESPLPAEEAPWPPPEGAFLGYRLSRPEPMWAELLALAASAQGRVYRAEDPHGALRGLKEVRGLLAKDLAVVALREGLDLPPTDDPMLLAYLLDPSNTTPEGVARRYGGEWTEDAGERALLAERLHANLLGRLQGEERLLWLYEEVEKPLSRVLAHMEATGVKLDVAYLEALSLEVAAELRRLEEEVFRLAGHSFNLNSRDQLERVLFDELGLPPIGKTEKTGKRSTSAAVLEALREVHPIVDKILQYRELAKLKGTYIDPLPALVHPKTGRLHTRFNQTATATGRLSSSDPNLQNIPVRTPLGQKIRKAFVAEEGWRLVALDYSQIELRVLAHLSGDENLIRVFQEGRDIHTQTASWMFGLSAEAIDPLMRRAAKTINFGVLYGMSAHRLSQELGIPYEEAAAFIQRYFQSYPKVKAWIEKTLEEGRTRGYVETLFGRRRYVPDLNARVKSVREAAERMAWNMPVQGTAADLMKLAMVRLFPQLREVGARMLLQVHDELLLEAPKERAEEVAALAKEVMEGVWPLAVPLEVEVGIGEDWLAAKG

SEQ ID NO: 299 - DNA, 2529 bp, synthetic construct
  misc_feature 1..2529: note = Variant of DNA polymerase I from Thermus sp. strain 2.9
  source 1..2529: mol_type = other DNA
atgcaccatcatcatcatcatggcggtagcggcatgttaccgttgttcgaacctaaaggtcgcgtgcttctggttgatggccatcatctcgcgtatcgtaacttctttgccctgaaaggattaaccaccagccgtggcgagccggtacagggtgtctacggctttgcaaagtcgctcctgaaagctctgaaagaagacggtgatgtggtgattgttgtctttgatgcgaaagcgccaagttttcgccacgaagcgtacgaagcttacaaagccgggcgtgctccaacgccggaagactttcctcgccaattggcgcttatgaaggaattagtggatttgcttggcctcgaacgcttggaagttcccggtttcgaggcagacgacgtattagcgactctcgcaaagaaagccgaacgtgagggctatgaagtccagatcttgacagcagatcgcgatcttttccagcttttatctccgcgcatttccgtgttacacccggaagggcatcgtatcaccccggaatggctctgggagaaatatggtttgcgtcccgaacaatgggtggattttcgcgccttagcgggcgatccgagcgacaatattccgggagttaaaggtatcggcgagaagacggcgctcaagctccttaaagaatgggggtcgttggagaacttgcttaagaatttagatcaggtcaaaccagagtcagtgcgtgagaagattcttgcacacctcgaagacctcaaattaagccgcgaattgtcccgtgtacgcaccgatttgccgctcgaagttgatttccgtggccgccgcgaacctgactgggagggtcttaaagcgtttttagagcgtcttgaatttggttcgctcttgcatgaattcggccttttagaaagcccgttaccagccgaagaagcaccttggccaccgcccgaaggcgcgtttttaggttaccgtttgagtcgcccggaaccgatgtgggccgaattattggctcttgcagcgtctgcccagggacgtgtgtatcgcgcggaagaccctcatggtgcgctcaaaggcctcaaagaagtccgtggactccttgccaaagacttagctgttgttgcattgcgcgaaggtcttgatttacctccgactgatgatccaatgcttcttgcgtacctcttggacccgtcaaacacgacgcccgaaggcgtagcccgtcgttacggcggcgagtggaccgaagatgcagccgagcgcgcgttattggccgaacgtttgcacgccaatttattaggacgtttgcaaggcgaggaacgtctcctctggctttacgaagaagtggagaaaccattgagtcgcgtgctcgcgcatatggaagctaccggtgtcaaattagacgtggcgtatttggaggcactcagccttgaagttgctgccgaaatgcgccgcttggaggaagaagtattccgtttagcaggccactcctttaaccttaattctcgcgatcagttagaacgtgtgttgttcgatgaacttggtctccctcctatcggcaagacagagaagaccggtaaacgtagcacttcagcggcggttttagaagctcttcgcgaagtccatcccattgtggacaagatcttgcagtaccgcgaactcgcgaaattgaaaggcacctatattgaccctcttccggcattagtccacccgaaaacgggacgcctccatacccgcttcaaccaaacagccacggcgaccggtcgtttgtcctcctctgatccaaaccttcagaatattccagtacgtaccccattgggccagaagatccgcaaagcgtttgtagctgaggagggttggcgtttagtggccctcgattatagccaaattgaattacgtgtccttgcccatctttctggcgatgagaacctcatccgcgtgtttcaggaaggccgtgacattcacactcaaacggcaagctggatgtttggattaccgccggaagcgatcgatcctttgatgcgtcgtgcagcgaagaccgttaatttcggtgttctctacggtatgagtgcccatcgtttgtcgcaggaattaggcattccctatgaagaagctgtggcgttcattcagcgctactttcaaagctatcccaaagttaaagcatggatcgagaagactctcgaagaaggccgcacacgtggttacgtagagaccttatttggacgtcgccgctatgttcccgatttaaacgctcgcgtgaaatctgtccgtgaagccgccgaacgcatggcgttcaacatgcctgtacagggcacggcagctgacctcatgaaacttgcaatggtgcgcctttttccacaattgcgtgaagttggtgcccgcatgctcttgcaggtccacgatgaactcttgttagaagcgccaaaagagcgtgcggaagaggtggcagccctcgcgaaagaggttatggaaggcgtgtggcccttagcggtgcctcttgaagtcgaagttggtattggcgaggattggttggctgccaaaggataatga

SEQ ID NO: 300 - protein, 841 aa, synthetic construct
  REGION 1..841: note = Variant of DNA polymerase I from Thermus sp. strain 2.9
MHHHHHHGGSGMLPLFEPKGRVLLVDGHHLAYRNFFALKGLTTSRGEPVQGVYGFAKSLLKALKEDGDVVIVVFDAKAPSFRHEAYEAYKAGRAPTPEDFPRQLALMKELVDLLGLERLEVPGFEADDVLATLAKKAEREGYEVQILTADRDLFQLLSPRISVLHPEGHRITPEWLWEKYGLRPEQWVDFRALAGDPSDNIPGVKGIGEKTALKLLKEWGSLENLLKNLDQVKPESVREKILAHLEDLKLSRELSRVRTDLPLEVDFRGRREPDWEGLKAFLERLEFGSLLHEFGLLESPLPAEEAPWPPPEGAFLGYRLSRPEPMWAELLALAASAQGRVYRAEDPHGALKGLKEVRGLLAKDLAVVALREGLDLPPTDDPMLLAYLLDPSNTTPEGVARRYGGEWTEDAAERALLAERLHANLLGRLQGEERLLWLYEEVEKPLSRVLAHMEATGVKLDVAYLEALSLEVAAEMRRLEEEVFRLAGHSFNLNSRDQLERVLFDELGLPPIGKTEKTGKRSTSAAVLEALREVHPIVDKILQYRELAKLKGTYIDPLPALVHPKTGRLHTRFNQTATATGRLSSSDPNLQNIPVRTPLGQKIRKAFVAEEGWRLVALDYSQIELRVLAHLSGDENLIRVFQEGRDIHTQTASWMFGLPPEAIDPLMRRAAKTVNFGVLYGMSAHRLSQELGIPYEEAVAFIQRYFQSYPKVKAWIEKTLEEGRTRGYVETLFGRRRYVPDLNARVKSVREAAERMAFNMPVQGTAADLMKLAMVRLFPQLREVGARMLLQVHDELLLEAPKERAEEVAALAKEVMEGVWPLAVPLEVEVGIGEDWLAAKG

SEQ ID NO: 301 - DNA, 2529 bp, synthetic construct
  misc_feature 1..2529: note = Variant of DNA polymerase I from Thermus sp. strain 2.9
  source 1..2529: mol_type = other DNA
atgcaccatcatcatcatcatggcggtagcggcatgttaccgttgttcgaacctaaaggtcgcgtgcttctggttgatggccatcatctcgcgtatcgtaacttctttgccctgaaaggattaaccaccagccgtggcgagccggtacagggtgtctacggctttgcaaagtcgctcctgaaagctctgaaagaagacggtgatgtggtgattgttgtctttgatgcgaaagcgccaagttttcgccacgaagcgtacgaagcttacaaagccgggcgtgctccaacgccggaagactttcctcgccaattggcgcttatgaaggaattagtggatttgcttggcctcgaacgcttggaagttcccggtttcgaggcagacgacgtattagcgactctcgcaaagaaagccgaacgtgagggctatgaagtccagatcttgacagcagatcgcgatcttttccagcttttatctccgcgcatcgcggtgttacacccggaagggcatctgatcaccccggaatggctctgggagaaatatggtttgcgtcccgaacaatgggtggattttcgcgccttagtaggcgatccgagcgacaatattccgggagttaaaggtatcggcgagaagacggcgctcaagctccttaaagaatgggggtcgttggagaacttgcttaagaatttagatcaggtcaaaccagagtcagtgcgtgagaagattcttgcacacctcgaagacctccgtttaagccgcgaattgtcccgtgtacgcaccgatttgccgctcgaagttgatttccgtcgccgccgcgaacctgactgggagggtcttaaagcgtttttagagcgtcttgaatttggttcgctcttgcatgaattcggccttttagaaagcccgttaccagccgaagaagcaccttggccaccgcccgaaggcgcgtttttaggttaccgtttgagtcgcccggaaccgatgtgggccgaattattggctcttgcagcgtctgcccagggacgtgtgtatcgcgcggaagaccctcatggtgcgctccgcggcctcaaagaagtccgtggactccttgccaaagacttagctgttgttgcattgcgcgaaggtcttgatttacctccgactgatgatccaatgcttcttgcgtacctcttggacccgtcaaacacgacgcccgaaggcgtagcccgtcgttacggcggcgagtggaccgaagatgcaggcgagcgcgcgttattggccgaacgtttgcacgccaatttattaggacgtttgcaaggcgaggaacgcctcctctggctttacgaagaagtggagaaaccattgagtcgcgtgctcgcgcatatggaagctaccggtgtcaaattagacgtggcgtatttggaggcactcagccttgaagttgctgccgaaatgcgccgcttggaggaagaagtattccgtttagcaggccactcctttaaccttaattctcgcgatcagttagaacgtgtgttgttcgatgaacttggtctccctcctatcggcaagacagagaagaccggtaaacgtagcacttcagcggcggttttagaagctcttcgcgaagtccatcccattgtggacaagatcttgcagtaccgcgaactcgcgaaattgaaaggcacctatattgaccctcttccggcattagtccacccgaaaacgggacgcctccatacccgcttcaaccaaacagccacggcgaccggtcgtttgtcctcctctgatccaaaccttcagaatattccagtacgtaccccattgggccagaagatccgcaaagcgtttgtagctgaggagggttggcgtttagtggccctcgattatagccaaattgaattacgtgtccttgcccatctttctggcgatgagaacctcatccgcgtgtttcaggaaggccgtgacattcacactcaaacggcaagctggatgtttggattatcagctgaagcgatcgatcctttgatgcgtcgtgcagcgaagaccgttaatttcggtgttctctacggtatgagtgcccatcgtttgtcgcaggaattaggcattccctatgaagaagctgtggcgttcattcagcgctactttcaaagctatcccaaagttaaagcatggatcgagaagactctcgaagaaggccgcacacgtggttacgtagagaccttatttggacgtcgccgctatgttcccgatttaaacgctcgcgtgaaatctgtccgtgaagccgccgaacgcatggcgttcaacatgcctgtacagggcacggcagctgacctcatgaaacttgcaatggtgcgcctttttccacaattgcgtgaagttggtgcccgcatgctcttgcaggtccacgatgaactcttgttagaagcgccaaaagagcgtgcggaagaggtggcagccctcgcgaaagaggttatggaaggcgtgtggcccttagcggtgcctcttgaagtcgaagttggtattggcgaggattggttggctgccaaaggataatga

SEQ ID NO: 302 - protein, 841 aa, synthetic construct
  REGION 1..841: note = Variant of DNA polymerase I from Thermus sp. strain 2.9
MHHHHHHGGSGMLPLFEPKGRVLLVDGHHLAYRNFFALKGLTTSRGEPVQGVYGFAKSLLKALKEDGDVVIVVFDAKAPSFRHEAYEAYKAGRAPTPEDFPRQLALMKELVDLLGLERLEVPGFEADDVLATLAKKAEREGYEVQILTADRDLFQLLSPRIAVLHPEGHLITPEWLWEKYGLRPEQWVDFRALVGDPSDNIPGVKGIGEKTALKLLKEWGSLENLLKNLDQVKPESVREKILAHLEDLRLSRELSRVRTDLPLEVDFRRRREPDWEGLKAFLERLEFGSLLHEFGLLESPLPAEEAPWPPPEGAFLGYRLSRPEPMWAELLALAASAQGRVYRAEDPHGALRGLKEVRGLLAKDLAVVALREGLDLPPTDDPMLLAYLLDPSNTTPEGVARRYGGEWTEDAGERALLAERLHANLLGRLQGEERLLWLYEEVEKPLSRVLAHMEATGVKLDVAYLEALSLEVAAEMRRLEEEVFRLAGHSFNLNSRDQLERVLFDELGLPPIGKTEKTGKRSTSAAVLEALREVHPIVDKILQYRELAKLKGTYIDPLPALVHPKTGRLHTRFNQTATATGRLSSSDPNLQNIPVRTPLGQKIRKAFVAEEGWRLVALDYSQIELRVLAHLSGDENLIRVFQEGRDIHTQTASWMFGLSAEAIDPLMRRAAKTVNFGVLYGMSAHRLSQELGIPYEEAVAFIQRYFQSYPKVKAWIEKTLEEGRTRGYVETLFGRRRYVPDLNARVKSVREAAERMAFNMPVQGTAADLMKLAMVRLFPQLREVGARMLLQVHDELLLEAPKERAEEVAALAKEVMEGVWPLAVPLEVEVGIGEDWLAAKG

SEQ ID NO: 303 - DNA, 2529 bp, synthetic construct
  misc_feature 1..2529: note = Variant of DNA polymerase I from Thermus sp. strain 2.9
  source 1..2529: mol_type = other DNA
atgcaccatcatcatcatcatggcggtagcggcatgttaccgttgttcgaacctaaaggtcgcgtgcttctggttgatggccatcatctcgcgtatcgtaacttctttgccctgaaaggattaaccaccagccgtggcgagccggtacagggtgtctacggctttgcaaagtcgctcctgaaagctctgaaagaagacggtgatgtggtgattgttgtctttgatgcgaaagcgccaagttttcgccacgaagcgtacgaagcttacaaagccgggcgtgctccaacgccggaagactttcctcgccaattggcgcttatgaaggaattagtggatttgcttggcctcgaacgcttggaagttcccggtttcgaggcagacgacgtattagcgactctcgcaaagaaagccgaacgtgagggctatgaagtccagatcttgacagcagatcgcgatcttttccagcttttatctccgcgcatttccgtgttacacccggaagggcatcgtatcaccccggaatggctctgggagaaatatggtttgcgtcccgaacaatgggtggattttcgcgccttagcgggcgatccgagcgacaatattccgggagttaaaggtatcggcgagaagacggcgctcaagctccttaaagaatgggggtcgttggagaacttgcttaagaatttagatcaggtcaaaccagcttcagtgcgtgagaagattcttgcacacctcgaagacctcaaattaagccgcgaattgtcccgtgtacgcaccgatttgccgctcgaagttgatttccgtggccgccgcgaacctgactgggagggtcttaaagcgtttttagagcgtcttgaatttggttcgctcttgcatgaattcggccttttagaaagcccgttaccagccgaagaagcaccttggccaccgcccgaaggcgcgtttttaggttaccgtttgagtcgcccggaaccgatgtgggccgaattattggctcttgcagcgtctgcccagggacgtgtgtatcgcgcggaagaccctcatggtgcgctccgtggcctcaaagaagtccgtggactccttgccaaagacttagctgttgttgcattgcgcgaaggtcttgatttacctccgactgatgatccaatgcttcttgcgtacctcttggacccgtcaaacacgacgcccgaaggcgtagcccgtcgttacggcggcgagtggaccgaagatgcaggtgagcgcgcgttattggccgaacgtttgcacgccaatttattaggacgtttgcaaggcgaggaacgtctcctctggctttacgaagaagtggagaaaccattgagtcgcgtgctcgcgcatatggaagctaccggtgtcaaattagacgtggcgtatttggaggcactcagccttgaagttgctgccgaaatgcgccgcttggaggaagaagtattccgtttagcaggccactcctttaaccttaattctcgcgatcagttagaacgtgtgttgttcgatgaacttggtctccctcctatcggcaagacagagaagaccggtaaacgtagcacttcagcggcggttttagaagctcttcgcgacgtccatcccattgtggacaagatcttgcagtaccgcgaactcgcgaaattgaaaggcacctatattgaccctcttccggcattagtccacccgaaaacgggacgcctccatacccgcttcaaccaaacagccacggcgaccggtcgtttgtcctcctctgatccaaaccttcagaatattccagtacgtaccccattgggccagaagatccgcaaagcgtttgtagctgaggagggttggcgtttagtggccctcgattatagccaaattgaattacgtgtccttgcccatctttctggcgatgagaacctcatccgcgtgtttcaggaaggccgcgacattcacactcaaacggcaagctggatgtttggattatcagctgaagcgatcgatcctttgatgcgtcgtgcagcgaagaccatcaatttcggtgttctctacggtatgagtgcccatcgtttgtcgcaggaattaggcattccctatgaagaagctgcggcgttcattcagcgctactttcaaagctatcccaaagttaaagcatggatcgagaagactctcgaagaaggccgcacacgtggttacgtagagaccttatttggacgtcgccgctatgttcccgatttaaacgctcgcgtgaaatctgtccgtgaagccgccgaacgcatggcgttcaacatgcctgtacagggcacggcagctgacctcatgaaacttgcaatggtgcgcctttttccacaattgcgtgaagttggtgcccgcatgctcttgcaggtccacgatgaactcttgttagaagcgccaaaagagcgtgcggaagaggtggcagccctcgcgaaagaggttatggaaggcgtgtggcccttagcggtgcctcttgaagtcgaagttggtattggcgaggattggttggctgccaaaggataatga

SEQ ID NO: 304 - protein, 841 aa, synthetic construct
  REGION 1..841: note = Variant of DNA polymerase I from Thermus sp. strain 2.9
MHHHHHHGGSGMLPLFEPKGRVLLVDGHHLAYRNFFALKGLTTSRGEPVQGVYGFAKSLLKALKEDGDVVIVVFDAKAPSFRHEAYEAYKAGRAPTPEDFPRQLALMKELVDLLGLERLEVPGFEADDVLATLAKKAEREGYEVQILTADRDLFQLLSPRISVLHPEGHRITPEWLWEKYGLRPEQWVDFRALAGDPSDNIPGVKGIGEKTALKLLKEWGSLENLLKNLDQVKPASVREKILAHLEDLKLSRELSRVRTDLPLEVDFRGRREPDWEGLKAFLERLEFGSLLHEFGLLESPLPAEEAPWPPPEGAFLGYRLSRPEPMWAELLALAASAQGRVYRAEDPHGALRGLKEVRGLLAKDLAVVALREGLDLPPTDDPMLLAYLLDPSNTTPEGVARRYGGEWTEDAGERALLAERLHANLLGRLQGEERLLWLYEEVEKPLSRVLAHMEATGVKLDVAYLEALSLEVAAEMRRLEEEVFRLAGHSFNLNSRDQLERVLFDELGLPPIGKTEKTGKRSTSAAVLEALRDVHPIVDKILQYRELAKLKGTYIDPLPALVHPKTGRLHTRFNQTATATGRLSSSDPNLQNIPVRTPLGQKIRKAFVAEEGWRLVALDYSQIELRVLAHLSGDENLIRVFQEGRDIHTQTASWMFGLSAEAIDPLMRRAAKTINFGVLYGMSAHRLSQELGIPYEEAAAFIQRYFQSYPKVKAWIEKTLEEGRTRGYVETLFGRRRYVPDLNARVKSVREAAERMAFNMPVQGTAADLMKLAMVRLFPQLREVGARMLLQVHDELLLEAPKERAEEVAALAKEVMEGVWPLAVPLEVEVGIGEDWLAAKG

SEQ ID NO: 305 - DNA, 2529 bp, synthetic construct
  misc_feature 1..2529: note = Variant of DNA polymerase I from Thermus sp. strain 2.9
  source 1..2529: mol_type = other DNA
atgcaccatcatcatcatcatggcggtagcggcatgttaccgttgttcgaacctaaaggtcgcgtgcttctggttgatggccatcatctcgcgtatcgtaacttctttgccctgaaaggattaaccaccagccgtggcgagccggtacagggtgtctacggctttgcaaagtcgctcctgaaagctctgaaagaagacggtgatgtggtgattgttgtctttgatgcgaaagcgccaagttttcgccacgaagcgtacgaagcttacaaagccgggcgtgctccaacgccggaagactttcctcgccaattggcgcttatgaaggaattagtggatttgcttggcctcgaacgcttggaagttcccggtttcgaggcagacgacgtattagcgactctcgcaaagaaagccgaacgtgagggctatgaagtccagatcttgacagcagatcgcgatcttttccagcttttatctccgcgcatttccgtgttacacccggaagggcatcgtatcaccccggaatggctctgggagaaatatggtttgcgtcccgaacaatgggtggattttcgcgccttagcgggcgatccgagcgacaatattccgggagttaaaggtatcggcgagaagacggcgctcaagctccttaaagaatgggggtcgttggagaacttgcttaagaatttagatcaggtcaaaccagcttcagtgcgtgagaagattcttgcacacctcgaagacctcaaattaagccgcgaattgtcccgtgtacgcaccgatttgccgctcgaagttgatttcaaaggccgccgcgaacctgactgggagggtcttaaagcgtttttagagcgtcttgaatttggttcgctcttgcatgaattcggccttttagaaagcccgttaccagccgaagaagcaccttggccaccgcccgaaggcgcgtttttaggttaccgtttgagtcgcccggaaccgatgtgggccgaattattggctcttgcagcgtctgcccagggacgtgtgtatcgcgcggaagaccctcatggtgcgctccgtggcctcaaagaagtccgtggactccttgccaaagacttagctgttgttgcattgcgcgaaggtcttgatttacctccgactgatgatccaatgcttcttgcgtacctcttggacccgtcaaacacgacgcccgaaggcgtagcccgtcgttacggcggcgagtggaccgaagatgcaggtgagcgcgcgttattggccgaacgtttgcacgccaatttattaggacgtttgcaaggcgaggaacgtctcctctggctttacgaagaagtggagaaaccattgagtcgcgtgctcgcgcatatggaagctaccggtgtcaaattagacgtggcgtatttggaggcactcagccttgaagttgctgccgaaatgcgccgcttggaggaagaagtattccgtttagcaggccactcctttaaccttaattctcgcgatcagttagaacgtgtgttgttcgatgaacttggtctccctcctatcggcaagacagagaagaccggtaaacgtagcacttcagcggcggttttagaagctcttcgcgaagtccatcccattgtggacaagatcttgcagtaccgcgaactcgcgaaattgaaaggcacctatattgaccctcttccggcattagtccacccgaaaacgggacgcctccatacccgcttcaaccaaacagccacggcgaccggtcgtttgtcctcctctgatccaaaccttcagaatattccagtacgtaccccattgggccagaagatccgcaaagcgtttgtagctgaggagggttggcgtttagtggccctcgattatagccaaattgaattacgtgtccttgcccatctttctggcgatgagaacctcatccgcgtgtttcaggaaggccgcgacattcacactcaaacggcaagctggatgtttggattatcagctgaagcgatcgatcctttgatgcgtcgtgcagcgaagaccatcaatttcggtgttctctacggtatgagtgcccatcgtttgtcgcaggaattaggcattccctatgaagaagctgcggcgttcattcagcgctactttcaaagctatcccaaagttaaagcatggatcgagaagactctcgaagaaggccgcacacgtggttacgtagagaccttatttggacgtcgccgctatgttcccgatttaaacgctcgcgtgaaatctgtccgtgaagccgccgaacgcatggcgttcaacatgcctgtacagggcacggcagctgacctcatgaaacttgcaatggtgcgcctttttccacaattgcgtgaagttggtgcccgcatgctcttgcaggtccacgatgaactcttgttagaagcgccaaaagagcgtgcggaagaggtggcagccctcgcgaaagaggttatggaaggcgtgtggcccttagcggtgcctcttgaagtcgaagttggtattggcgaggattggttggctgccaaaggataatga

SEQ ID NO: 306 - protein, 841 aa, synthetic construct
  REGION 1..841: note = Variant of DNA polymerase I from Thermus sp. strain 2.9
MHHHHHHGGSGMLPLFEPKGRVLLVDGHHLAYRNFFALKGLTTSRGEPVQGVYGFAKSLLKALKEDGDVVIVVFDAKAPSFRHEAYEAYKAGRAPTPEDFPRQLALMKELVDLLGLERLEVPGFEADDVLATLAKKAEREGYEVQILTADRDLFQLLSPRISVLHPEGHRITPEWLWEKYGLRPEQWVDFRALAGDPSDNIPGVKGIGEKTALKLLKEWGSLENLLKNLDQVKPASVREKILAHLEDLKLSRELSRVRTDLPLEVDFKGRREPDWEGLKAFLERLEFGSLLHEFGLLESPLPAEEAPWPPPEGAFLGYRLSRPEPMWAELLALAASAQGRVYRAEDPHGALRGLKEVRGLLAKDLAVVALREGLDLPPTDDPMLLAYLLDPSNTTPEGVARRYGGEWTEDAGERALLAERLHANLLGRLQGEERLLWLYEEVEKPLSRVLAHMEATGVKLDVAYLEALSLEVAAEMRRLEEEVFRLAGHSFNLNSRDQLERVLFDELGLPPIGKTEKTGKRSTSAAVLEALREVHPIVDKILQYRELAKLKGTYIDPLPALVHPKTGRLHTRFNQTATATGRLSSSDPNLQNIPVRTPLGQKIRKAFVAEEGWRLVALDYSQIELRVLAHLSGDENLIRVFQEGRDIHTQTASWMFGLSAEAIDPLMRRAAKTINFGVLYGMSAHRLSQELGIPYEEAAAFIQRYFQSYPKVKAWIEKTLEEGRTRGYVETLFGRRRYVPDLNARVKSVREAAERMAFNMPVQGTAADLMKLAMVRLFPQLREVGARMLLQVHDELLLEAPKERAEEVAALAKEVMEGVWPLAVPLEVEVGIGEDWLAAKG

SEQ ID NO: 307 - DNA, 2529 bp, synthetic construct
  misc_feature 1..2529: note = Variant of DNA polymerase I from Thermus sp. strain 2.9
  source 1..2529: mol_type = other DNA
atgcaccatcatcatcatcatggcggtagcggcatgttaccgttgttcgaacctaaaggtcgcgtgcttctggttgatggccatcatctcgcgtatcgtaacttctttgccctgaaaggattaaccaccagccgtggcgagccggtacagggtgtctacggctttgcaaagtcgctcctgaaagctctgaaagaagacggtgatgtggtgattgttgtctttgatgcgaaagcgccaagttttcgccacgaagcgtacgaagcttacaaagccgggcgtgctccaacgccggaagactttcctcgccaattggcgcttatgaaggaattagtggatttgcttggcctcgaacgcttggaagttcccggtttcgaggcagacgacgtattagcgactctcgcaaagaaagccgaacgtgagggctatgaagtccatatcttgacagcagatcgcgatcttttccagcttttatctccgcgcatttccgtgttacacccggaagggcatcgtatcaccccggaatggctctgggagaaatatggtttgcgtcccgaacaatgggtggattttcgcgccttagcgggcgatccgagcgacaatattccgggagttaaaggtatcggcgagaagacggcgctcaagctccttaaagaatgggggtcgttggagaacttgcttaagaatttagatcaggtcaaaccagcttcagtgcgtgagaagattcttgcacacctcgaagacctcaaattaagccgcgaattgtcccgtgtacgcaccgatttgccgctcgaagttgatttccgtggccgccgcgaacctgactgggagggtcttaaagcgtttttagagcgtcttgaatttggttcgctcttgcatgaattcggccttttagaaagcccgttaccagccgaagaagcaccatggccaccgcccgaaggcgcgtttttaggttaccgtttgagtcgcccggaaccgatgtgggccgaattattggctcttgcagcgtctgcccagggacgtgtgtatcgcgcggaagaccctcatggtgcgctccgtggcctcaaagaagtccgtggactccttgccaaagacttagctgttgttgcattgcgcgaaggtcttgatttacctccgactgatgatccaatgcttcttgcgtacctcttggactcgtcaaacacgacgcccgaaggcgtagcccgtcgttacggcggcgagtggaccgaagatgcaggtgagcgcgcgttattggccgaacgtttgcacgccaatttattaggacgtttgcaaggcgaggaacgtctcctctggctttacgaagaagtggagaaaccattgagtcgcgtgctcgcgcatatggaagctaccggtgtcaaattagacgtggcgtatttggaggcactcagccttgaagtcgctgccgaaatgcgccgcttggaggaagaagtattccgtttagcaggccactcctttaaccttaattctcgcgatcagttagaacgtgtgttgttcgatgaacttggtctccctcctatcaccaagacagagaagaccggtaaacgtagcacttcagcggcggttttagaagctcttcgcgaagtccatcccattgtggacaagatcttgcagtaccgcgaactcgcgaaattgaaaggcacctatattgaccctcttccggcattagtccacccgaaaacgggacgcctccatacccgcttcaaccaaacagccacggcgaccggtcgtttgtcctcctctgatccaaaccttcagaatattccagtacgtaccccattgggccagaagatccgcaaagcgtttgtagctgaggagggttggcgtttagtggccctcgattatagccaaattgaattacgtgtccttgcccatctttctggcgatgagaacctcatccgcgtgtttcaggaaggccgcgacattcacactcaaacggcaagctggatgtttggattatcagctgaagcgatcgatcctttgatgcgtcgtgcagcgaagaccatcaatttcggtgttctctacggtatgagtgcccatcgtttgtcgcaggaattaggcattccctatgaagaagctgcggcgttcattcagcgctactttcaaagctatcccaaagttaaagcatggatcgagaagactctcgaagaaggccgcacacgtggttacgtagagaccttatttggacgtcgccgctatgttcccgatttaaatgctcgcgtgaaatctgtccgtgaagccgccgaacgcatggcgtggaacatgcctgtacagggcacggcagctgacctcatgaaacttgcaatggtgcgcctttttccacaattgcgtgaagttggtgcccgcatgctcttgcaggtccacgatgaactcttgttagaagcgccaaaagagcgtgcggaagaggtggcagccctcgcgaaagaggttatggaaggcgtgtggcccttagcggtgcctcttgaagtcgaagttggtattggcgaggattggttggctgccaaaggataatga

SEQ ID NO: 308 - protein, 841 aa, synthetic construct
  REGION 1..841: note = Variant of DNA polymerase I from Thermus sp. strain 2.9
MHHHHHHGGSGMLPLFEPKGRVLLVDGHHLAYRNFFALKGLTTSRGEPVQGVYGFAKSLLKALKEDGDVVIVVFDAKAPSFRHEAYEAYKAGRAPTPEDFPRQLALMKELVDLLGLERLEVPGFEADDVLATLAKKAEREGYEVHILTADRDLFQLLSPRISVLHPEGHRITPEWLWEKYGLRPEQWVDFRALAGDPSDNIPGVKGIGEKTALKLLKEWGSLENLLKNLDQVKPASVREKILAHLEDLKLSRELSRVRTDLPLEVDFRGRREPDWEGLKAFLERLEFGSLLHEFGLLESPLPAEEAPWPPPEGAFLGYRLSRPEPMWAELLALAASAQGRVYRAEDPHGALRGLKEVRGLLAKDLAVVALREGLDLPPTDDPMLLAYLLDSSNTTPEGVARRYGGEWTEDAGERALLAERLHANLLGRLQGEERLLWLYEEVEKPLSRVLAHMEATGVKLDVAYLEALSLEVAAEMRRLEEEVFRLAGHSFNLNSRDQLERVLFDELGLPPITKTEKTGKRSTSAAVLEALREVHPIVDKILQYRELAKLKGTYIDPLPALVHPKTGRLHTRFNQTATATGRLSSSDPNLQNIPVRTPLGQKIRKAFVAEEGWRLVALDYSQIELRVLAHLSGDENLIRVFQEGRDIHTQTASWMFGLSAEAIDPLMRRAAKTINFGVLYGMSAHRLSQELGIPYEEAAAFIQRYFQSYPKVKAWIEKTLEEGRTRGYVETLFGRRRYVPDLNARVKSVREAAERMAWNMPVQGTAADLMKLAMVRLFPQLREVGARMLLQVHDELLLEAPKERAEEVAALAKEVMEGVWPLAVPLEVEVGIGEDWLAAKG

SEQ ID NO: 309 - DNA, 2529 bp, synthetic construct
  misc_feature 1..2529: note = Variant of DNA polymerase I from Thermus sp. strain 2.9
  source 1..2529: mol_type = other DNA
atgcaccatcatcatcatcatggcggtagcggcatgttaccgttgttcgaacctaaaggtcgcgtgcttctggttgatggccatcatctcgcgtatcgtaacttctttgccctgaaaggattaaccaccagccgtggcgagccggtacagggtgtctacggctttgcaaagtcgctcctgaaagctctgaaagaagacggtgatgtggtgattgttgtctttgatgcgaaagcgccaagttttcgccacgaagcgtacgaagcttacaaagccgggcgtgctccaacgccggaagactttcctcgccaattggcgcttatgaaggaattagtggatttgcttggcctcgaacgcttggaagttcccggtttcgaggcagacgacgtattagcgactctcgcaaagaaagccgaacgtgagggctatgaagtccagatcttgacagcagatcgcgatcttttccagcttttatctccgcgcatttccgtgttacacccggaagggcatcgcatcaccccggaatggctctgggagaaatatggtttgcgtcccgaacaatgggtggattttcgcgccttagcaggcgatccgagcgacaatattccgggagttaaaggtatcggcgagaagacggcgctcaagctccttaaagaatgggggtcgttggagaacttgcttaagaatttagatcaggtcaaaccagcgtcagtgcgtgagaagattcttgcacacctcgaagacctcaaattaagccgcgaattgtcccgtgtacgcaccgatttgccgctcgaagttgatttccgtggccgccgcgaacctgactgggagggtcttaaagcgtttttagagcgtcttgaatttggttcgctcttgcatgaattcggccttttagaaagcccgttaccagccgaagaagcaccttggccaccgcccgaaggcgcgtttttaggttacgttttgagtcgcccggaaccgatgtgggccgaattattggctcttgcagcgtctgcccagggacgtgtgtatcgcgcggaagaccctcatggtgcgctcaaaggcctcaaagaagtccgtggactccttgccaaagacttagctgttgttgcattgcgcgaaggtcttgatttacctccgactgatgatccaatgcttcttgcgtacctcttggacccgtcaaacacgacgcccgaaggcgtagcccgtcgttacggcggcgagtggaccgaagatgcagccgagcgcgcgttattggccgaacgtttgcacgccaatttattaggacgtttgcaaggcgaggaaaagctcctctggctttacgaagaagtggagaaaccattgagtcgcgtgctcgcgcatatggaagctaccggtgtcaaattagacgtggcgtatttggaggcactcagccttgaagttgctgccgaaatgcgccgcttggaggaagaagtattccgtttagcaggccactcctttaaccttaattctcgcgatcagttagaacgtgtgttgttcgatgaacttggtctccctcctatcggcaagacagagaagaccggtaaacgtagcacttcagcggcggttttagaagctcttcgcgaagtccatcccattgtggacaagatcttgcagtaccgcgaactcgcgaaattgaaaggcacctatattgaccctcttccggcattagtccacccgaaaacgggacgcctccatacccgcttcaaccaaacagccacggcgaccggtcgtttgtcctcctctgatccaaaccttcagaatattccagtacgtaccccattgggccagaagatccgcaaagcgtttgtagctgaggagggttggcgtttagtggccctcgattatagccaaattgaattacgtgtccttgcccatctttctggcgatgagaacctcatccgcgtgtttcaggaaggccgcgacattcacactcaaacggcaagctggatgtttggattatcagctgaagcgatcgatcctttgatgcgtcgtgcagcgaagaccattaatttcggtgttctctacggtatgagtgcccatcgtttgtcgcaggaattaggcattccctatgaagaagctgtggcgttcattcagcgctactttcaaagctatcccaaagttaaagcatggatcgagaagactctcgaagaaggccgcacacgtggttacgtagagaccttatttggacgtcgccgctatgttcccgatttaaacgctcgcgtgaaatctgtccgtgaagccgccgaacgcatggcgttcaacatgcctgtacagggcacggcagctgacctcatgaaacttgcaatggtgcgcctttttccacaattgcgtgaagttggtgcccgcatgctcttgcaggtccacgatgaactcttgttagaagcgccaaaagagcgtgcggaagaggtggcagccctcgcgaaagaggttatggaaggcgtgtggcccttagcggtgcctcttgaagtcgaagttggtattggcgaggattggttggctgccaaaggataatga

SEQ ID NO: 310 - protein, 841 aa, synthetic construct
  REGION 1..841: note = Variant of DNA polymerase I from Thermus sp. strain 2.9
MHHHHHHGGSGMLPLFEPKGRVLLVDGHHLAYRNFFALKGLTTSRGEPVQGVYGFAKSLLKALKEDGDVVIVVFDAKAPSFRHEAYEAYKAGRAPTPEDFPRQLALMKELVDLLGLERLEVPGFEADDVLATLAKKAEREGYEVQILTADRDLFQLLSPRISVLHPEGHRITPEWLWEKYGLRPEQWVDFRALAGDPSDNIPGVKGIGEKTALKLLKEWGSLENLLKNLDQVKPASVREKILAHLEDLKLSRELSRVRTDLPLEVDFRGRREPDWEGLKAFLERLEFGSLLHEFGLLESPLPAEEAPWPPPEGAFLGYVLSRPEPMWAELLALAASAQGRVYRAEDPHGALKGLKEVRGLLAKDLAVVALREGLDLPPTDDPMLLAYLLDPSNTTPEGVARRYGGEWTEDAAERALLAERLHANLLGRLQGEEKLLWLYEEVEKPLSRVLAHMEATGVKLDVAYLEALSLEVAAEMRRLEEEVFRLAGHSFNLNSRDQLERVLFDELGLPPIGKTEKTGKRSTSAAVLEALREVHPIVDKILQYRELAKLKGTYIDPLPALVHPKTGRLHTRFNQTATATGRLSSSDPNLQNIPVRTPLGQKIRKAFVAEEGWRLVALDYSQIELRVLAHLSGDENLIRVFQEGRDIHTQTASWMFGLSAEAIDPLMRRAAKTINFGVLYGMSAHRLSQELGIPYEEAVAFIQRYFQSYPKVKAWIEKTLEEGRTRGYVETLFGRRRYVPDLNARVKSVREAAERMAFNMPVQGTAADLMKLAMVRLFPQLREVGARMLLQVHDELLLEAPKERAEEVAALAKEVMEGVWPLAVPLEVEVGIGEDWLAAKG

SEQ ID NO: 311 - DNA, 2529 bp, synthetic construct
  misc_feature 1..2529: note = Variant of DNA polymerase I from Thermus sp. strain 2.9
  source 1..2529: mol_type = other DNA
atgcaccatcatcatcatcatggcggtagcggcatgttaccgttgttcgaacctaaaggtcgcgtgcttctggttgatggccatcatctcgcgtatcgtaacttctttgccctgaaaggattaaccaccagccgtggcgagccggtacagggtgtctacggctttgcaaagtcgctcctgaaagctctgaaagaagacggtgatgtggtgattgttgtctttgatgcgaaagcgccaagttttcgccacgaagcgtacgaagcttacaaagccgggcgtgctccaacgccggaagactttcctcgccaattggcgcttatgaaggaattagtggatttgcttggcctcgaacgcttggaagttcccggtttcgaggcagacgacgtattagcgactctcgcaaagaaagccgaacgtgagggctatgaagtccagatcttgacagcagatcgcgatcttttccagcttttatctccgcgcatttccgtgttacacccggaagggcatcgtatcaccccggaatggctctgggagaaatatggtttgcgtcccgaacaatgggtggattttcgcgccttagcgggcgatccgagcgacaatattccgggagttaaaggtatcggcgagaagacggcgctcaagctccttaaagaatgggggtcgttggagaacttgcttaagaatttagatcaggtcaaaccagcttcagtgcgtgagaagattcttgcacacctcgaagacctcaaattaagccgcgaattgtcccgtgtacgcaccgatttgccgctcgaagttgatttccgtggccgccgcgaacctgactgggagggtcttaaagcgtttttagagcgtcttgaatttggttcgctcttgcatgaattcggccttttagaaagcccgttaccagccgaagaagcaccttggccaccgcccgaaggcgcgtttttaggttaccgtttgagtcgcccggaaccgatgtgggccgaattattggctcttgcagcgtctgcccagggacgtgtgtatcgcgcggaagaccctcatggtgcgctccgtggcctcaaagaagtccgtggactccttgccaaagacttagctgttgttgcattgcgcgaaggtcttgatttacctccgactgatgatccaatgcttcttgcgtacctcttggacccgtcaaacacgacgcccgaaggcgtagcccgtcgttacggcggcgagtggaccgaagatgcaggtgagcgcgcgttattggccgaacgtttgcacgccaattttttaggacgtttgcaaggcgaggaacgtctcctctggctttacgaagaagtggagaaaccattgagtcgcgtgctcgcgcatatggaagctaccggtgtcaaattagacgtggcgtatttggaggcactcagccttgaagttgctgccgaaatgcgccgcttggaggaagaagtattccgtttagcaggccactcctttaaccttaattctcgcgatcagttagaacgtgtgttgttcgatgaacttggtctccctcctatcggcaagacagagaagaccggtaaacgtagcacttcagcggcggttttagaagctcttcgcgaagtccatcccattgtggacaagatcttgcagtaccgcgaactcgcgaaattgaaaggcacctatattgaccctcttccggcattagtccacccgaaaacgggacgcctccatacccgcttcaaccaaacagccacggcgaccggtcgtttgtcctcctctgatccaaaccttcagaatattccagtacgtaccccattgggccagaagatccgcaaagcgtttgtagctgaggagggttggcgtttagtggccctcgattatagccaaattgaattacgtgtccttgcccatctttctggcgatgagaacctcatccgcgtgtttcaggaaggccgcgacattcacactcaaacggcaagctggatgtttggattatcagctgaagcgatcgatcctttgatgcgtcgtgcagcgaagaccatcaatttcggtgttctctacggtatgagtgcccatcgtttgtcgcaggaattaggcattccctatgaagaagctgcggcgttcattcagcgctactttcaaagctatcccaaagttaaagcatggatcgagaagactctcgaagaaggccgcacacgtggttacgtagagaccttatttggacgtcgccgctatgttcccgatttaaacgctcgcgtgaaatctgtccgtgaagccgccgaacgcatggcgttcaacatgcctgtacagggcacggcagctgacctcatgaaacttgcaatggtgcgcctttttccacaattgcgtgaagttggtgcccgcatgctcttgcaggtccacgatgaactcttgttagaagcgccaaaagagcgtgcggaagaggtggcagccctcgcgaaagaggttatggaaggcgtgtggcccttagcggtgcctcttgaagtcgaagttggtattggcgaggattggttggctgccaaaggataatga

SEQ ID NO: 312 - protein, 841 aa, synthetic construct
  REGION 1..841: note = Variant of DNA polymerase I from Thermus sp. strain 2.9
MHHHHHHGGSGMLPLFEPKGRVLLVDGHHLAYRNFFALKGLTTSRGEPVQGVYGFAKSLLKALKEDGDVVIVVFDAKAPSFRHEAYEAYKAGRAPTPEDFPRQLALMKELVDLLGLERLEVPGFEADDVLATLAKKAEREGYEVQILTADRDLFQLLSPRISVLHPEGHRITPEWLWEKYGLRPEQWVDFRALAGDPSDNIPGVKGIGEKTALKLLKEWGSLENLLKNLDQVKPASVREKILAHLEDLKLSRELSRVRTDLPLEVDFRGRREPDWEGLKAFLERLEFGSLLHEFGLLESPLPAEEAPWPPPEGAFLGYRLSRPEPMWAELLALAASAQGRVYRAEDPHGALRGLKEVRGLLAKDLAVVALREGLDLPPTDDPMLLAYLLDPSNTTPEGVARRYGGEWTEDAGERALLAERLHANFLGRLQGEERLLWLYEEVEKPLSRVLAHMEATGVKLDVAYLEALSLEVAAEMRRLEEEVFRLAGHSFNLNSRDQLERVLFDELGLPPIGKTEKTGKRSTSAAVLEALREVHPIVDKILQYRELAKLKGTYIDPLPALVHPKTGRLHTRFNQTATATGRLSSSDPNLQNIPVRTPLGQKIRKAFVAEEGWRLVALDYSQIELRVLAHLSGDENLIRVFQEGRDIHTQTASWMFGLSAEAIDPLMRRAAKTINFGVLYGMSAHRLSQELGIPYEEAAAFIQRYFQSYPKVKAWIEKTLEEGRTRGYVETLFGRRRYVPDLNARVKSVREAAERMAFNMPVQGTAADLMKLAMVRLFPQLREVGARMLLQVHDELLLEAPKERAEEVAALAKEVMEGVWPLAVPLEVEVGIGEDWLAAKG

SEQ ID NO: 313 - DNA, 2529 bp, synthetic construct
  misc_feature 1..2529: note = Variant of DNA polymerase I from Thermus sp. strain 2.9
  source 1..2529: mol_type = other DNA
atgcaccatcatcatcatcatggcggtagcggcatgttaccgttgttcgaacctaaaggtcgcgtgcttctggttgatggccatcatctcgcgtatcgtaacttctttgccctgaaaggattaaccaccagccgtggcgagccggtacagggtgtctacggctttgcaaagtcgctcctgaaagctctgaaagaagacggtgatgtggtgattgttgtctttgatgcgaaagcgccaagttttcgccacgaagcgtacgaagcttacaaagccgggcgtgctccaacgccggaagactttcctcgccaattggcgcttatgaaggaattagtggatttgcttggcctcgaacgcttggaagttcccggtttcgaggcagacgacgtattagcgactctcgcaaagaaagccgaacgtgagggctatgaagtccagatcttgacagcagatcgcgatcttttccagcttttatctccgcgcgtcgcggtgttacacccggaagggcatcgtatcaccccggaatggctctgggagaaatatggtttgcgtcccgaacaatgggtggattttcgcgccttagtaggcgatccgagcgacaatattccgggagttaaaggtatcggcgagaagacggcgctcaagctccttaaagaatgggggtcgttggagaacttgcttaagaatttagatcaggtcaaaccagcgtcagtgcgtgagaagattcttgcacacctcgaagacctcaaattaagccgcgaattgtcccgtgtacgcaccgatttgccgctcgaagttgatttccgtcgccgccgcgaacctgactgggagggtcttaaagcgtttttagagcgtcttgaatttggttcgctcttgcatgaattcggccttttagaaagcccgttaccagccgaagaagcaccttggccaccgcccgaaggcgcgtttttaggttaccgtttgagtcgcccggaaccgatgtgggccgaattattggctcttgcagcgtctgcccagggacgtgtgtatcgcgcggaagaccctcatggtgcgctccgtggcctcaaagaagtccgtggactccttgccaaagacttagctgttgttgcattgcgcgaaggtcttgatttacctccgactgatgatccaatgcttcttgcgtacctcttggacccgtcaaacacgacgcccgaaggcgtagcccgtcgttacggcggcgagtggaccgaagatgcaggtgagcgcgcgttattggccgaacgtttgcacgccaatttattaggacgtttgcaaggcgaggaacgtctcctctggctttacgaagaagtggagaaaccattgagtcgcgtgctcgcgcatatggaagctaccggtgtcaaattagacgtggcgtatttggaggcactcagccttgaagttgctgccgaaatgcgccgcttggaggaagaagtattccgtttagcaggccactcctttaaccttaattctcgcgatcagttagaacgtgtgttgttcgatgaacttggtctccctcctatcggcaagacagagaagaccggtaaacgtagcacttcagcggcggttttagaagctcttcgcgaagtccatcccattgtggacaagatcttgcagtaccgcgaactcgcgaaattgaaaggcacctatattgaccctcttccggcattagtccacccgaaaacgggacgcctccatacccgcttcaaccaaacagccacggcgaccggtcgtttgtcctcctctgatccaaaccttcagaatattccagtacgtaccccattgggccagaagatccgccgcgcgtttgtagctgaggagggttggcgtttagtggccctcgattatagccaaattgaattacgtgtccttgcccatctttctggcgatgagaacctcatccgcgtgtttcaggaaggccgtgacattcacactcaaacggcaagctggatgtttggattatcgccggaagcgatcgatcctttgatgcgtcgtgcagcgaagaccatcaatttcggtgttctctacggtatgagtgcccatcgtttgtcgcaggaattaggcattccctatgaagaagctgcggcgttcattcagcgctactttcaaagctatcccaaagttaaagcatggatcgagaagactctcgaagaaggccgcacacgtggttacgtagagaccttatttggacgtcgccgctatgttcccgatttaaacgctcgcgtgaaatctgtccgtgaagccgccgaacgcatggcgttcaacatgcctgtacagggcacggcagctgacctcatgaaacttgcaatggtgcgcctttttccacaattgcgtgaagttggtgcccgcatgctcttgcaggtccacgatgaactcttgttagaagcgccaaaagagcgtgcggaagaggtggcagccctcgcgaaagaggttatggaaggcgtgtggcccttagcggtgcctcttgaagtcgaagttggtattggcgaggattggttggctgccaaaggataatga

SEQ ID NO: 314 - protein, 841 aa, synthetic construct
  REGION 1..841: note = Variant of DNA polymerase I from Thermus sp. strain 2.9
MHHHHHHGGSGMLPLFEPKGRVLLVDGHHLAYRNFFALKGLTTSRGEPVQGVYGFAKSLLKALKEDGDVVIVVFDAKAPSFRHEAYEAYKAGRAPTPEDFPRQLALMKELVDLLGLERLEVPGFEADDVLATLAKKAEREGYEVQILTADRDLFQLLSPRVAVLHPEGHRITPEWLWEKYGLRPEQWVDFRALVGDPSDNIPGVKGIGEKTALKLLKEWGSLENLLKNLDQVKPASVREKILAHLEDLKLSRELSRVRTDLPLEVDFRRRREPDWEGLKAFLERLEFGSLLHEFGLLESPLPAEEAPWPPPEGAFLGYRLSRPEPMWAELLALAASAQGRVYRAEDPHGALRGLKEVRGLLAKDLAVVALREGLDLPPTDDPMLLAYLLDPSNTTPEGVARRYGGEWTEDAGERALLAERLHANLLGRLQGEERLLWLYEEVEKPLSRVLAHMEATGVKLDVAYLEALSLEVAAEMRRLEEEVFRLAGHSFNLNSRDQLERVLFDELGLPPIGKTEKTGKRSTSAAVLEALREVHPIVDKILQYRELAKLKGTYIDPLPALVHPKTGRLHTRFNQTATATGRLSSSDPNLQNIPVRTPLGQKIRRAFVAEEGWRLVALDYSQIELRVLAHLSGDENLIRVFQEGRDIHTQTASWMFGLSPEAIDPLMRRAAKTINFGVLYGMSAHRLSQELGIPYEEAAAFIQRYFQSYPKVKAWIEKTLEEGRTRGYVETLFGRRRYVPDLNARVKSVREAAERMAFNMPVQGTAADLMKLAMVRLFPQLREVGARMLLQVHDELLLEAPKERAEEVAALAKEVMEGVWPLAVPLEVEVGIGEDWLAAKG

SEQ ID NO: 315 - DNA, 2529 bp, synthetic construct
  misc_feature 1..2529: note = Variant of DNA polymerase I from Thermus sp. strain 2.9
  source 1..2529: mol_type = other DNA
atgcaccatcatcatcatcatggcggtagcggcatgttaccgttgttcgaacctaaaggtcgcgtgcttctggttgatggccatcatctcgcgtatcgtaacttctttgccctgaaaggattaaccaccagccgtggcgagccggtacagggtgtctacggctttgcaaagtcgctcctgaaagctctgaaagaagacggtgatgtggtgattgttgtctttgatgcgaaagcgccaagttttcgccacgaagcgtacgaagcttacaaagccgggcgtgctccaacgccggaagactttcctcgccaattggcgcttatgaaggaattagtggatttgcttggcctcgaacgcttggaagttcccggtttcgaggcagacgacgtattagcgactctcgcaaagaaagccgaacgtgagggctatgaagtccagatcttgacagcagatcgcgatcttttccagcttttatctccgcgcatttccgtgttacacccggaagggcatcgcatcaccccggaatggctctgggagaaatatggtttgcgtcccgaacaatgggtggattttcgcgccttagcgggcgatccgagcgacaatattccgggagttaaaggtatcggcgagaagacggcgctcaagctccttaaagaatgggggtcgttggagaacttgcttaagaatttagatcaggtcaaaccagcttcagtgcgtgagaagattcttgcacacctcgaagacctcaaattaagccgcgaattgtcccgtgtacgcaccgatttgccgctcgaagttgatttccgtggccgccgcgaacctgactgggagggtcttaaagcgtttttagagcgtcttgaatttggttcgctcttgcatgaattcggccttttagaaagcccgttaccagccgaagaagcaccttggccaccgcccgaaggcgcgtttttaggttaccgtttgagtcgcccggaaccgatgtgggccgaattattggctcttgcagcgtctgcccagggacgtgtgtatcgcgcggaagaccctcatggtgcgctccgtggcctcaaagaagtccgtggactccttgccaaagacttagctgttgttgcattgcgcgaaggtcttgatttacctccgactgatgatccaatgcttcttgcgtacctcttggacccgtcaaacacgacgcccgaaggcgtagcccgtcgttacggcggcgagtggaccgaagatgcaggcgagcgcgcgttattggccgaacgtttgcacgccaatttattaggacgtttgcaaggcgaggaacgtctcctctggctttacgaagaagtggagaaaccattgagtcgcgtgctcgcgcatatggaagctaccggtgtcaaattagacgtggcgtatttggaggcactcagccttgaagttgctgccgaaatgcgccgcttggaggaagaagtattccgtttagcaggccactcctttaaccttaattctcgcgatcagttagaacgtgtgttgttcgatgaacttggtctccctcctatcggcaagacagagaagaccggtaaacgtagcacttcagcggcggttttagaagctcttcgcgaagtccatcccattgtggacaagatcttgcagtaccgcgaactcgcgaaattgaaaggcacctatattgaccctcttccggcattagtccacccgaaaacgggacgcctccatacccgcttcaaccaaacagccacggcgaccggtcgtttgtcctcctctgatccaaaccttcagaatattccagtacgtaccccattgggccagaagatccgcaaagcgtttgtagctgaggagggttggcgtttagtggccctcgattatagccaaattgaattacgtgtccttgcccatctttctggcgatgagaacctcatccgcgtgtttcaggaaggcaaagacattcacactcaaacggcaagctggatgtttggattaccggcggaagcgatcgatcctttgatgcgtcgtgcagcgaagaccatcaatttcggtgttctctacggtatgagtgcccatcgtttgtcgcaggaattaggcattccctatgaagaagctgcggcgttcattcagcgctactttcaaagctatcccaaagttaaagcatggatcgagaagactctcgaagaaggccgcacacgtggttacgtagagaccttatttggacgtcgccgctatgttcccgatttaaacgctcgcgtgaaatctgtccgtgaagccgccgaacgcatggcgttcaacatgcctgtacagggcacggcagctgacctcatgaaacttgcaatggtgcgcctttttccacaattgcgtgaagttggtgcccgcatgctcttgcaggtccacgatgaactcttgttagaagcgccaaaagagcgtgcggaagaggtggcagccctcgcgaaagaggttatggaaggcgtgtggcccttagcggtgcctcttgaagtcgaagttggtattggcgaggattggttggctgccaaaggataatga

SEQ ID NO: 316 - protein, 841 aa, synthetic construct
  REGION 1..841: note = Variant of DNA polymerase I from Thermus sp. strain 2.9
MHHHHHHGGSGMLPLFEPKGRVLLVDGHHLAYRNFFALKGLTTSRGEPVQGVYGFAKSLLKALKEDGDVVIVVFDAKAPSFRHEAYEAYKAGRAPTPEDFPRQLALMKELVDLLGLERLEVPGFEADDVLATLAKKAEREGYEVQILTADRDLFQLLSPRISVLHPEGHRITPEWLWEKYGLRPEQWVDFRALAGDPSDNIPGVKGIGEKTALKLLKEWGSLENLLKNLDQVKPASVREKILAHLEDLKLSRELSRVRTDLPLEVDFRGRREPDWEGLKAFLERLEFGSLLHEFGLLESPLPAEEAPWPPPEGAFLGYRLSRPEPMWAELLALAASAQGRVYRAEDPHGALRGLKEVRGLLAKDLAVVALREGLDLPPTDDPMLLAYLLDPSNTTPEGVARRYGGEWTEDAGERALLAERLHANLLGRLQGEERLLWLYEEVEKPLSRVLAHMEATGVKLDVAYLEALSLEVAAEMRRLEEEVFRLAGHSFNLNSRDQLERVLFDELGLPPIGKTEKTGKRSTSAAVLEALREVHPIVDKILQYRELAKLKGTYIDPLPALVHPKTGRLHTRFNQTATATGRLSSSDPNLQNIPVRTPLGQKIRKAFVAEEGWRLVALDYSQIELRVLAHLSGDENLIRVFQEGKDIHTQTASWMFGLPAEAIDPLMRRAAKTINFGVLYGMSAHRLSQELGIPYEEAAAFIQRYFQSYPKVKAWIEKTLEEGRTRGYVETLFGRRRYVPDLNARVKSVREAAERMAFNMPVQGTAADLMKLAMVRLFPQLREVGARMLLQVHDELLLEAPKERAEEVAALAKEVMEGVWPLAVPLEVEVGIGEDWLAAKG

SEQ ID NO: 317 - DNA, 2529 bp, synthetic construct
  misc_feature 1..2529: note = Variant of DNA polymerase I from Thermus sp. strain 2.9
  source 1..2529: mol_type = other DNA
atgcaccatcatcatcatcatggcggtagcggcatgttaccgttgttcgaacctaaaggtcgcgtgcttctggttgatggccatcatctcgcgtatcgtaacttctttgccctgaaaggattaaccaccagccgtggcgagccggtacagggtgtctacggctttgcaaagtcgctcctgaaagctctgaaagaagacggtgatgtggtgattgttgtctttgatgcgaaagcgccaagttttcgccacgaagcgtacgaagcttacaaagccgggcgtgctccaacgccggaagactttcctcgccaattggcgcttatgaaggaattagtggatttgcttggcctcgaacgcttggaagttcccggtttcgaggcagacgacgtattagcgactctcgcaaagaaagccgaacgtgagggctatgaagtccagatcttgacagcagatcgcgatcttttccagcttttatctccgcgcatttccgtgttacacccggaagggcatcgtatcaccccggaatggctctgggagaaatatggtttgcgtcccgaacaatgggtggattttcgcgccttagcgggcgatccgagcgacaatattccgggagttaaaggtatcggcgagaagacggcgctcaagctccttaaagaatgggggtcgttggagaacttgcttaagaatttagatcaggtcaaaccagcttcagtgcgtgagaagattcttgcacacctcgaagacctcaaattaagccgcgaattgtcccgtgtacgcaccgatttgccgctcgaagttgatttccgtggccgccgcgaacctgactgggagggtcttaaagcgtttttagagcgtcttgaatttggttcgctcttgcatgaattcggccttttagaaagcccgttaccagccgaagaagcaccttggccaccgcccgaaggcgcgtttttaggttaccgtttgagtcgcccggaaccgatgtgggccgaattattggctcttgcagcgtctgcccagggacgtgtgtatcgcgcggaagaccctcatggtgcgctccgtggcctcaaagaagtccgtggactccttgccaaagacttagctgttgttgcattgcgcgaaggtcttgatttacctccgactgatgatccaatgcttcttgcgtacctcttggacccgtcaaacacgacgcccgaaggcgtagcccgtcgttacggcggcgagtggaccgaagatgcaggtgagcgcgcgttattggccgaacgtttgcacgtgaatttattaggacgtttgcaaggcgaggaacgtctcctctggctttacgaagaagtggagaaaccattgagtcgcgtgctcgcgcatatggaagctaccggtgtcaaattagacgtggcgtatttggaggcactcagccttgaagttgctgccgaaatgcgccgcttggaggaagaagtattccgtttagcaggccactcctttaaccttaattctcgcgatcagttagaacgtgtgttgttcgatgaacttggtctccctcctatcggcaagacagagaagaccggtaaacgtagcacttcagcggcggttttagaagctcttcgcgaagtccatcccattgtggacaagatcttgcagtaccgcgaactcgcgaaattgaaaggcacctatattgaccctcttccggcattagtccacccgaaaacgggacgcctccatacccgcttcaaccaaacagccacggcgaccggtcgtttgtcctcctctgatccaaaccttcagaatattccagtacgtaccccattgggccagaagatccgcaaagcgtttgtagctgaggagggttggcgtttagtggccctcgattatagccaaattgaattacgtgtccttgcccatctttctggcgatgagaacctcatccgcgtgtttcaggaaggccgcgacattcacactcaaacggcaagctggatgtttggattatcagctgaagcgatcgatcctttgatgcgtcgtgcagcgaagaccatcaatttcggtgttctctacggtatgagtgcccatcgtttgtcgcaggaattaggcattccctatgaagaagctgcggcgttcattcagcgctactttcaaagctatcccaaagttaaagcatggatcgagaagactctcgaagaaggccgcacacgtggttacgtagagaccttatttggacgtcgccgctatgttcccgatttaaacgctcgcgtgaaatctgtccgtgaagccgccgaacgcatggcgttcaacatgcctgtacagggcacggcagctgacctcatgaaacttgcaatggtgcgcctttttccacaattgcgtgaagttggtgcccgcatgctcttgcaggtccacgatgaactcttgttagaagcgccaaaagagcgtgcggaagaggtggcagccctcgcgaaagaggttatggaaggcgtgtggcccttagcggtgcctcttgaagtcgaagttggtattggcgaggattggttggctgccaaaggataatga

SEQ ID NO: 318 - protein, 841 aa, synthetic construct
  REGION 1..841: note = Variant of DNA polymerase I from Thermus sp. strain 2.9
MHHHHHHGGSGMLPLFEPKGRVLLVDGHHLAYRNFFALKGLTTSRGEPVQGVYGFAKSLLKALKEDGDVVIVVFDAKAPSFRHEAYEAYKAGRAPTPEDFPRQLALMKELVDLLGLERLEVPGFEADDVLATLAKKAEREGYEVQILTADRDLFQLLSPRISVLHPEGHRITPEWLWEKYGLRPEQWVDFRALAGDPSDNIPGVKGIGEKTALKLLKEWGSLENLLKNLDQVKPASVREKILAHLEDLKLSRELSRVRTDLPLEVDFRGRREPDWEGLKAFLERLEFGSLLHEFGLLESPLPAEEAPWPPPEGAFLGYRLSRPEPMWAELLALAASAQGRVYRAEDPHGALRGLKEVRGLLAKDLAVVALREGLDLPPTDDPMLLAYLLDPSNTTPEGVARRYGGEWTEDAGERALLAERLHVNLLGRLQGEERLLWLYEEVEKPLSRVLAHMEATGVKLDVAYLEALSLEVAAEMRRLEEEVFRLAGHSFNLNSRDQLERVLFDELGLPPIGKTEKTGKRSTSAAVLEALREVHPIVDKILQYRELAKLKGTYIDPLPALVHPKTGRLHTRFNQTATATGRLSSSDPNLQNIPVRTPLGQKIRKAFVAEEGWRLVALDYSQIELRVLAHLSGDENLIRVFQEGRDIHTQTASWMFGLSAEAIDPLMRRAAKTINFGVLYGMSAHRLSQELGIPYEEAAAFIQRYFQSYPKVKAWIEKTLEEGRTRGYVETLFGRRRYVPDLNARVKSVREAAERMAFNMPVQGTAADLMKLAMVRLFPQLREVGARMLLQVHDELLLEAPKERAEEVAALAKEVMEGVWPLAVPLEVEVGIGEDWLAAKG

SEQ ID NO: 319 - DNA, 2529 bp, synthetic construct
  misc_feature 1..2529: note = Variant of DNA polymerase I from Thermus sp. strain 2.9
  source 1..2529: mol_type = other DNA
atgcaccatcatcatcatcatggcggtagcggcatgttaccgttgttcgaacctaaaggtcgcgtgcttctggttgatggccatcatctcgcgtatcgtaacttctttgccctgaaaggattaaccaccagccgtggcgagccggtacagggtgtctacggctttgcaaagtcgctcctgaaagctctgaaagaagacggtgatgtggtgattgttgtctttgatgcgaaagcgccaagttttcgccacgaagcgtacgaagcttacaaagccgggcgtgctccaacgccggaagactttcctcgccaattggcgcttatgaaggaattagtggatttgcttggcctcgaacgcttggaagttcccggtttcgaggcagacgacgtattagcgactctcgcaaagaaagccgaacgtgagggctatgaagtccagatcttgacagcagatcgcgatcttttccagcttttatctccgcgcatctcggtgttacacccggaagggcatcgtatcaccccggaatggctctgggagaaatatggtttgcgtcccgaacaatgggtggattttcgcgccttagcgggcgatccgagcgacaatattccgggagttaaaggtatcggcgagaagacggcgctcaagctccttaaagaatgggggtcgttggagaacttgcttaagaatttagatcaggtcaaaccagcgtcagtgcgtgagaagattcttgcacacctcgaagacctcaaattaagccgcgaattgtcccgtgtacgcaccgatttgccgctcgaagttgatttccgtggccgccgcgaacctgactgggagggtcttaaagcgtttttagagcgtcttgaatttggttcgctcttgcatgaattcggccttttagaaagcccgttaccagccgaagaagcaccttggccaccgcccgaaggcgcgtttttaggttaccgtttgagtcgcccggaaccgatgtgggccgaattattggctcttgcagcgtctgcccagggacgtgtgtatcgcgcggaagaccctcatggtgcgctcaaaggcctcaaagaagtccgtggactccttgccaaagacttagctgttgttgcattgcgcgaaggtcttgatttacctccgactgatgatccaatgcttcttgcgtacctcttggacccgtcaaacacgacgcccgaaggcgtagcccgtcgttacggcggcgagtggaccgaagatgcaggcgagcgcgcgttattggccgaacgtttgcacgccaatttattaggacgtttgcaaggcgaggaacgtctcctctggctttacgaagaagtggagaaaccattgagtcgcgtgctcgcgcatatggaagctaccggtgtcaaattagacgtggcgtatttggaggcactcagccttgaagttgctgccgaaatgcgccgcttggaggaagaagtattccgtttagcaggccactcctttaaccttaattctcgcgatcagttagaacgtgtgttgttcgatgaacttggtctccctcctatcggcaagacagagaagaccggtaaacgtagcacttcagcggcggttttagaagctcttcgcgaagtccatcccattgtggacaagatcttgcagtaccgcgaactcgcgaaattgaaaggcacctatattgaccctcttccggcattagtccacccgaaaacgggacgcctccatacccgcttcaaccaaacagccacggcgaccggtcgtttgtcctcctctgatccaaaccttcagaatattccagtacgtaccccattgggccagaagatccgccgcgcgtttgtagctgaggagggttggcgtttagtggccctcgattatagccaaattgaattacgtgtccttgcccatctttctggcgatgagaacctcatccgcgtgtttcaggaaggccgtgacattcacactcaaacggcaagctggatgtttggattaccggcggaagcgatcgatcctttgatgcgtcgtgcagcgaagaccattaatttcggtgttctctacggtatgagtgcccatcgtttgtcgcaggaattaggcattccctatgaagaagctgcggcgttcattcagcgctactttcaaagctatcccaaagttaaagcatggatcgagaagactctcgaagaaggccgcacacgtggttacgtagagaccttatttggacgtcgccgctatgttcccgatttaaacgctcgcgtgaaatctgtccgtgaagccgccgaacgcatggcgttcaacatgcctgtacagggcacggcagctgacctcatgaaacttgcaatggtgcgcctttttccacaattgcgtgaagttggtgcccgcatgctcttgcaggtccacgatgaactcttgttagaagcgccaaaagagcgtgcggaagaggtggcagccctcgcgaaagaggttatggaaggcgtgtggcccttagcggtgcctcttgaagtcgaagttggtattggcgaggattggttggctgccaaaggataatga

SEQ ID NO: 320 - protein, 841 aa, synthetic construct
  REGION 1..841: note = Variant of DNA polymerase I from Thermus sp. strain 2.9
MHHHHHHGGSGMLPLFEPKGRVLLVDGHHLAYRNFFALKGLTTSRGEPVQGVYGFAKSLLKALKEDGDVVIVVFDAKAPSFRHEAYEAYKAGRAPTPEDFPRQLALMKELVDLLGLERLEVPGFEADDVLATLAKKAEREGYEVQILTADRDLFQLLSPRISVLHPEGHRITPEWLWEKYGLRPEQWVDFRALAGDPSDNIPGVKGIGEKTALKLLKEWGSLENLLKNLDQVKPASVREKILAHLEDLKLSRELSRVRTDLPLEVDFRGRREPDWEGLKAFLERLEFGSLLHEFGLLESPLPAEEAPWPPPEGAFLGYRLSRPEPMWAELLALAASAQGRVYRAEDPHGALKGLKEVRGLLAKDLAVVALREGLDLPPTDDPMLLAYLLDPSNTTPEGVARRYGGEWTEDAGERALLAERLHANLLGRLQGEERLLWLYEEVEKPLSRVLAHMEATGVKLDVAYLEALSLEVAAEMRRLEEEVFRLAGHSFNLNSRDQLERVLFDELGLPPIGKTEKTGKRSTSAAVLEALREVHPIVDKILQYRELAKLKGTYIDPLPALVHPKTGRLHTRFNQTATATGRLSSSDPNLQNIPVRTPLGQKIRRAFVAEEGWRLVALDYSQIELRVLAHLSGDENLIRVFQEGRDIHTQTASWMFGLPAEAIDPLMRRAAKTINFGVLYGMSAHRLSQELGIPYEEAAAFIQRYFQSYPKVKAWIEKTLEEGRTRGYVETLFGRRRYVPDLNARVKSVREAAERMAFNMPVQGTAADLMKLAMVRLFPQLREVGARMLLQVHDELLLEAPKERAEEVAALAKEVMEGVWPLAVPLEVEVGIGEDWLAAKG

SEQ ID NO: 321 - DNA, 2529 bp, synthetic construct
  misc_feature 1..2529: note = Variant of DNA polymerase I from Thermus sp. strain 2.9
  source 1..2529: mol_type = other DNA
atgcaccatcatcatcatcatggcggtagcggcatgttaccgttgttcgaacctaaaggtcgcgtgcttctggttgatggccatcatctcgcgtatcgtaacttctttgccctgaaaggattaaccaccagccgtggcgagccggtacagggtgtctacggctttgcaaagtcgctcctgaaagctctgaaagaagacggtgatgtggtgattgttgtctttgatgcgaaagcgccaagttttcgccacgaagcgtacgaagcttacaaagccgggcgtgctccaacgccggaagactttcctcgccaattggcgcttatgaaggaattagtggatttgcttggcctcgaacgcttggaagttcccggtttcgaggcagacgacgtattagcgactctcgcaaagaaagccgaacgtgagggctatgaagtccatatcttgacagcagatcgcgatcttttccagcttttatctccgcgcatttccgtgttacacccggaagggcatcgtatcaccccggaatggctctgggagaaatatggtttgcgtcccgaacaatgggtggattttcgcgccttagcgggcgatccgagcgacaatattccgggagttaaaggtatcggcgagaagacggcgctcaagctccttaaagaatgggggtcgttggagaacttgcttaagaatttagatcaggtcaaaccagcttcagtgcgtgagaagattcttgcacacctcgaagacctcaaattaagccgcgaattgtcgcgtgtacgcaccgatttgccgctcgaagttgatttccgtggccgccgcgaacctgactgggagggtcttaaagcgtttttagagcgtcttgaatttggttcgctcttgcatgaattcggccttttagaaagcccgttaccagccgaagaagcaccttggccaccgcccgaaggcgcgtttttaggttaccgtttgagtcgcccggaaccgatgtgggccgaattattggctcttgcagcgtctgcccagggacgtgtgtatcgcgcggaagaccctcatggtgcgctccgtggcctcaaagaagtccgtggactccttgccaaagacttagctgttgttgcattgcgcgaaggtcttgatttacctccgactgatgatccaatgcttcttgcgtacctcttggactcgtcaaacacgacgcccgaaggcgtagcccgtcgttacggcggcgagtggaccgaagatgcaggtgagcgcgcgttattggccgaacgtttgcacgccaatttattaggacgtttgcaaggcgaggaacgtctcctctggctttacgaagaagtggagaaaccattgagtcgcgtgctcgcgcatatggaagctaccggtgtcaaattagacgtggcgtatttggaggcactcagccttgaagtcgctgccgaaatgcgccgcttggaggaagaagtattccgtttagcaggccactcctttaaccttaattctcgcgatcagttagaacgtgtgttgttcgatgaacttggtctccctcctatcggcaagacagagaagaccggtaaacgtagcacttcagcggcggttttagaagctcttcgcgaagtccatcccattgtggacaagatcttgcagtaccgcgaactcgcgaaattgaaaggcacctatattgaccgtcttccggcattagtccacccgaaaacgggacgcctccatacccgcttcaaccaaacagccacggcgaccggtcgtttgtcctcctctgatccaaaccttcagaatattccagtacgtaccccattgggccagaaaatccgcaaagcgtttgtagctgaggagggttggcgtttagtggccctcgattatagccaaattgaattacgtgtccttgcccatctttctggcgatgagaacctcatccgcgtgtttcaggaaggccgcgacattcacactcaaacggcaagctggatgtttggactgtcatcggaagcgatcgatcctttgatgcgtcgtgcagcgaagaccatcaatttcggtgttctctacggtatgagtgccgcgcgtttgtcgcaggaattaggcattccctatgaagaagctgcggcgttcattcagcgctactttcaaagctatcccaaagttaaagcatggatcgagaagactctcgaagaaggccgcacacgtggttacgtagagaccttatttggacgtcgccgctatgttcccgatttaaacgctcgcgtgaaatctgtccgtgaagccgccgaacgcatggcgttcaacatgcctgtacagggcacggcagctgacctcatgaaacttgcaatggtgcgcctttttccacaattgcgtgaagttggtgcccgcatgctcttgcaggtccacgatgaactcttgttagaagcgccaaaagagcgtgcggaagaggtggcagccctcgcgaaagaggttatggaaggcgtgtggcccttagcggtgcctcttgaagtcgaagttggtattggcgaggattggttggctgccaaaggataatga

SEQ ID NO: 322 - protein, 841 aa, synthetic construct
  REGION 1..841: note = Variant of DNA polymerase I from Thermus sp. strain 2.9
MHHHHHHGGSGMLPLFEPKGRVLLVDGHHLAYRNFFALKGLTTSRGEPVQGVYGFAKSLLKALKEDGDVVIVVFDAKAPSFRHEAYEAYKAGRAPTPEDFPRQLALMKELVDLLGLERLEVPGFEADDVLATLAKKAEREGYEVHILTADRDLFQLLSPRISVLHPEGHRITPEWLWEKYGLRPEQWVDFRALAGDPSDNIPGVKGIGEKTALKLLKEWGSLENLLKNLDQVKPASVREKILAHLEDLKLSRELSRVRTDLPLEVDFRGRREPDWEGLKAFLERLEFGSLLHEFGLLESPLPAEEAPWPPPEGAFLGYRLSRPEPMWAELLALAASAQGRVYRAEDPHGALRGLKEVRGLLAKDLAVVALREGLDLPPTDDPMLLAYLLDSSNTTPEGVARRYGGEWTEDAGERALLAERLHANLLGRLQGEERLLWLYEEVEKPLSRVLAHMEATGVKLDVAYLEALSLEVAAEMRRLEEEVFRLAGHSFNLNSRDQLERVLFDELGLPPIGKTEKTGKRSTSAAVLEALREVHPIVDKILQYRELAKLKGTYIDRLPALVHPKTGRLHTRFNQTATATGRLSSSDPNLQNIPVRTPLGQKIRKAFVAEEGWRLVALDYSQIELRVLAHLSGDENLIRVFQEGRDIHTQTASWMFGLSSEAIDPLMRRAAKTINFGVLYGMSAARLSQELGIPYEEAAAFIQRYFQSYPKVKAWIEKTLEEGRTRGYVETLFGRRRYVPDLNARVKSVREAAERMAFNMPVQGTAADLMKLAMVRLFPQLREVGARMLLQVHDELLLEAPKERAEEVAALAKEVMEGVWPLAVPLEVEVGIGEDWLAAKG

SEQ ID NO: 323 - DNA, 2529 bp, synthetic construct
  misc_feature 1..2529: note = Variant of DNA polymerase I from Thermus sp. strain 2.9
  source 1..2529: mol_type = other DNA
atgcaccatcatcatcatcatggcggtagcggcatgttaccgttgttcgaacctaaaggtcgcgtgcttctggttgatggccatcatctcgcgtatcgtaacttctttgccctgaaaggattaaccaccagccgtggcgagccggtacagggtgtctacggctttgcaaagtcgctcctgaaagctctgaaagaagacggtgatgtggtgattgttgtctttgatgcgaaagcgccaagttttcgccacgaagcgtacgaagcttacaaagccgggcgtgctccaacgccggaagactttcctcgccaattggcgcttatgaaggaattagtggatttgcttggcctcgaacgcttggaagttcccggtttcgaggcagacgacgtattagcgactctcgcaaagaaagccgaacgtgagggctatgaagtccagatcttgacagcagatcgcgatcttttccagcttttatctccgcgcatttccgtgttacacccggaagggcatctgatcaccccggaatggctctgggagaaatatggtttgcgtcccgaacaatgggtggattttcgcgccttagcgggcgatccgagcgacaatattccgggagttaaaggtatcggcgagaagacggcgctcaagctccttaaagaatgggggtcgttggagaacttgcttaagaatttagatcaggtcaaaccagagtcagtgcgtgagaagattcttgcacacctcgaagacctcaaattaagccgcgaattgtcccgtgtacgcaccgatttgccgctcgaagttgatttccgtcgccgccgcgaacctgactgggagggtcttaaagcgtttttagagcgtcttgaatttggttcgctcttgcatgaattcggccttttagaaagcccgttaccagccgaagaagcaccttggccaccgcccgaaggcgcgtttttaggttaccgtttgagtcgcccggaaccgatgtgggccgaattattggctcttgcagcgtctgcccagggacgtgtgtatcgcgcggaagaccctcatggtgcgctccgcggcctcaaagaagtccgtggactccttgccaaagacttagctgttgttgcattgcgcgaaggtcttgatttacctccgactgatgatccaatgcttcttgcgtacctcttggacccgtcaaacacgacgcccgaaggcgtagcccgtcgttacggcggcgagtggaccgaagatgcaggcgagcgcgcgttattggccgaacgtttgcacgccaatttattaggacgtttgcaaggcgaggaaaagctcctctggctttacgaagaagtggagaaaccattgagtcgcgtgctcgcgcatatggaagctaccggtgtcaaattagacgtggcgtatttggaggcactcagccttgaagttgctgccgaaatgcgccgcttggaggaagaagtattccgtttagcaggccactcctttaaccttaattctcgcgatcagttagaacgtgtgttgttcgatgaacttggtctccctcctatcggcaagacagagaagaccggtaaacgtagcacttcagcggcggttttagaagctcttcgcgaagtccatcccattgtggacaagatcttgcagtaccgcgaactcgcgaaattgaaaggcacctatattgaccctcttccggcattagtccacccgaaaacgggacgcctccatacccgcttcaaccaaacagccacggcgaccggtcgtttgtcctcctctgatccaaaccttcagaatattccagtacgtaccccattgggccagaagatccgcaaagcgtttgtagctgaggagggttggcgtttagtggccctcgattatagccaaattgaattacgtgtccttgcccatctttctggcgatgagaacctcatccgcgtgtttcaggaaggccgtgacattcacactcaaacggcaagctggatgtttggattatcggcggaagcgatcgatcctttgatgcgtcgtgcagcgaagaccgttaatttcggtgttctctacggtatgagtgcccatcgtttgtcgcaggaattaggcattccctatgaagaagctgcggcgttcattcagcgctactttcaaagctatcccaaagttaaagcatggatcgagaagactctcgaagaaggccgcacacgtggttacgtagagaccttatttggacgtcgccgctatgttcccgatttaaacgctcgcgtgaaatctgtccgtgaagccgccgaacgcatggcgttcaacatgcctgtacagggcacggcagctgacctcatgaaacttgcaatggtgcgcctttttccacaattgcgtgaagttggtgcccgcatgctcttgcaggtccacgatgaactcttgttagaagcgccaaaagagcgtgcggaagaggtggcagccctcgcgaaagaggttatggaaggcgtgtggcccttagcggtgcctcttgaagtcgaagttggtattggcgaggattggttggctgccaaaggataatga

SEQ ID NO: 324 - protein, 841 aa, synthetic construct
  REGION 1..841: note = Variant of DNA polymerase I from Thermus sp. strain 2.9
MHHHHHHGGSGMLPLFEPKGRVLLVDGHHLAYRNFFALKGLTTSRGEPVQGVYGFAKSLLKALKEDGDVVIVVFDAKAPSFRHEAYEAYKAGRAPTPEDFPRQLALMKELVDLLGLERLEVPGFEADDVLATLAKKAEREGYEVQILTADRDLFQLLSPRISVLHPEGHLITPEWLWEKYGLRPEQWVDFRALAGDPSDNIPGVKGIGEKTALKLLKEWGSLENLLKNLDQVKPESVREKILAHLEDLKLSRELSRVRTDLPLEVDFRRRREPDWEGLKAFLERLEFGSLLHEFGLLESPLPAEEAPWPPPEGAFLGYRLSRPEPMWAELLALAASAQGRVYRAEDPHGALRGLKEVRGLLAKDLAVVALREGLDLPPTDDPMLLAYLLDPSNTTPEGVARRYGGEWTEDAGERALLAERLHANLLGRLQGEEKLLWLYEEVEKPLSRVLAHMEATGVKLDVAYLEALSLEVAAEMRRLEEEVFRLAGHSFNLNSRDQLERVLFDELGLPPIGKTEKTGKRSTSAAVLEALREVHPIVDKILQYRELAKLKGTYIDPLPALVHPKTGRLHTRFNQTATATGRLSSSDPNLQNIPVRTPLGQKIRKAFVAEEGWRLVALDYSQIELRVLAHLSGDENLIRVFQEGRDIHTQTASWMFGLSAEAIDPLMRRAAKTVNFGVLYGMSAHRLSQELGIPYEEAAAFIQRYFQSYPKVKAWIEKTLEEGRTRGYVETLFGRRRYVPDLNARVKSVREAAERMAFNMPVQGTAADLMKLAMVRLFPQLREVGARMLLQVHDELLLEAPKERAEEVAALAKEVMEGVWPLAVPLEVEVGIGEDWLAAKG

SEQ ID NO: 325 - DNA, 2529 bp, synthetic construct
  misc_feature 1..2529: note = Variant of DNA polymerase I from Thermus sp. strain 2.9
  source 1..2529: mol_type = other DNA
atgcaccatcatcatcatcatggcggtagcggcatgttaccgttgttcgaacctaaaggtcgcgtgcttctggttgatggccatcatctcgcgtatcgtaacttctttgccctgaaaggattaaccaccagccgtggcgagccggtacagggtgtctacggctttgcaaagtcgctcctgaaagctctgaaagaagacggtgatgtggtgattgttgtctttgatgcgaaagcgccaagttttcgccacgaagcgtacgaagcttacaaagccgggcgtgctccaacgccggaagactttcctcgccaattggcgcttatgaaggaattagtggatttgcttggcctcgaacgcttggaagttcccggtttcgaggcagacgacgtattagcgactctcgcaaagaaagccgaacgtgagggctatgaagtccatatcttgacagcagatcgcgatcttttccagcttttatctccgcgcatttccgtgttacacccggaagggcatcgtatcaccccggaatggctctgggagaaatatggtttgcgtcccgaacaatgggtggattttcgcgccttagcgggcgatccgagcgacaatattccgggagttaaaggtatcggcgagaagacggcgctcaagctccttaaagaatgggggtcgttggagaacttgcttaagaatttagatcaggtcaaaccagcttcagtgcgtgagaagattcttgcacacctcgaagacctcaaattaagccgcgaattggtccgtgtacgcaccgatttgccgctcgaagttgatttccgtggccgccgcgaacctgactgggagggtcttaaagcgtttttagagcgtcttgaatttggttcgctcttgcatgaattcggccttttagaaagcccgttaccagccgaagaagcaccttggccaccgcccgaaggcgcgtttttaggttaccgtttgagtcgcccggaaccgatgtgggccgaattattggctcttgcagcgtctgcccagggacgtgtgtatcgcgcggaagaccctcatggtgcgctccgtggcctcaaagaagtccgtggactccttgccaaagacttagctgttgttgcattgcgcgaaggtcttgatttacctccgactgatgatccaatgcttcttgcgtacctcttggactcgtcaaacacgacgcccgaaggcgtagcccgtcgttacggcggcgagtggaccgaagatgcaggtgagcgcgcgttattggccgaacgtttgcacgccaatttattaggacgtttgcaaggcgaggaacgtctcctctggctttacgaagaagtggagaaaccattgagtcgcgtgctcgcgcatatggaagctaccggtgtcaaattagacgtggcgtatttggaggcactcagccttgaagtcgctgccgaactgcgccgcttggaggaagaagtattccgtttagcaggccactcctttaaccttaattctcgcgatcagttagaacgtgtgttgttcgatgaacttggtctccctcctatcggtaagacagagaagaccggtaaacgtagcacttcagcggcggttttagaagctcttcgcgaagtccatcccattgtggacaagatcttgcagtaccgcgaactcgcgaaattgaaaggcacctatattgaccctcttccggcattagtccacccgaaaacgggacgcctccatacccgcttcaaccaaacagccacggcgaccggtcgtttgtcctcctctgatccaaaccttcagaatattccagtacgtaccccattgggccagaaaatccgcaaagcgtttgtagctgaggagggttggcgtttagtggccctcgattatagccaaattgaattacgtgtccttgcccatctttctggcgatgagaacctcatccgcgtgtttcaggaaggccgcgacattcacactcaaacggcaagctggatgtttggattatcagctgaagcgatcgatcctttgatgcgtcgtgcagcgaagaccatcaatttcggtgttctctacggtatgagtgcccatcgtttgtcgcaggaattaggcattccctatgaagaagctgcggcgttcattcagcgctactttcaaagctatcccaaagttaaagcatggatcgagaagactctcgaagaaggccgcacacgtggttacgtagagaccttatttggacgtcgccgctatgttcccgatttaaatgctcgcgtgaaatctgtccgtgaagccgccgaacgcatggcgtggaacatgcctgtacagggcacggcagctgacctcatgaaacttgcaatggtgcgcctttttccacaattgcgtgaagttggtgcccgcatgctcttgcaggtccacgatgaactcttgttagaagcgccaaaagagcgtgcggaagaggtggcagccctcgcgaaagaggttatggaaggcgtgtggcccttagcggtgcctcttgaagtcgaagttggtattggcgaggattggttggctgccaaaggataatga

SEQ ID NO: 326 - protein, 841 aa, synthetic construct
  REGION 1..841: note = Variant of DNA polymerase I from Thermus sp. strain 2.9
MHHHHHHGGSGMLPLFEPKGRVLLVDGHHLAYRNFFALKGLTTSRGEPVQGVYGFAKSLLKALKEDGDVVIVVFDAKAPSFRHEAYEAYKAGRAPTPEDFPRQLALMKELVDLLGLERLEVPGFEADDVLATLAKKAEREGYEVHILTADRDLFQLLSPRISVLHPEGHRITPEWLWEKYGLRPEQWVDFRALAGDPSDNIPGVKGIGEKTALKLLKEWGSLENLLKNLDQVKPASVREKILAHLEDLKLSRELVRVRTDLPLEVDFRGRREPDWEGLKAFLERLEFGSLLHEFGLLESPLPAEEAPWPPPEGAFLGYRLSRPEPMWAELLALAASAQGRVYRAEDPHGALRGLKEVRGLLAKDLAVVALREGLDLPPTDDPMLLAYLLDSSNTTPEGVARRYGGEWTEDAGERALLAERLHANLLGRLQGEERLLWLYEEVEKPLSRVLAHMEATGVKLDVAYLEALSLEVAAELRRLEEEVFRLAGHSFNLNSRDQLERVLFDELGLPPIGKTEKTGKRSTSAAVLEALREVHPIVDKILQYRELAKLKGTYIDPLPALVHPKTGRLHTRFNQTATATGRLSSSDPNLQNIPVRTPLGQKIRKAFVAEEGWRLVALDYSQIELRVLAHLSGDENLIRVFQEGRDIHTQTASWMFGLSAEAIDPLMRRAAKTINFGVLYGMSAHRLSQELGIPYEEAAAFIQRYFQSYPKVKAWIEKTLEEGRTRGYVETLFGRRRYVPDLNARVKSVREAAERMAWNMPVQGTAADLMKLAMVRLFPQLREVGARMLLQVHDELLLEAPKERAEEVAALAKEVMEGVWPLAVPLEVEVGIGEDWLAAKG

SEQ ID NO: 327 - DNA, 2529 bp, synthetic construct
  misc_feature 1..2529: note = Variant of DNA polymerase I from Thermus sp. strain 2.9
  source 1..2529: mol_type = other DNA
atgcaccatcatcatcatcatggcggtagcggcatgttaccgttgttcgaacctaaaggtcgcgtgcttctggttgatggccatcatctcgcgtatcgtaacttctttgccctgaaaggattaaccaccagccgtggcgagccggtacagggtgtctacggctttgcaaagtcgctcctgaaagctctgaaagaagacggtgatgtggtgattgttgtctttgatgcgaaagcgccaagttttcgccacgaagcgtacgaagcttacaaagccgggcgtgctccaacgccggaagactttcctcgccaattggcgcttatgaaggaattagtggatttgcttggcctcgaacgcttggaagttcccggtttcgaggcagacgacgtattagcgactctcgcaaagaaagccgaacgtgagggctatgaagtccagatcttgacagcagatcgcgatcttttccagcttttatctccgcgcatttccgtgttacacccggaagggcatcgtatcaccccggaatggctctgggagaaatatggtttgcgtcccgaacaatgggtggattttcgcgccttagcgggcgatccgagcgacaatattccgggagttaaaggtatcggcgagaagacggcgctcaagctccttaaagaatgggggtcgttggagaacttgcttaagaatttagatcaggtcaaaccagcttcagtgcgtgagaagattcttgcacacctcgaagacctcaaattaagccgcgaattgtcgcgtgtacgcaccgatttgccgctcgaagttgatttccgtggccgccgcgaacctgactgggagggtcttaaagcgtttttagagcgtcttgaatttggttcgctcttgcatgaattcggccttttagaaagcccgttaccagccgaagaagcaccttggccaccgcccgaaggcgcgtttttaggttaccgtttgagtcgcccggaaccgatgtgggccgaattattggctcttgcagcgtctgcccagggacgtgtgtatcgcgcggaagaccctcatggtgcgctccgtggcctcaaagaagtccgtggactccttgccaaagacttagctgttgttgcattgcgcgaaggtcttgatttacctccgactgatgatccaatgcttcttgcgtacctcttggacccgtcaaacacgacgcccgaaggcgtagcccgtcgttacggcggcgagtggaccgaagatgcaggtgagcgcgcgttattggccgaacgtttgcacgccaatttattaggacgtttgcaaggcgaggaacgtctcctctggctttacgaagaagtggagaaaccattgagtcgcgtgctcgcgcatatggaagctaccggtgtcaaattagacgtggcgtatttggaggcactcagccttgaagtcgctgccgaaatgcgccgcttggaggaagaagtattccgtttagcaggccactcctttaaccttaattctcgcgatcagttagaacgtgtgttgttcgatgaacttggtctccctcctatcggtaagacagagaagaccggtaaacgtagcacttcagcggcggttttagaagctcttcgcgaagtccatcccattgtggacaagatcttgcagtaccgcgaactcgcgaaattgaaaggcacctatattgaccctcttccggcattagtccacccgaaaacgggacgcctccatacccgcttcaaccaaacagccacggcgaccggtcgtttgtcctcctctgatccaaaccttcagaatattccagtacgtaccccattgggccagaaaatccgcaaagcgtttgtagctgaggagggttggcgtttagtggccctcgattatagccaaattgaattacgtgtccttgcccatctttctggcgatgagaacctcatccgcgtgtttcaggaaggccgcgacattcacactcaaacggcaagctggatgtttggattatcagctgaagcgatcgatcctttgatgcgtcgtgcagcgaagaccatcaatttcggtgttctctacggtatgagtgcccatcgtttgtcgcaggaattaggcattccctatgaagaagctgcggcgttcattcagcgctactttcaaagctatcccaaagttaaagcatggatcgagaagactctcgaagaaggccgcacacgtggttacgtagagaccttatttggacgtcgccgctatgttcccgatttaaacgctcgcgtgaaatctgtccgtgaagccgccgaacgcatggcgtggaacatgcctgtacagggcacggcagctgacctcatgaaacttgcaatggtgcgcctttttccacaattgcgtgaagttggtgcccgcatgctcttgcaggtccacgatgaactcttgttagaagcgccaaaagagcgtgcggaagaggtggcagccctcgcgaaagaggttatggaaggcgtgtggcccttagcggtgcctcttgaagtcgaagttggtattggcgaggattggttggctgccaaaggataatga

SEQ ID NO: 328 - protein, 841 aa, synthetic construct
  REGION 1..841: note = Variant of DNA polymerase I from Thermus sp. strain 2.9
MHHHHHHGGSGMLPLFEPKGRVLLVDGHHLAYRNFFALKGLTTSRGEPVQGVYGFAKSLLKALKEDGDVVIVVFDAKAPSFRHEAYEAYKAGRAPTPEDFPRQLALMKELVDLLGLERLEVPGFEADDVLATLAKKAEREGYEVQILTADRDLFQLLSPRISVLHPEGHRITPEWLWEKYGLRPEQWVDFRALAGDPSDNIPGVKGIGEKTALKLLKEWGSLENLLKNLDQVKPASVREKILAHLEDLKLSRELSRVRTDLPLEVDFRGRREPDWEGLKAFLERLEFGSLLHEFGLLESPLPAEEAPWPPPEGAFLGYRLSRPEPMWAELLALAASAQGRVYRAEDPHGALRGLKEVRGLLAKDLAVVALREGLDLPPTDDPMLLAYLLDPSNTTPEGVARRYGGEWTEDAGERALLAERLHANLLGRLQGEERLLWLYEEVEKPLSRVLAHMEATGVKLDVAYLEALSLEVAAEMRRLEEEVFRLAGHSFNLNSRDQLERVLFDELGLPPIGKTEKTGKRSTSAAVLEALREVHPIVDKILQYRELAKLKGTYIDPLPALVHPKTGRLHTRFNQTATATGRLSSSDPNLQNIPVRTPLGQKIRKAFVAEEGWRLVALDYSQIELRVLAHLSGDENLIRVFQEGRDIHTQTASWMFGLSAEAIDPLMRRAAKTINFGVLYGMSAHRLSQELGIPYEEAAAFIQRYFQSYPKVKAWIEKTLEEGRTRGYVETLFGRRRYVPDLNARVKSVREAAERMAWNMPVQGTAADLMKLAMVRLFPQLREVGARMLLQVHDELLLEAPKERAEEVAALAKEVMEGVWPLAVPLEVEVGIGEDWLAAKG

SEQ ID NO: 329 - DNA, 2529 bp, synthetic construct
  misc_feature 1..2529: note = Variant of DNA polymerase I from Thermus sp. strain 2.9
  source 1..2529: mol_type = other DNA
atgcaccatcatcatcatcatggcggtagcggcatgttaccgttgttcgaacctaaaggtcgcgtgcttctggttgatggccatcatctcgcgtatcgtaacttctttgccctgaaaggattaaccaccagccgtggcgagccggtacagggtgtctacggctttgcaaagtcgctcctgaaagctctgaaagaagacggtgatgtggtgattgttgtctttgatgcgaaagcgccaagttttcgccacgaagcgtacgaagcttacaaagccgggcgtgctccaacgccggaagactttcctcgccaattggcgcttatgaaggaattagtggatttgcttggcctcgaacgcttggaagttcccggtttcgaggcagacgacgtattagcgactctcgcaaagaaagccgaacgtgagggctatgaagtccagatcttgacagcagatcgcgatcttttccagcttttatctccgcgcgtctcggtgttacacccggaagggcatcgtatcaccccggaatggctctgggagaaatatggtttgcgtcccgaacaatgggtggattttcgcgccttagcgggcgatccgagcgacaatattccgggagttaaaggtatcggcgagaagacggcgctcaagctccttaaagaatgggggtcgttggagaacttgcttaagaatttagatcaggtcaaaccagagtcagtgcgtgagaagattcttgcacacctcgaagacctcaaattaagcctggaattgtcccgtgtacgcaccgatttgccgctcgaagttgatttccgtggccgccgcgaacctgactgggagggtcttaaagcgtttttagagcgtcttgaatttggttcgctcttgcatgaattcggccttttagaaagcccgttaccagccgaagaagcaccttggccaccgcccgaaggcgcgtttttaggttacgttttgagtcgcccggaaccgatgtgggccgaattattggctcttgcagcgtctgcccagggacgtgtgtatcgcgcggaagaccctcatggtgcgctcaaaggcctcaaagaagtccgtggactccttgccaaagacttagctgttgttgcattgcgcgaaggtcttgatttacctccgactgatgatccaatgcttcttgcgtacctcttggacccgtcaaacacgacgcccgaaggcgtagcccgtcgttacggcggcgagtggaccgaagatgcaggcgagcgcgcgttattggccgaacgtttgcacgccaatttattaggacgtttgcaaggcgaggaacgtctcctctggctttacgaagaagtggagaaaccattgagtcgcgtgctcgcgcatatggaagctaccggtgtcaaattagacgtggcgtatttggaggcactcagccttgaagttgctgccgaaatgcgccgcttggaggaagaagtattccgtttagcaggccactcctttaaccttaattctcgcgatcagttagaacgtgtgttgttcgatgaacttggtctccctcctatcggcaagacagagaagaccggtaaacgtagcacttcagcggcggttttagaagctcttcgcgaagtccatcccattgtggacaagatcttgcagtaccgcgaactcgcgaaattgaaaggcacctatattgaccctcttccggcattagtccacccgaaaacgggacgcctccatacccgcttcaaccaaacagccacggcgaccggtcgtttgtcctcctctgatccaaaccttcagaatattccagtacgtaccccattgggccagaagatccgcaaagcgtttgtagctgaggagggttggcgtttagtggccctcgattatagccaaattgaattacgtgtccttgcccatctttctggcgatgagaacctcatccgcgtgtttcaggaaggcaaagacattcacactcaaacggcaagctggatgtttggattatcagctgaagcgatcgatcctttgatgcgtcgtgcagcgaagaccgttaatttcggtgttctctacggtatgagtgcccatcgtttgtcgcaggaattaggcattccctatgaagaagctgtggcgttcattcagcgctactttcaaagctatcccaaagttaaagcatggatcgagaagactctcgaagaaggccgcacacgtggttacgtagagaccttatttggacgtcgccgctatgttcccgatttaaacgctcgcgtgaaatctgtccgtgaagccgccgaacgcatggcgttcaacatgcctgtacagggcacggcagctgacctcatgaaacttgcaatggtgcgcctttttccacaattgcgtgaagttggtgcccgcatgctcttgcaggtccacgatgaactcttgttagaagcgccaaaagagcgtgcggaagaggtggcagccctcgcgaaagaggttatggaaggcgtgtggcccttagcggtgcctcttgaagtcgaagttggtattggcgaggattggttggctgccaaaggataatga

SEQ ID NO: 330 - protein, 841 aa, synthetic construct
  REGION 1..841: note = Variant of DNA polymerase I from Thermus sp. strain 2.9
MHHHHHHGGSGMLPLFEPKGRVLLVDGHHLAYRNFFALKGLTTSRGEPVQGVYGFAKSLLKALKEDGDVVIVVFDAKAPSFRHEAYEAYKAGRAPTPEDFPRQLALMKELVDLLGLERLEVPGFEADDVLATLAKKAEREGYEVQILTADRDLFQLLSPRVSVLHPEGHRITPEWLWEKYGLRPEQWVDFRALAGDPSDNIPGVKGIGEKTALKLLKEWGSLENLLKNLDQVKPESVREKILAHLEDLKLSLELSRVRTDLPLEVDFRGRREPDWEGLKAFLERLEFGSLLHEFGLLESPLPAEEAPWPPPEGAFLGYVLSRPEPMWAELLALAASAQGRVYRAEDPHGALKGLKEVRGLLAKDLAVVALREGLDLPPTDDPMLLAYLLDPSNTTPEGVARRYGGEWTEDAGERALLAERLHANLLGRLQGEERLLWLYEEVEKPLSRVLAHMEATGVKLDVAYLEALSLEVAAEMRRLEEEVFRLAGHSFNLNSRDQLERVLFDELGLPPIGKTEKTGKRSTSAAVLEALREVHPIVDKILQYRELAKLKGTYIDPLPALVHPKTGRLHTRFNQTATATGRLSSSDPNLQNIPVRTPLGQKIRKAFVAEEGWRLVALDYSQIELRVLAHLSGDENLIRVFQEGKDIHTQTASWMFGLSAEAIDPLMRRAAKTVNFGVLYGMSAHRLSQELGIPYEEAVAFIQRYFQSYPKVKAWIEKTLEEGRTRGYVETLFGRRRYVPDLNARVKSVREAAERMAFNMPVQGTAADLMKLAMVRLFPQLREVGARMLLQVHDELLLEAPKERAEEVAALAKEVMEGVWPLAVPLEVEVGIGEDWLAAKG

SEQ ID NO: 331 - DNA, 2529 bp, synthetic construct
  misc_feature 1..2529: note = Variant of DNA polymerase I from Thermus sp. strain 2.9
  source 1..2529: mol_type = other DNA
atgcaccatcatcatcatcatggcggtagcggcatgttaccgttgttcgaacctaaaggtcgcgtgcttctggttgatggccatcatctcgcgtatcgtaacttctttgccctgaaaggattaaccaccagccgtggcgagccggtacagggtgtctacggctttgcaaagtcgctcctgaaagctctgaaagaagacggtgatgtggtgattgttgtctttgatgcgaaagcgccaagttttcgccacgaagcgtacgaagcttacaaagccgggcgtgctccaacgccggaagactttcctcgccaattggcgcttatgaaggaattagtggatttgcttggcctcgaacgcttggaagttcccggtttcgaggcagacgacgtattagcgactctcgcaaagaaagccgaacgtgagggctatgaagtccatatcttgacagcagatcgcgatcttttccagcttttatctccgcgcatttccgtgttacacccggaagggcatcgtatcaccccggaatggctctgggagaaatatggtttgcgtcccgaacaatgggtggattttcgcgccttagcgggcgatccgagcgacaatattccgggagttaaaggtatcggcgagaagacggcgctcaagctccttaaagaatgggggtcgttggagaacttgcttaagaatttagatcaggtcaaaccagcttcagtgcgtgagaagattcttgcacacctcgaagacctcaaattaagccgcgaattgtcgcgtgtacgcaccgatttgccgctcgaagttgatttccgtggccgccgcgaacctgactgggagggtcttaaagcgtttttagagcgtcttgaatttggttcgctcttgcatgaattcggccttttagaaagcccgttaccagccgaagaagcaccttggccaccgcccgaaggcgcgtttttaggttaccgtttgagtcgcccggaaccgatgtgggccgaattattggctcttgcagcgtctgcccagggacgtgtgtatcgcgcggaagaccctcatggtgcgctccgtggcctcaaagaagtccgtggactccttgccaaagacttagctgttgttgcattgcgcgaaggtcttgatttacctccgactgatgatccaatgcttcttgcgtacctcttggactcgtcaaacacgacgcccgaaggcgtagcccgtcgttacggcggcgagtggaccgaagatgcaggtgagcgcgcgttattggccgaacgtttgcacgccaatttattaggacgtttgcaaggcgaggaacgtctcctctggctttacgaagaagtggagaaaccattgagtcgcgtgctcgcgcatatggaagctaccggtgtcaaattagacgtggcgtatttggaggcactcagccttgaagttgctgccgaaatgcgccgcttggaggaagaagtattccgtttagcaggccactcctttaaccttaattctcgcgatcagttagaacgtgtgttgttcgatgaacttggtctccctcctatcggcaagacagagaagaccggtaaacgtagcacttcagcggcggttttagaagctcttcgcgaagtccatcccattgtggacaagatcttgcagtaccgcgaactcgcgaaattgaaaggcacctatattgaccctcttccggcattagtccacccgaaaacgggacgcctccatacccgcttcaaccaaacagccacggcgaccggtcgtttgtcctcctctgatccaaaccttcagaatattccagtacgtaccccattgggccagaagatccgcaaagcgtttgtagctgaggagggttggcgtttagtggccctcgattatagccaaattgaattacgtgtccttgcccatctttctggcgatgagaacctcatccgcgtgtttcaggaaggccgcgacattcacactcaaacggcaagctggatgtttggactgtcagcggaagcgatcgatcctttgatgcgtcgtgcagcgaagaccatcaatttcggtgttctctacggtatgagtgcccatcgtttgtcgcaggaattaggcattccctatgaagaagctgcggcgttcattcagcgctactttcaaagctatcccaaagttaaagcatggatcgagaagactctcgaagaaggccgcacacgtggttacgtagagaccttatttggacgtcgccgctatgttcccgatttaaacgctcgcgtgaaatctgtccgtgaagccgccgaacgcatggcgttcaacatgcctgtacagggcacggcagctgacctcatgaaacttgcaatggtgcgcctttttccacaattgcgtgaagttggtgcccgcatgctcttgcaggtccacgatgaactcttgttagaagcgccaaaagagcgtgcggaagaggtggcagccctcgcgaaagaggttatggaaggcgtgtggcccttagcggtgcctcttgaagtcgaagttggtattggcgaggattggttggctgccaaaggataatga

SEQ ID NO: 332 - protein, 841 aa, synthetic construct
  REGION 1..841: note = Variant of DNA polymerase I from Thermus sp. strain 2.9
MHHHHHHGGSGMLPLFEPKGRVLLVDGHHLAYRNFFALKGLTTSRGEPVQGVYGFAKSLLKALKEDGDVVIVVFDAKAPSFRHEAYEAYKAGRAPTPEDFPRQLALMKELVDLLGLERLEVPGFEADDVLATLAKKAEREGYEVHILTADRDLFQLLSPRISVLHPEGHRITPEWLWEKYGLRPEQWVDFRALAGDPSDNIPGVKGIGEKTALKLLKEWGSLENLLKNLDQVKPASVREKILAHLEDLKLSRELSRVRTDLPLEVDFRGRREPDWEGLKAFLERLEFGSLLHEFGLLESPLPAEEAPWPPPEGAFLGYRLSRPEPMWAELLALAASAQGRVYRAEDPHGALRGLKEVRGLLAKDLAVVALREGLDLPPTDDPMLLAYLLDSSNTTPEGVARRYGGEWTEDAGERALLAERLHANLLGRLQGEERLLWLYEEVEKPLSRVLAHMEATGVKLDVAYLEALSLEVAAEMRRLEEEVFRLAGHSFNLNSRDQLERVLFDELGLPPIGKTEKTGKRSTSAAVLEALREVHPIVDKILQYRELAKLKGTYIDPLPALVHPKTGRLHTRFNQTATATGRLSSSDPNLQNIPVRTPLGQKIRKAFVAEEGWRLVALDYSQIELRVLAHLSGDENLIRVFQEGRDIHTQTASWMFGLSAEAIDPLMRRAAKTINFGVLYGMSAHRLSQELGIPYEEAAAFIQRYFQSYPKVKAWIEKTLEEGRTRGYVETLFGRRRYVPDLNARVKSVREAAERMAFNMPVQGTAADLMKLAMVRLFPQLREVGARMLLQVHDELLLEAPKERAEEVAALAKEVMEGVWPLAVPLEVEVGIGEDWLAAKG

SEQ ID NO: 333 - DNA, 2529 bp, synthetic construct
  misc_feature 1..2529: note = Variant of DNA polymerase I from Thermus sp. strain 2.9
  source 1..2529: mol_type = other DNA
atgcaccatcatcatcatcatggcggtagcggcatgttaccgttgttcgaacctaaaggtcgcgtgcttctggttgatggccatcatctcgcgtatcgtaacttctttgccctgaaaggattaaccaccagccgtggcgagccggtacagggtgtctacggctttgcaaagtcgctcctgaaagctctgaaagaagacggtgatgtggtgattgttgtctttgatgcgaaagcgccaagttttcgccacgaagcgtacgaagcttacaaagccgggcgtgctccaacgccggaagactttcctcgccaattggcgcttatgaaggaattagtggatttgcttggcctcgaacgcttggaagttcccggtttcgaggcagacgacgtattagcgactctcgcaaagaaagccgaacgtgagggctatgaagtccagatcttgacagcagatcgcgatcttttccagcttttatctccgcgcatttccgtgttacacccggaagggcatcgtatcaccccggaatggctctgggagaaatatggtttgcgtcccgaacaatgggtggattttcgcgccttagcgggcgatccgagcgacaatattccgggagttaaaggtatcggcgagaagacggcgctcaagctccttaaagaatgggggtcgttggagaacttgcttaagaatttagatcaggtcaaaccagcttcagtgcgtgagaagattcttgcacacctcgaagacctcaaattaagccgcgaattgtcccgtgtacgcaccgatttgccgctcgaagttgatttccgtggccgccgcgaacctgactgggagggtcttaaagcgtttttagagcgtcttgaatttggttcgctcttgcatgaattcggccttttagaaagcccgttaccagccgaagaagcaccttggccaccgcccgaaggcgcgtttttaggttaccgtttgagtcgcccggaaccgatgtgggccgaattattggctcttgcagcgtctgcccagggacgtgtgtatcgcgcggaagaccctcatggtgcgctccgtggcctcaaagaagtccgtggactccttgccaaagacttagctgttgttgcattgcgcgaaggtcttgatttacctccgactgatgatccaatgcttcttgcgtacctcttggacccgtcaaacacgacgcccgaaggcgtagcccgtcgttacggcggcgagtggaccgaagatgcaggcgagcgcgcgttattggccgaacgtttgcaccagaatttattaggacgtttgcaaggcgaggaacgtctcctctggctttacgaagaagtggagaaaccattgagtcgcgtgctcgcgcatatggaagctaccggtgtcaaattagacgtggcgtatttggaggcactcagccttgaagttgctgccgaaatgcgccgcttggaggaagaagtattccgtttagcaggccactcctttaaccttaattctcgcgatcagttagaacgtgtgttgttcgatgaacttggtctccctcctatcggcaagacagagaagaccggtaaacgtagcacttcagcggcggttttagaagctcttcgcgaagtccatcccattgtggacaagatcttgcagtaccgcgaactcgcgaaattgaaaggcacctatattgaccctcttccggcattagtccacccgaaaacgggacgcctccatacccgcttcaaccaaacagccacggcgaccggtcgtttgtcctcctctgatccaaaccttcagaatattccagtacgtaccccattgggccagaagatccgcaaagcgtttgtagctgaggagggttggcgtttagtggccctcgattatagccaaattgaattacgtgtccttgcccatctttctggcgatgagaacctcatccgcgtgtttcaggaaggcaaagacattcacactcaaacggcaagctggatgtttggattatcagctgaagcgatcgatcctttgatgcgtcgtgcagcgaagaccattaatttcggtgttctctacggtatgagtgcccatcgtttgtcgcaggaattaggcattccctatgaagaagctgcggcgttcattcagcgctactttcaaagctatcccaaagttaaagcatggatcgagaagactctcgaagaaggccgcacacgtggttacgtagagaccttatttggacgtcgccgctatgttcccgatttaaacgctcgcgtgaaatctgtccgtgaagccgccgaacgcatggcgttcaacatgcctgtacagggcacggcagctgacctcatgaaacttgcaatggtgcgcctttttccacaattgcgtgaagttggtgcccgcatgctcttgcaggtccacgatgaactcttgttagaagcgccaaaagagcgtgcggaagaggtggcagccctcgcgaaagaggttatggaaggcgtgtggcccttagcggtgcctcttgaagtcgaagttggtattggcgaggattggttggctgccaaaggataatga

SEQ ID NO: 334 - protein, 841 aa, synthetic construct
  REGION 1..841: note = Variant of DNA polymerase I from Thermus sp. strain 2.9
MHHHHHHGGSGMLPLFEPKGRVLLVDGHHLAYRNFFALKGLTTSRGEPVQGVYGFAKSLLKALKEDGDVVIVVFDAKAPSFRHEAYEAYKAGRAPTPEDFPRQLALMKELVDLLGLERLEVPGFEADDVLATLAKKAEREGYEVQILTADRDLFQLLSPRISVLHPEGHRITPEWLWEKYGLRPEQWVDFRALAGDPSDNIPGVKGIGEKTALKLLKEWGSLENLLKNLDQVKPASVREKILAHLEDLKLSRELSRVRTDLPLEVDFRGRREPDWEGLKAFLERLEFGSLLHEFGLLESPLPAEEAPWPPPEGAFLGYRLSRPEPMWAELLALAASAQGRVYRAEDPHGALRGLKEVRGLLAKDLAVVALREGLDLPPTDDPMLLAYLLDPSNTTPEGVARRYGGEWTEDAGERALLAERLHQNLLGRLQGEERLLWLYEEVEKPLSRVLAHMEATGVKLDVAYLEALSLEVAAEMRRLEEEVFRLAGHSFNLNSRDQLERVLFDELGLPPIGKTEKTGKRSTSAAVLEALREVHPIVDKILQYRELAKLKGTYIDPLPALVHPKTGRLHTRFNQTATATGRLSSSDPNLQNIPVRTPLGQKIRKAFVAEEGWRLVALDYSQIELRVLAHLSGDENLIRVFQEGKDIHTQTASWMFGLSAEAIDPLMRRAAKTINFGVLYGMSAHRLSQELGIPYEEAAAFIQRYFQSYPKVKAWIEKTLEEGRTRGYVETLFGRRRYVPDLNARVKSVREAAERMAFNMPVQGTAADLMKLAMVRLFPQLREVGARMLLQVHDELLLEAPKERAEEVAALAKEVMEGVWPLAVPLEVEVGIGEDWLAAKG

SEQ ID NO: 335 - DNA, 2529 bp, synthetic construct
  misc_feature 1..2529: note = Variant of DNA polymerase I from Thermus sp. strain 2.9
  source 1..2529: mol_type = other DNA
atgcaccatcatcatcatcatggcggtagcggcatgttaccgttgttcgaacctaaaggtcgcgtgcttctggttgatggccatcatctcgcgtatcgtaacttctttgccctgaaaggattaaccaccagccgtggcgagccggtacagggtgtctacggctttgcaaagtcgctcctgaaagctctgaaagaagacggtgatgtggtgattgttgtctttgatgcgaaagcgccaagttttcgccacgaagcgtacgaagcttacaaagccgggcgtgctccaacgccggaagactttcctcgccaattggcgcttatgaaggaattagtggatttgcttggcctcgaacgcttggaagttcccggtttcgaggcagacgacgtattagcgactctcgcaaagaaagccgaacgtgagggctatgaagtccagatcttgacagcagatcgcgatcttttccagcttttatctccgcgcatctcggtgttacacccggaagggcatcgcatcaccccggaatggctctgggagaaatatggtttgcgtcccgaacaatgggtggattttcgcgccttagtaggcgatccgagcgacaatattccgggagttaaaggtatcggcgagaagacggcgctcaagctccttaaagaatgggggtcgttggagaacttgcttaagaatttagatcaggtcaaaccagcgtcagtgcgtgagaagattcttgcacacctcgaagacctcaaattaagccgcgaattgtcccgtgtacgcaccgatttgccgctcgaagttgatttccgtggccgccgcgaacctgactgggagggtcttaaagcgtttttagagcgtcttgaatttggttcgctcttgcatgaattcggccttttagaaagcccgttaccagccgaagaagcaccttggccaccgcccgaaggcgcgtttttaggttacgttttgagtcgcccggaaccgatgtgggccgaattattggctcttgcagcgtctgcccagggacgtgtgtatcgcgcggaagaccctcatggtgcgctcaaaggcctcaaagaagtccgtggactccttgccaaagacttagctgttgttgcattgcgcgaaggtcttgatttacctccgactgatgatccaatgcttcttgcgtacctcttggacccgtcaaacacgacgcccgaaggcgtagcccgtcgttacggcggcgagtggaccgaagatgcaggcgagcgcgcgttattggccgaacgtttgcacgccaatttattaggacgtttgcaaggcgaggaacgcctcctctggctttacgaagaagtggagaaaccattgagtcgcgtgctcgcgcatatggaagctaccggtgtcaaattagacgtggcgtatttggaggcactcagccttgaagttgctgccgaaatgcgccgcttggaggaagaagtattccgtttagcaggccactcctttaaccttaattctcgcgatcagttagaacgtgtgttgttcgatgaacttggtctccctcctatcggcaagacagagaagaccggtaaacgtagcacttcagcggcggttttagaagctcttcgcgaagtccatcccattgtggacaagatcttgcagtaccgcgaactcgcgaaattgaaaggcacctatattgaccctcttccggcattagtccacccgaaaacgggacgcctccatacccgcttcaaccaaacagccacggcgaccggtcgtttgtcctcctctgatccaaaccttcagaatattccagtacgtaccccattgggccagaagatccgccgcgcgtttgtagctgaggagggttggcgtttagtggccctcgattatagccaaattgaattacgtgtccttgcccatctttctggcgatgagaacctcatccgcgtgtttcaggaaggccgtgacattcacactcaaacggcaagctggatgtttggattatcgccggaagcgatcgatcctttgatgcgtcgtgcagcgaagaccattaatttcggtgttctctacggtatgagtgcccatcgtttgtcgcaggaattaggcattccctatgaagaagctgcggcgttcattcagcgctactttcaaagctatcccaaagttaaagcatggatcgagaagactctcgaagaaggccgcacacgtggttacgtagagaccttatttggacgtcgccgctatgttcccgatttaaacgctcgcgtgaaatctgtccgtgaagccgccgaacgcatggcgttcaacatgcctgtacagggcacggcagctgacctcatgaaacttgcaatggtgcgcctttttccacaattgcgtgaagttggtgcccgcatgctcttgcaggtccacgatgaactcttgttagaagcgccaaaagagcgtgcggaagaggtggcagccctcgcgaaagaggttatggaaggcgtgtggcccttagcggtgcctcttgaagtcgaagttggtattggcgaggattggttggctgccaaaggataatga

SEQ ID NO: 336 - protein, 841 aa, synthetic construct
  REGION 1..841: note = Variant of DNA polymerase I from Thermus sp. strain 2.9
MHHHHHHGGSGMLPLFEPKGRVLLVDGHHLAYRNFFALKGLTTSRGEPVQGVYGFAKSLLKALKEDGDVVIVVFDAKAPSFRHEAYEAYKAGRAPTPEDFPRQLALMKELVDLLGLERLEVPGFEADDVLATLAKKAEREGYEVQILTADRDLFQLLSPRISVLHPEGHRITPEWLWEKYGLRPEQWVDFRALVGDPSDNIPGVKGIGEKTALKLLKEWGSLENLLKNLDQVKPASVREKILAHLEDLKLSRELSRVRTDLPLEVDFRGRREPDWEGLKAFLERLEFGSLLHEFGLLESPLPAEEAPWPPPEGAFLGYVLSRPEPMWAELLALAASAQGRVYRAEDPHGALKGLKEVRGLLAKDLAVVALREGLDLPPTDDPMLLAYLLDPSNTTPEGVARRYGGEWTEDAGERALLAERLHANLLGRLQGEERLLWLYEEVEKPLSRVLAHMEATGVKLDVAYLEALSLEVAAEMRRLEEEVFRLAGHSFNLNSRDQLERVLFDELGLPPIGKTEKTGKRSTSAAVLEALREVHPIVDKILQYRELAKLKGTYIDPLPALVHPKTGRLHTRFNQTATATGRLSSSDPNLQNIPVRTPLGQKIRRAFVAEEGWRLVALDYSQIELRVLAHLSGDENLIRVFQEGRDIHTQTASWMFGLSPEAIDPLMRRAAKTINFGVLYGMSAHRLSQELGIPYEEAAAFIQRYFQSYPKVKAWIEKTLEEGRTRGYVETLFGRRRYVPDLNARVKSVREAAERMAFNMPVQGTAADLMKLAMVRLFPQLREVGARMLLQVHDELLLEAPKERAEEVAALAKEVMEGVWPLAVPLEVEVGIGEDWLAAKG

SEQ ID NO: 337 - DNA, 2529 bp, synthetic construct
  misc_feature 1..2529: note = Variant of DNA polymerase I from Thermus sp. strain 2.9
  source 1..2529: mol_type = other DNA
atgcaccatcatcatcatcatggcggtagcggcatgttaccgttgttcgaacctaaaggtcgcgtgcttctggttgatggccatcatctcgcgtatcgtaacttctttgccctgaaaggattaaccaccagccgtggcgagccggtacagggtgtctacggctttgcaaagtcgctcctgaaagctctgaaagaagacggtgatgtggtgattgttgtctttgatgcgaaagcgccaagttttcgccacgaagcgtacgaagcttacaaagccgggcgtgctccaacgccggaagactttcctcgccaattggcgcttatgaaggaattagtggatttgcttggcctcgaacgcttggaagttcccggtttcgaggcagacgacgtattagcgactctcgcaaagaaagccgaacgtgagggctatgaagtccagatcttgacagcagatcgcgatcttttccagcttttatctccgcgcatttccgtgttacacccggaagggcatcgtatcaccccggaatggctctgggagaaatatggtttgcgtcccgaacaatgggtggattttcgcgccttagcgggcgatccgagcgacaatattccgggagttaaaggtatcggcgagaagacggcgctcaagctccttaaagaatgggggtcgttggagaacttgcttaagaatttagatcaggtcaaaccagagtcagtgcgtgagaagattcttgcacacctcgaagacctcaaattaagccgcgaattgtcccgtgtacgcaccgatttgccgctcgaagttgatttccgtggccgccgcgaacctgactgggagggtcttaaagcgtttttagagcgtcttgaatttggttcgctcttgcatgaattcggccttttagaaagcccgttaccagccgaagaagcaccttggccaccgcccgaaggcgcgtttttaggttaccgtttgagtcgcccggaaccgatgtgggccgaattattggctcttgcagcgtctgcccagggacgtgtgtatcgcgcggaagaccctcatggtgcgctccgtggcctcaaagaagtccgtggactccttgccaaagacttagctgttgttgcattgcgcgaaggtcttgatttacctccgactgatgatccaatgcttcttgcgtacctcttggacccgtcaaacacgacgcccgaaggcgtagcccgtcgttacggcggcgagtggaccgaagatgcaggcgagcgcgcgttattggccgaacgtttgcacgccaatttattaggacgtttgcaaggcgaggaacgtctcctctggctttacgaagaagtggagaaaccattgagtcgcgtgctcgcgcatatggaagctaccggtgtcaaattagacgtggcgtatttggaggcactcagccttgaagttgctgccgaaattcgccgcttggaggaagaagtattccgtttagcaggccactcctttaaccttaattctcgcgatcagttagaacgtgtgttgttcgatgaacttggtctccctcctatcggcaagacagagaagaccggtaaacgtagcacttcagcggcggttttagaagctcttcgcgaagtccatcccattgtggacaagatcttgcagtaccgcgaactcgcgaaattgaaaggcacctatattgaccctcttccggcattagtccacccgaaaacgggacgcctccatacccgcttcaaccaaacagccacggcgaccggtcgtttgtcctcctctgatccaaaccttcagaatattccagtacgtaccccattgggccagaagatccgcaaagcgtttgtagctgaggagggttggcgtttagtggccctcgattatagccaaattgaattacgtgtccttgcccatctttctggcgatgagaacctcatccgcgtgtttcaggaaggccgcgacattcacactcaaacggcaagctggatgtttggattatcagctgaagcgatcgatcctttgatgcgtcgtgcagcgaagaccgttaatttcggtgttctctacggtatgagtgcccatcgtttgtcgcaggaattaggcattccctatgaagaagctgcggcgttcattcagcgctactttcaaagctatcccaaagttaaagcatggatcgagaagactctcgaagaaggccgcacacgtggttacgtagagaccttatttggacgtcgccgctatgttcccgatttaaacgctcgcgtgaaatctgtccgtgaagccgccgaacgcatggcgttcaacatgcctgtacagggcacggcagctgacctcatgaaacttgcaatggtgcgcctttttccacaattgcgtgaagttggtgcccgcatgctcttgcaggtccacgatgaactcttgttagaagcgccaaaagagcgtgcggaagaggtggcagccctcgcgaaagaggttatggaaggcgtgtggcccttagcggtgcctcttgaagtcgaagttggtattggcgaggattggttggctgccaaaggataatga

SEQ ID NO: 338 - protein, 841 aa, synthetic construct
  REGION 1..841: note = Variant of DNA polymerase I from Thermus sp. strain 2.9
MHHHHHHGGSGMLPLFEPKGRVLLVDGHHLAYRNFFALKGLTTSRGEPVQGVYGFAKSLLKALKEDGDVVIVVFDAKAPSFRHEAYEAYKAGRAPTPEDFPRQLALMKELVDLLGLERLEVPGFEADDVLATLAKKAEREGYEVQILTADRDLFQLLSPRISVLHPEGHRITPEWLWEKYGLRPEQWVDFRALAGDPSDNIPGVKGIGEKTALKLLKEWGSLENLLKNLDQVKPESVREKILAHLEDLKLSRELSRVRTDLPLEVDFRGRREPDWEGLKAFLERLEFGSLLHEFGLLESPLPAEEAPWPPPEGAFLGYRLSRPEPMWAELLALAASAQGRVYRAEDPHGALRGLKEVRGLLAKDLAVVALREGLDLPPTDDPMLLAYLLDPSNTTPEGVARRYGGEWTEDAGERALLAERLHANLLGRLQGEERLLWLYEEVEKPLSRVLAHMEATGVKLDVAYLEALSLEVAAEIRRLEEEVFRLAGHSFNLNSRDQLERVLFDELGLPPIGKTEKTGKRSTSAAVLEALREVHPIVDKILQYRELAKLKGTYIDPLPALVHPKTGRLHTRFNQTATATGRLSSSDPNLQNIPVRTPLGQKIRKAFVAEEGWRLVALDYSQIELRVLAHLSGDENLIRVFQEGRDIHTQTASWMFGLSAEAIDPLMRRAAKTVNFGVLYGMSAHRLSQELGIPYEEAAAFIQRYFQSYPKVKAWIEKTLEEGRTRGYVETLFGRRRYVPDLNARVKSVREAAERMAFNMPVQGTAADLMKLAMVRLFPQLREVGARMLLQVHDELLLEAPKERAEEVAALAKEVMEGVWPLAVPLEVEVGIGEDWLAAKG

SEQ ID NO: 339 - DNA, 2529 bp, synthetic construct
  misc_feature 1..2529: note = Variant of DNA polymerase I from Thermus sp. strain 2.9
  source 1..2529: mol_type = other DNA
atgcaccatcatcatcatcatggcggtagcggcatgttaccgttgttcgaacctaaaggtcgcgtgcttctggttgatggccatcatctcgcgtatcgtaacttctttgccctgaaaggattaaccaccagccgtggcgagccggtacagggtgtctacggctttgcaaagtcgctcctgaaagctctgaaagaagacggtgatgtggtgattgttgtctttgatgcgaaagcgccaagttttcgccacgaagcgtacgaagcttacaaagccgggcgtgctccaacgccggaagactttcctcgccaattggcgcttatgaaggaattagtggatttgcttggcctcgaacgcttggaagttcccggtttcgaggcagacgacgtattagcgactctcgcaaagaaagccgaacgtgagggctatgaagtccagatcttgacagcagatcgcgatcttttccagcttttatctccgcgcatctcggtgttacacccggaagggcatcgcatcaccccggaatggctctgggagaaatatggtttgcgtcccgaacaatgggtggattttcgcgccttagtaggcgatccgggcgacaatattccgggagttaaaggtatcggcgagaagacggcgctcaagctccttaaagaatgggggtcgttggagaacttgcttaagaatttagatcaggtcaaaccagagtcagtgcgtgagaagattcttgcacacctcgaagacctcaaattaagcctggaattgtcccgtgtacgcaccgatttgccgctcgaagttgatttccgtggccgccgcgaacctgactgggagggtcttaaagcgtttttagagcgtcttgaatttggttcgctcttgcatgaattcggccttttagaaagcccgttaccagccgaagaagcaccttggccaccgcccgaaggcgcgtttttaggttaccgtttgagtcgctcggaaccgatgtgggccgaattattggctcttgcagcgtctgcccagggacgtgtgtatcgcgcggaagaccctcatggtgcgctccgtggcctcaaagaagtccgtggactccttgccaaagacttagctgttgttgcattgcgcgaaggtcttgatttacctccgactgatgatccaatgcttcttgcgtacctcttggacccgtcaaacacgacgcccgaaggcgtagcccgtcgttacggcggcgagtggaccgaagatgcagccgagcgcgcgttattggccgaacgtttgcacgccaatttattaggacgtttgcaaggcgaggaacgtctcctctggctttacgaagaagtggagaaaccattgagtcgcgtgctcgcgcatatggaagctaccggtgtcaaattagacgtggcgtatttggaggcactcagccttgaagttgctgccgaaatgcgccgcttggaggaagaagtattccgtttagcaggccactcctttaaccttaattctcgcgatcagttagaacgtgtgttgttcgatgaacttggtctccctcctatcggcaagacagagaagaccggtaaacgtagcacttcagcggcggttttagaagctcttcgcgaagtccatcccattgtggacaagatcttgcagtaccgcgaactcgcgaaattgaaaggcacctatattgaccctcttccggcattagtccacccgaaaacgggacgcctccatacccgcttcaaccaaacagccacggcgaccggtcgtttgtcctcctctgatccaaaccttcagaatattccagtacgtaccccattgggccagaagatccgccgcgcgtttgtagctgaggagggttggcgtttagtggccctcgattatagccaaattgaattacgtgtccttgcccatctttctggcgatgagaacctcatccgcgtgtttcaggaaggcaaagacattcacactcaaacggcaagctggatgtttggattatcagctgaagcgatcgatcctttgatgcgtcgtgcagcgaagaccatcaatttcggtgttctctacggtatgagtgcccatcgtttgtcgcaggaattaggcattccctatgaagaagctgcggcgttcattcagcgctactttcaaagctatcccaaagttaaagcatggatcgagaagactctcgaagaaggccgcacacgtggttacgtagagaccttatttggacgtcgccgctatgttcccgatttaaacgctcgcgtgaaatctgtccgtgaagccgccgaacgcatggcgttcaacatgcctgtacagggcacggcagctgacctcatgaaacttgcaatggtgcgcctttttccacaattgcgtgaagttggtgcccgcatgctcttgcaggtccacgatgaactcttgttagaagcgccaaaagagcgtgcggaagaggtggcagccctcgcgaaagaggttatggaaggcgtgtggcccttagcggtgcctcttgaagtcgaagttggtattggcgaggattggttggctgccaaaggataatga

SEQ ID NO: 340 - protein, 841 aa, synthetic construct
  REGION 1..841: note = Variant of DNA polymerase I from Thermus sp. strain 2.9
MHHHHHHGGSGMLPLFEPKGRVLLVDGHHLAYRNFFALKGLTTSRGEPVQGVYGFAKSLLKALKEDGDVVIVVFDAKAPSFRHEAYEAYKAGRAPTPEDFPRQLALMKELVDLLGLERLEVPGFEADDVLATLAKKAEREGYEVQILTADRDLFQLLSPRISVLHPEGHRITPEWLWEKYGLRPEQWVDFRALVGDPGDNIPGVKGIGEKTALKLLKEWGSLENLLKNLDQVKPESVREKILAHLEDLKLSLELSRVRTDLPLEVDFRGRREPDWEGLKAFLERLEFGSLLHEFGLLESPLPAEEAPWPPPEGAFLGYRLSRSEPMWAELLALAASAQGRVYRAEDPHGALRGLKEVRGLLAKDLAVVALREGLDLPPTDDPMLLAYLLDPSNTTPEGVARRYGGEWTEDAAERALLAERLHANLLGRLQGEERLLWLYEEVEKPLSRVLAHMEATGVKLDVAYLEALSLEVAAEMRRLEEEVFRLAGHSFNLNSRDQLERVLFDELGLPPIGKTEKTGKRSTSAAVLEALREVHPIVDKILQYRELAKLKGTYIDPLPALVHPKTGRLHTRFNQTATATGRLSSSDPNLQNIPVRTPLGQKIRRAFVAEEGWRLVALDYSQIELRVLAHLSGDENLIRVFQEGKDIHTQTASWMFGLSAEAIDPLMRRAAKTINFGVLYGMSAHRLSQELGIPYEEAAAFIQRYFQSYPKVKAWIEKTLEEGRTRGYVETLFGRRRYVPDLNARVKSVREAAERMAFNMPVQGTAADLMKLAMVRLFPQLREVGARMLLQVHDELLLEAPKERAEEVAALAKEVMEGVWPLAVPLEVEVGIGEDWLAAKG

SEQ ID NO: 341 - DNA, 2529 bp, synthetic construct
  misc_feature 1..2529: note = Variant of DNA polymerase I from Thermus sp. strain 2.9
  source 1..2529: mol_type = other DNA
atgcaccatcatcatcatcatggcggtagcggcatgttaccgttgttcgaacctaaaggtcgcgtgcttctggttgatggccatcatctcgcgtatcgtaacttctttgccctgaaaggattaaccaccagccgtggcgagccggtacagggtgtctacggctttgcaaagtcgctcctgaaagctctgaaagaagacggtgatgtggtgattgttgtctttgatgcgaaagcgccaagttttcgccacgaagcgtacgaagcttacaaagccgggcgtgctccaacgccggaagactttcctcgccaattggcgcttatgaaggaattagtggatttgcttggcctcgaacgcttggaagttcccggtttcgaggcagacgacgtattagcgactctcgcaaagaaagccgaacgtgagggctatgaagtccagatcttgacagcagatcgcgatcttttccagcttttatctccgcgcatttccgtgttacacccggaagggcatcgtatcaccccggaatggctctgggagaaatatggtttgcgtcccgaacaatgggtggattttcgcgccttagcgggcgatccgagcgacaatattccgggagttaaaggtatcggcgagaagacggcgctcaagctccttaaagaatgggggtcgttggagaacttgcttaagaatttagatcaggtcaaaccagcttcagtgcgtgagaagattcttgcacacctcgaagacctcaaattaagccgcgaattgtcccgtgtacgcaccgatttgccgctcgaagttgatttccgtggccgccgcgaacctgactgggagggtcttaaagcgtttttagagcgtcttgaatttggttcgctcttgcatgaattcggccttttagaaagcccgttaccagccgaagaagcaccttggccaccgcccgaaggcgcgtttttaggttaccgtttgagtcgcccggaaccgatgtgggccgaattattggctcttgcagcgtctgcccagggacgtgtgtatcgcgcggaagaccctcatggtgcgctccgtggcctcaaagaagtccgtggactccttgccaaagacttagctgttgttgcattgcgcgaaggtcttgatttacctccgactgatgatccaatgcttcttgcgtacctcttggacccgtcaaacacgacgcccgaaggcgtagcccgtcgttacggcggcgagtggaccgaagatgcaggtgagcgcgcgttattggccgaacgtttgcacgccaatttattaggacgtttgcaaggcgaggaacgtctcctctggctttacgaagaagtggagaaaccattgagtcgcgtgctcgcgcatatggaagctaccggtgtcaaattagacgtggcgtatttggaggcactcagccttgaagtcgctgccgaactgcgccgcttggaggaagaagtattccgtttagcaggccactcctttaaccttaattctcgcgatcagttagaacgtgtgttgttcgatgaacttggtctccctcctatcggcaagacagagaagaccggtaaacgtagcacttcagcggcggttttagaagctcttcgcgaagtccatcccattgtggacaagatcttgcagtaccgcgaactcgcgaaattgaaaggcacctatattgaccctcttccggcattagtccacccgaaaacgggacgcctccatacccgcttcaaccaaacagccacggcgaccggtcgtttgtcctcctctgatccaaaccttcagaatattccagtacgtaccccattgggccagaagatccgcaaagcgtttgtagctgaggagggttggcgtttagtggccctcgattatagccaaattgaattacgtgtccttgcccatctttctggcgatgagaacctcatccgcgtgtttcaggaaggccgcgacattcacactcaaacggcaagctggatgtttggattatcagctgaagcgatcgatcctttgatgcgtcgtgcagcgaagaccatcaatttcggtgttctctacggtatgagtgcccatcgtttgtcgcaggaattaggcattccctatgaagaagctgcggcgttcattcagcgctactttcaaagctatcccaaagttaaagcatggatcgagaagactctcgaagaaggccgcacacgtggttacgtagagaccttatttggacgtcgccgctatgttcccgatttaaacgctcgcgtgaaatctgtccgtgaagccgccgaacgcatggcgttcaacatgcctgtacagggcacggcagctgacctcatgaaacttgcaatggtgcgcctttttccacaattgcgtgaagttggtgcccgcatgctcttgcaggtccacgatgaactcttgttagaagcgccaaaagagcgtgcggaagaggtggcagccctcgcgaaagaggttatggaaggcgtgtggcccttagcggtgcctcttgaagtcgaagttggtattggcgaggattggttggctgccaaaggataatga

SEQ ID NO: 342 - protein, 841 aa, synthetic construct
  REGION 1..841: note = Variant of DNA polymerase I from Thermus sp. strain 2.9
MHHHHHHGGSGMLPLFEPKGRVLLVDGHHLAYRNFFALKGLTTSRGEPVQGVYGFAKSLLKALKEDGDVVIVVFDAKAPSFRHEAYEAYKAGRAPTPEDFPRQLALMKELVDLLGLERLEVPGFEADDVLATLAKKAEREGYEVQILTADRDLFQLLSPRISVLHPEGHRITPEWLWEKYGLRPEQWVDFRALAGDPSDNIPGVKGIGEKTALKLLKEWGSLENLLKNLDQVKPASVREKILAHLEDLKLSRELSRVRTDLPLEVDFRGRREPDWEGLKAFLERLEFGSLLHEFGLLESPLPAEEAPWPPPEGAFLGYRLSRPEPMWAELLALAASAQGRVYRAEDPHGALRGLKEVRGLLAKDLAVVALREGLDLPPTDDPMLLAYLLDPSNTTPEGVARRYGGEWTEDAGERALLAERLHANLLGRLQGEERLLWLYEEVEKPLSRVLAHMEATGVKLDVAYLEALSLEVAAELRRLEEEVFRLAGHSFNLNSRDQLERVLFDELGLPPIGKTEKTGKRSTSAAVLEALREVHPIVDKILQYRELAKLKGTYIDPLPALVHPKTGRLHTRFNQTATATGRLSSSDPNLQNIPVRTPLGQKIRKAFVAEEGWRLVALDYSQIELRVLAHLSGDENLIRVFQEGRDIHTQTASWMFGLSAEAIDPLMRRAAKTINFGVLYGMSAHRLSQELGIPYEEAAAFIQRYFQSYPKVKAWIEKTLEEGRTRGYVETLFGRRRYVPDLNARVKSVREAAERMAFNMPVQGTAADLMKLAMVRLFPQLREVGARMLLQVHDELLLEAPKERAEEVAALAKEVMEGVWPLAVPLEVEVGIGEDWLAAKG

SEQ ID NO: 343 - DNA, 2529 bp, synthetic construct
  misc_feature 1..2529: note = Variant of DNA polymerase I from Thermus sp. strain 2.9
  source 1..2529: mol_type = other DNA
atgcaccatcatcatcatcatggcggtagcggcatgttaccgttgttcgaacctaaaggtcgcgtgcttctggttgatggccatcatctcgcgtatcgtaacttctttgccctgaaaggattaaccaccagccgtggcgagccggtacagggtgtctacggctttgcaaagtcgctcctgaaagctctgaaagaagacggtgatgtggtgattgttgtctttgatgcgaaagcgccaagttttcgccacgaagcgtacgaagcttacaaagccgggcgtgctccaacgccggaagactttcctcgccaattggcgcttatgaaggaattagtggatttgcttggcctcgaacgcttggaagttcccggtttcgaggcagacgacgtattagcgactctcgcaaagaaagccgaacgtgagggctatgaagtccagatcttgacagcagatcgcgatcttttccagcttttatctccgcgcatttccgtgttacacccggaagggcatcgcatcaccccggaatggctctgggagaaatatggtttgcgtcccgaacaatgggtggattttcgcgccttagcgggcgatccgagcgacaatattccgggagttaaaggtatcggcgagaagacggcgctcaagctccttaaagaatgggggtcgttggagaacttgcttaagaatttagatcaggtcaaaccagcttcagtgcgtgagaagattcttgcacacctcgaagacctcaaattaagccgcgaattgtcccgtgtacgcaccgatttgccgctcgaagttgatttccgtggccgccgcgaacctgactgggagggtcttaaagcgtttttagagcgtcttgaatttggttcgctcttgcatgaattcggccttttagaaagcccgttaccagccgaagaagcaccttggccaccgcccgaaggcgcgtttttaggttaccgtttgagtcgcccggaaccgatgtgggccgaattattggctcttgcagcgtctgcccagggacgtgtgtatcgcgcggaagaccctcatggtgcgctcaaaggcctcaaagaagtccgtggactccttgccaaagacttagctgttgttgcattgcgcgaaggtcttgatttacctccgactgatgatccaatgcttcttgcgtacctcttggacccgtcaaacacgacgcccgaaggcgtagcccgtcgttacggcggcgagtggaccgaagatgcagccgagcgcgcgttattggccgaacgtttgcacgccaatttattaggacgtttgcaaggcgaggaacgtctcctctggctttacgaagaagtggagaaaccattgagtcgcgtgctcgcgcatatggaagctaccggtgtcaaattagacgtggcgtatttggaggcactcagccttgaagttgctgccgaaatgcgccgcttggaggaagaagtattccgtttagcaggccactcctttaaccttaattctcgcgatcagttagaacgtgtgttgttcgatgaacttggtctccctcctatcggcaagacagagaagaccggtaaacgtagcacttcagcggcggttttagaagctcttcgcgaagtccatcccattgtggacaagatcttgcagtaccgcgaactcgcgaaattgaaaggcacctatattgaccctcttccggcattagtccacccgaaaacgggacgcctccatacccgcttcaaccaaacagccacggcgaccggtcgtttgtcctcctctgatccaaaccttcagaatattccagtacgtaccccattgggccagaagatccgccgcgcgtttgtagctgaggagggttggcgtttagtggccctcgattatagccaaattgaattacgtgtccttgcccatctttctggcgatgagaacctcatccgcgtgtttcaggaaggcaaagacattcacactcaaacggcaagctggatgtttggattatcagctgaagcgatcgatcctttgatgcgtcgtgcagcgaagaccatcaatttcggtgttctctacggtatgagtgcccatcgtttgtcgcaggaattaggcattccctatgaagaagctgtggcgttcattcagcgctactttcaaagctatcccaaagttaaagcatggatcgagaagactctcgaagaaggccgcacacgtggttacgtagagaccttatttggacgtcgccgctatgttcccgatttaaacgctcgcgtgaaatctgtccgtgaagccgccgaacgcatggcgttcaacatgcctgtacagggcacggcagctgacctcatgaaacttgcaatggtgcgcctttttccacaattgcgtgaagttggtgcccgcatgctcttgcaggtccacgatgaactcttgttagaagcgccaaaagagcgtgcggaagaggtggcagccctcgcgaaagaggttatggaaggcgtgtggcccttagcggtgcctcttgaagtcgaagttggtattggcgaggattggttggctgccaaaggataatga

SEQ ID NO: 344 - protein, 841 aa, synthetic construct
  REGION 1..841: note = Variant of DNA polymerase I from Thermus sp. strain 2.9
MHHHHHHGGSGMLPLFEPKGRVLLVDGHHLAYRNFFALKGLTTSRGEPVQGVYGFAKSLLKALKEDGDVVIVVFDAKAPSFRHEAYEAYKAGRAPTPEDFPRQLALMKELVDLLGLERLEVPGFEADDVLATLAKKAEREGYEVQILTADRDLFQLLSPRISVLHPEGHRITPEWLWEKYGLRPEQWVDFRALAGDPSDNIPGVKGIGEKTALKLLKEWGSLENLLKNLDQVKPASVREKILAHLEDLKLSRELSRVRTDLPLEVDFRGRREPDWEGLKAFLERLEFGSLLHEFGLLESPLPAEEAPWPPPEGAFLGYRLSRPEPMWAELLALAASAQGRVYRAEDPHGALKGLKEVRGLLAKDLAVVALREGLDLPPTDDPMLLAYLLDPSNTTPEGVARRYGGEWTEDAAERALLAERLHANLLGRLQGEERLLWLYEEVEKPLSRVLAHMEATGVKLDVAYLEALSLEVAAEMRRLEEEVFRLAGHSFNLNSRDQLERVLFDELGLPPIGKTEKTGKRSTSAAVLEALREVHPIVDKILQYRELAKLKGTYIDPLPALVHPKTGRLHTRFNQTATATGRLSSSDPNLQNIPVRTPLGQKIRRAFVAEEGWRLVALDYSQIELRVLAHLSGDENLIRVFQEGKDIHTQTASWMFGLSAEAIDPLMRRAAKTINFGVLYGMSAHRLSQELGIPYEEAVAFIQRYFQSYPKVKAWIEKTLEEGRTRGYVETLFGRRRYVPDLNARVKSVREAAERMAFNMPVQGTAADLMKLAMVRLFPQLREVGARMLLQVHDELLLEAPKERAEEVAALAKEVMEGVWPLAVPLEVEVGIGEDWLAAKG

SEQ ID NO: 345 - DNA, 2529 bp, synthetic construct
  misc_feature 1..2529: note = Variant of DNA polymerase I from Thermus sp. strain 2.9
  source 1..2529: mol_type = other DNA
atgcaccatcatcatcatcatggcggtagcggcatgttaccgttgttcgaacctaaaggtcgcgtgcttctggttgatggccatcatctcgcgtatcgtaacttctttgccctgaaaggattaaccaccagccgtggcgagccggtacagggtgtctacggctttgcaaagtcgctcctgaaagctctgaaagaagacggtgatgtggtgattgttgtctttgatgcgaaagcgccaagttttcgccacgaagcgtacgaagcttacaaagccgggcgtgctccaacgccggaagactttcctcgccaattggcgcttatgaaggaattagtggatttgcttggcctcgaacgcttggaagttcccggtttcgaggcagacgacgtattagcgactctcgcaaagaaagccgaacgtgagggctatgaagtccagatcttgacagcagatcgcgatcttttccagcttttatctccgcgcatttccgtgttacacccggaagggcatcgtatcaccccggaatggctctgggagaaatatggtttgcgtcccgaacaatgggtggattttcgcgccttagcgggcgatccgagcgacaatattccgggagttaaaggtatcggcgagaagacggcgctcaagctccttaaagaatgggggtcgttggagaacttgcttaagaatttagatcaggtcaaaccagcttcagtgcgtgagaagattcttgcacacctcgaagacctcaaattaagccgcgaattgtcccgtgtacgcaccgatttgccgctcgaagttgatttccgtggccgccgcgaacctgactgggagggtcttaaagcgtttttagagcgtcttgaatttggttcgctcttgcatgaattcggccttttagaaagcccgttaccagccgaagaagcaccttggccaccgcccgaaggcgcgtttttaggttaccgtttgagtcgcccggaaccgatgtgggccgaattattggctcttgcagcgtctgcccagggacgtgtgtatcgcgcggaagaccctcatggtgcgctccgtggcattaaagaagtccgtggactccttgccaaagacttagctgttgttgcattgcgcgaaggtcttgatttacctccgactgatgatccaatgcttcttgcgtacctcttggacccgtcaaacacgacgcccgaaggcgtagcccgtcgttacggcggcgagtggaccgaagatgcaggtgagcgcgcgttattggccgaacgtttgcacgccaatttattaggacgtttgcaaggcgaggaacgtctcctctggctttacgaagaagtggagaaaccattgagtcgcgtgctcgcgcatatggaagctaccggtgtcaaattagacgtggcgtatttggaggcactcagccttgaagttgctgccgaaatgcgccgcttggaggaagaagtattccgtttagcaggccactcctttaaccttaattctcgcgatcagttagaacgtgtgttgttcgatgaacttggtctccctcctatcggcaagacagagaagaccggtaaacgtagcacttcagcggcggttttagaagctcttcgcgaagtccatcccattgtggacaagatcttgcagtaccgcgaactcgcgaaattgaaaggcacctatattgaccctcttccggcattagtccacccgaaaacgggacgcctccatacccgcttcaaccaaacagccacggcgaccggtcgtttgtcctcctctgatccaaaccttcagaatattccagtacgtaccccattgggccagaagatccgcaaagcgtttgtagctgaggagggttggcgtttagtggccctcgattatagccaaattgaattacgtgtccttgcccatctttctggcgatgagaacctcatccgcgtgtttcaggaaggccgcgacattcacactcaaacggcaagctggatgtttggattatcagctgaagcgatcgatcctttgatgcgtcgtgcagcgaagaccatcaatttcggtgttctctacggtatgagtgcccatcgtttgtcgcaggaattaggcattccctatgaagaagctgcggcgttcattcagcgctactttcaaagctatcccaaagttaaagcatggatcgagaagactctcgaagaaggccgcacacgtggttacgtagagaccttatttggacgtcgccgctatgttcccgatttaaacgctcgcgtgaaatctgtccgtgaagccgccgaacgcatggcgttcaacatgcctgtacagggcacggcagctgacctcatgaaacttgcaatggtgcgcctttttccacaattgcgtgaagttggtgcccgcatgctcttgcaggtccacgatgaactcttgttagaagcgccaaaagagcgtgcggaagaggtggcagccctcgcgaaagaggttatggaaggcgtgtggcccttagcggtgcctcttgaagtcgaagttggtattggcgaggattggttggctgccaaaggataatga

SEQ ID NO: 346 - protein, 841 aa, synthetic construct
  REGION 1..841: note = Variant of DNA polymerase I from Thermus sp. strain 2.9
MHHHHHHGGSGMLPLFEPKGRVLLVDGHHLAYRNFFALKGLTTSRGEPVQGVYGFAKSLLKALKEDGDVVIVVFDAKAPSFRHEAYEAYKAGRAPTPEDFPRQLALMKELVDLLGLERLEVPGFEADDVLATLAKKAEREGYEVQILTADRDLFQLLSPRISVLHPEGHRITPEWLWEKYGLRPEQWVDFRALAGDPSDNIPGVKGIGEKTALKLLKEWGSLENLLKNLDQVKPASVREKILAHLEDLKLSRELSRVRTDLPLEVDFRGRREPDWEGLKAFLERLEFGSLLHEFGLLESPLPAEEAPWPPPEGAFLGYRLSRPEPMWAELLALAASAQGRVYRAEDPHGALRGIKEVRGLLAKDLAVVALREGLDLPPTDDPMLLAYLLDPSNTTPEGVARRYGGEWTEDAGERALLAERLHANLLGRLQGEERLLWLYEEVEKPLSRVLAHMEATGVKLDVAYLEALSLEVAAEMRRLEEEVFRLAGHSFNLNSRDQLERVLFDELGLPPIGKTEKTGKRSTSAAVLEALREVHPIVDKILQYRELAKLKGTYIDPLPALVHPKTGRLHTRFNQTATATGRLSSSDPNLQNIPVRTPLGQKIRKAFVAEEGWRLVALDYSQIELRVLAHLSGDENLIRVFQEGRDIHTQTASWMFGLSAEAIDPLMRRAAKTINFGVLYGMSAHRLSQELGIPYEEAAAFIQRYFQSYPKVKAWIEKTLEEGRTRGYVETLFGRRRYVPDLNARVKSVREAAERMAFNMPVQGTAADLMKLAMVRLFPQLREVGARMLLQVHDELLLEAPKERAEEVAALAKEVMEGVWPLAVPLEVEVGIGEDWLAAKG

SEQ ID NO: 347 - DNA, 2529 bp, synthetic construct
  misc_feature 1..2529: note = Variant of DNA polymerase I from Thermus sp. strain 2.9
  source 1..2529: mol_type = other DNA
atgcaccatcatcatcatcatggcggtagcggcatgttaccgttgttcgaacctaaaggtcgcgtgcttctggttgatggccatcatctcgcgtatcgtaacttctttgccctgaaaggattaaccaccagccgtggcgagccggtacagggtgtctacggctttgcaaagtcgctcctgaaagctctgaaagaagacggtgatgtggtgattgttgtctttgatgcgaaagcgccaagttttcgccacgaagcgtacgaagcttacaaagccgggcgtgctccaacgccggaagactttcctcgccaattggcgcttatgaaggaattagtggatttgcttggcctcgaacgcttggaagttcccggtttcgaggcagacgacgtattagcgactctcgcaaagaaagccgaacgtgagggctatgaagtccagatcttgacagcagatcgcgatcttttccagcttttatctccgcgcatttccgtgttacacccggaagggcatcgtatcaccccggaatggctctgggagaaatatggtttgcgtcccgaacaatgggtggattttcgcgccttagcgggcgatccgagcgacaatattccgggagttaaaggtatcggcgagaagacggcgctcaagctccttaaagaatgggggtcgttggagaacttgcttaagaatttagatcaggtcaaaccagcttcagtgcgtgagaagattcttgcacacctcgaagacctcaaattaagccgcgaattgtcccgtgtacgcaccgatttgccgctcgaagttgatttccgtggccgccgcgaacctgactgggagggtcttaaagcgtttttagagcgtcttgaatttggttcgctcttgcatgaattcggccttttagaaagcccgttaccagccgaagaagcaccttggccaccgcccgaaggcgcgtttttaggttaccgtttgagtcgcccggaaccgatgtgggccgaattattggctcttgcagcgtctgcccagggacgtgtgtatcgcgcggaagaccctcatggtgcgctccgtggcctcaaagaagtccgtggactccttgccaaagacttagctgttgttgcattgcgcgaaggtcttgatttacctccgactgatgatccaatgcttcttgcgtacctcttggacccgtcaaacacgacgcccgaaggcgtagcccgtcgttacggcggcgagtggaccgaagatgcaggtgagcgcgcgttattggccgaacgtttgcacgccaatttattaggacgtttgcaaggcgaggaacgtctcctctggctttacgaagaagtggagaaaccattgagtcgcgtgctcgcgcatatggaagctaccggtgtcaaattagacgtggcgtatttggaggcactcagccttgaagttgctgccgaaatgcgccgcttggaggaagaagtattccgtttagcaggccactcctttaaccttaattctcgcgatcagttagaacgtgtgttgttcgatgaacttggtctccctcctatcggcaagacagagaagaccggtaaacgtagcacttcagcggcggttttagaagctcttcgcgaagtccatcccattgtggacaacatcttgcagtaccgcgaactcgcgaaattgaaaggcacctatattgaccctcttccggcattagtccacccgaaaacgggacgcctccatacccgcttcaaccaaacagccacggcgaccggtcgtttgtcctcctctgatccaaaccttcagaatattccagtacgtaccccattgggccagaagatccgcaaagcgtttgtagctgaggagggttggcgtttagtggccctcgattatagccaaattgaattacgtgtccttgcccatctttctggcgatgagaacctcatccgcgtgtttcaggaaggccgcgacattcacactcaaacggcaagctggatgtttggattatcagctgaagcgatcgatcctttgatgcgtcgtgcagcgaagaccatcaatttcggtgttctctacggtatgagtgcccatcgtttgtcgcaggaattaggcattccctatgaagaagctgcggcgttcattcagcgctactttcaaagctatcccaaagttaaagcatggatcgagaagactctcgaagaaggccgcacacgtggttacgtagagaccttatttggacgtcgccgctatgttcccgatttaaacgctcgcgtgaaatctgtccgtgaagccgccgaacgcatggcgttcaacatgcctgtacagggcacggcagctgacctcatgaaacttgcaatggtgcgcctttttccacaattgcgtgaagttggtgcccgcatgctcttgcaggtccacgatgaactcttgttagaagcgccaaaagagcgtgcggaagaggtggcagccctcgcgaaagaggttatggaaggcgtgtggcccttagcggtgcctcttgaagtcgaagttggtattggcgaggattggttggctgccaaaggataatga

SEQ ID NO: 348 - protein, 841 aa, synthetic construct
  REGION 1..841: note = Variant of DNA polymerase I from Thermus sp. strain 2.9
MHHHHHHGGSGMLPLFEPKGRVLLVDGHHLAYRNFFALKGLTTSRGEPVQGVYGFAKSLLKALKEDGDVVIVVFDAKAPSFRHEAYEAYKAGRAPTPEDFPRQLALMKELVDLLGLERLEVPGFEADDVLATLAKKAEREGYEVQILTADRDLFQLLSPRISVLHPEGHRITPEWLWEKYGLRPEQWVDFRALAGDPSDNIPGVKGIGEKTALKLLKEWGSLENLLKNLDQVKPASVREKILAHLEDLKLSRELSRVRTDLPLEVDFRGRREPDWEGLKAFLERLEFGSLLHEFGLLESPLPAEEAPWPPPEGAFLGYRLSRPEPMWAELLALAASAQGRVYRAEDPHGALRGLKEVRGLLAKDLAVVALREGLDLPPTDDPMLLAYLLDPSNTTPEGVARRYGGEWTEDAGERALLAERLHANLLGRLQGEERLLWLYEEVEKPLSRVLAHMEATGVKLDVAYLEALSLEVAAEMRRLEEEVFRLAGHSFNLNSRDQLERVLFDELGLPPIGKTEKTGKRSTSAAVLEALREVHPIVDNILQYRELAKLKGTYIDPLPALVHPKTGRLHTRFNQTATATGRLSSSDPNLQNIPVRTPLGQKIRKAFVAEEGWRLVALDYSQIELRVLAHLSGDENLIRVFQEGRDIHTQTASWMFGLSAEAIDPLMRRAAKTINFGVLYGMSAHRLSQELGIPYEEAAAFIQRYFQSYPKVKAWIEKTLEEGRTRGYVETLFGRRRYVPDLNARVKSVREAAERMAFNMPVQGTAADLMKLAMVRLFPQLREVGARMLLQVHDELLLEAPKERAEEVAALAKEVMEGVWPLAVPLEVEVGIGEDWLAAKG

SEQ ID NO: 349 - DNA, 2529 bp, synthetic construct
  misc_feature 1..2529: note = Variant of DNA polymerase I from Thermus sp. strain 2.9
  source 1..2529: mol_type = other DNA
atgcaccatcatcatcatcatggcggtagcggcatgttaccgttgttcgaacctaaaggtcgcgtgcttctggttgatggccatcatctcgcgtatcgtaacttctttgccctgaaaggattaaccaccagccgtggcgagccggtacagggtgtctacggctttgcaaagtcgctcctgaaagctctgaaagaagacggtgatgtggtgattgttgtctttgatgcgaaagcgccaagttttcgccacgaagcgtacgaagcttacaaagccgggcgtgctccaacgccggaagactttcctcgccaattggcgcttatgaaggaattagtggatttgcttggcctcgaacgcttggaagttcccggtttcgaggcagacgacgtattagcgactctcgcaaagaaagccgaacgtgagggctatgaagtccagatcttgacagcagatcgcgatcttttccagcttttatctccgcgcatctcggtgttacacccggaagggcatcgtatcaccccggaatggctctgggagaaatatggtttgcgtcccgaacaatgggtggattttcgcgccttagcaggcgatccgagcgacaatattccgggagttaaaggtatcggcgagaagacggcgctcaagctccttaaagaatgggggtcgttggagaacttgcttaagaatttagatcaggtcaaaccagagtcagtgcgtgagaagattcttgcacacctcgaagacctccgtttaagcctggaattgtcccgtgtacgcaccgatttgccgctcgaagttgatttccgtggccgccgcgaacctgactgggagggtcttaaagcgtttttagagcgtcttgaatttggttcgctcttgcatgaattcggccttttagaaagcccgttaccagccgaagaagcaccttggccaccgcccgaaggcgcgtttttaggttaccgtttgagtcgcccggaaccgatgtgggccgaattattggctcttgcagcgtctgcccagggacgtgtgtatcgcgcggaagaccctcatggtgcgctccgcggcctcaaagaagtccgtggactccttgccaaagacttagctgttgttgcattgcgcgaaggtcttgatttacctccgactgatgatccaatgcttcttgcgtacctcttggacccgtcaaacacgacgcccgaaggcgtagcccgtcgttacggcggcgagtggaccgaagatgcaggcgagcgcgcgttattggccgaacgtttgcacgccaatttattaggacgtttgcaaggcgaggaaaagctcctctggctttacgaagaagtggagaaaccattgagtcgcgtgctcgcgcatatggaagctaccggtgtcaaattagacgtggcgtatttggaggcactcagccttgaagttgctgccgaaatgcgccgcttggaggaagaagtattccgtttagcaggccactcctttaaccttaattctcgcgatcagttagaacgtgtgttgttcgatgaacttggtctccctcctatcggcaagacagagaagaccggtaaacgtagcacttcagcggcggttttagaagctcttcgcgaagtccatcccattgtggacaagatcttgcagtaccgcgaactcgcgaaattgaaaggcacctatattgaccctcttccggcattagtccacccgaaaacgggacgcctccatacccgcttcaaccaaacagccacggcgaccggtcgtttgtcctcctctgatccaaaccttcagaatattccagtacgtaccccattgggccagaagatccgccgcgcgtttgtagctgaggagggttggcgtttagtggccctcgattatagccaaattgaattacgtgtccttgcccatctttctggcgatgagaacctcatccgcgtgtttcaggaaggcaaagacattcacactcaaacggcaagctggatgtttggattatcagctgaagcgatcgatcctttgatgcgtcgtgcagcgaagaccatcaatttcggtgttctctacggtatgagtgcccatcgtttgtcgcaggaattaggcattccctatgaagaagctgtggcgttcattcagcgctactttcaaagctatcccaaagttaaagcatggatcgagaagactctcgaagaaggccgcacacgtggttacgtagagaccttatttggacgtcgccgctatgttcccgatttaaacgctcgcgtgaaatctgtccgtgaagccgccgaacgcatggcgttcaacatgcctgtacagggcacggcagctgacctcatgaaacttgcaatggtgcgcctttttccacaattgcgtgaagttggtgcccgcatgctcttgcaggtccacgatgaactcttgttagaagcgccaaaagagcgtgcggaagaggtggcagccctcgcgaaagaggttatggaaggcgtgtggcccttagcggtgcctcttgaagtcgaagttggtattggcgaggattggttggctgccaaaggataatga

SEQ ID NO: 350 - protein, 841 aa, synthetic construct
  REGION 1..841: note = Variant of DNA polymerase I from Thermus sp. strain 2.9
MHHHHHHGGSGMLPLFEPKGRVLLVDGHHLAYRNFFALKGLTTSRGEPVQGVYGFAKSLLKALKEDGDVVIVVFDAKAPSFRHEAYEAYKAGRAPTPEDFPRQLALMKELVDLLGLERLEVPGFEADDVLATLAKKAEREGYEVQILTADRDLFQLLSPRISVLHPEGHRITPEWLWEKYGLRPEQWVDFRALAGDPSDNIPGVKGIGEKTALKLLKEWGSLENLLKNLDQVKPESVREKILAHLEDLRLSLELSRVRTDLPLEVDFRGRREPDWEGLKAFLERLEFGSLLHEFGLLESPLPAEEAPWPPPEGAFLGYRLSRPEPMWAELLALAASAQGRVYRAEDPHGALRGLKEVRGLLAKDLAVVALREGLDLPPTDDPMLLAYLLDPSNTTPEGVARRYGGEWTEDAGERALLAERLHANLLGRLQGEEKLLWLYEEVEKPLSRVLAHMEATGVKLDVAYLEALSLEVAAEMRRLEEEVFRLAGHSFNLNSRDQLERVLFDELGLPPIGKTEKTGKRSTSAAVLEALREVHPIVDKILQYRELAKLKGTYIDPLPALVHPKTGRLHTRFNQTATATGRLSSSDPNLQNIPVRTPLGQKIRRAFVAEEGWRLVALDYSQIELRVLAHLSGDENLIRVFQEGKDIHTQTASWMFGLSAEAIDPLMRRAAKTINFGVLYGMSAHRLSQELGIPYEEAVAFIQRYFQSYPKVKAWIEKTLEEGRTRGYVETLFGRRRYVPDLNARVKSVREAAERMAFNMPVQGTAADLMKLAMVRLFPQLREVGARMLLQVHDELLLEAPKERAEEVAALAKEVMEGVWPLAVPLEVEVGIGEDWLAAKG

SEQ ID NO: 351 - DNA, 2529 bp, synthetic construct
  misc_feature 1..2529: note = Variant of DNA polymerase I from Thermus sp. strain 2.9
  source 1..2529: mol_type = other DNA
atgcaccatcatcatcatcatggcggtagcggcatgttaccgttgttcgaacctaaaggtcgcgtgcttctggttgatggccatcatctcgcgtatcgtaacttctttgccctgaaaggattaaccaccagccgtggcgagccggtacagggtgtctacggctttgcaaagtcgctcctgaaagctctgaaagaagacggtgatgtggtgattgttgtctttgatgcgaaagcgccaagttttcgccacgaagcgtacgaagcttacaaagccgggcgtgctccaacgccggaagactttcctcgccaattggcgcttatgaaggaattagtggatttgcttggcctcgaacgcttggaagttcccggtttcgaggcagacgacgtattagcgactctcgcaaagaaagccgaacgtgagggctatgaagtccagatcttgacagcagatcgcgatcttttccagcttttatctccgcgcgtctcggtgttacacccggaagggcatcgcatcaccccggaatggctctgggagaaatatggtttgcgtcccgaacaatgggtggattttcgcgccttagtaggcgatccgagcgacaatattccgggagttaaaggtatcggcgagaagacggcgctcaagctccttaaagaatgggggtcgttggagaacttgcttaagaatttagatcaggtcaaaccagcgtcagtgcgtgagaagattcttgcacacctcgaagacctcaaattaagcctggaattgtcccgtgtacgcaccgatttgccgctcgaagttgatttccgtggccgccgcgaacctgactgggagggtcttaaagcgtttttagagcgtcttgaatttggttcgctcttgcatgaattcggccttttagaaagcccgttaccagccgaagaagcaccttggccaccgcccgaaggcgcgtttttaggttaccgtttgagtcgcccggaaccgatgtgggccgaattattggctcttgcagcgtctgcccagggacgtgtgtatcgcgcggaagaccctcatggtgcgctccgcggcctcaaagaagtccgtggactccttgccaaagacttagctgttgttgcattgcgcgaaggtcttgatttacctccgactgatgatccaatgcttcttgcgtacctcttggacccgtcaaacacgacgcccgaaggcgtagcccgtcgttacggcggcgagtggaccgaagatgcagccgagcgcgcgttattggccgaacgtttgcacgccaatttattaggacgtttgcaaggcgaggaacgtctcctctggctttacgaagaagtggagaaaccattgagtcgcgtgctcgcgcatatggaagctaccggtgtcaaattagacgtggcgtatttggaggcactcagccttgaagttgctgccgaaatgcgccgcttggaggaagaagtattccgtttagcaggccactcctttaaccttaattctcgcgatcagttagaacgtgtgttgttcgatgaacttggtctccctcctatcggcaagacagagaagaccggtaaacgtagcacttcagcggcggttttagaagctcttcgcgaagtccatcccattgtggacaagatcttgcagtaccgcgaactcgcgaaattgaaaggcacctatattgaccctcttccggcattagtccacccgaaaacgggacgcctccatacccgcttcaaccaaacagccacggcgaccggtcgtttgtcctcctctgatccaaaccttcagaatattccagtacgtaccccattgggccagaagatccgccgcgcgtttgtagctgaggagggttggcgtttagtggccctcgattatagccaaattgaattacgtgtccttgcccatctttctggcgatgagaacctcatccgcgtgtttcaggaaggccgcgacattcacactcaaacggcaagctggatgtttggattatcagctgaagcgatcgatcctttgatgcgtcgtgcagcgaagaccatcaatttcggtgttctctacggtatgagtgcccatcgtttgtcgcaggaattaggcattccctatgaagaagctgcggcgttcattcagcgctactttcaaagctatcccaaagttaaagcatggatcgagaagactctcgaagaaggccgcacacgtggttacgtagagaccttatttggacgtcgccgctatgttcccgatttaaacgctcgcgtgaaatctgtccgtgaagccgccgaacgcatggcgttcaacatgcctgtacagggcacggcagctgacctcatgaaacttgcaatggtgcgcctttttccacaattgcgtgaagttggtgcccgcatgctcttgcaggtccacgatgaactcttgttagaagcgccaaaagagcgtgcggaagaggtggcagccctcgcgaaagaggttatggaaggcgtgtggcccttagcggtgcctcttgaagtcgaagttggtattggcgaggattggttggctgccaaaggataatga

SEQ ID NO: 352 - protein, 841 aa, synthetic construct
  REGION 1..841: note = Variant of DNA polymerase I from Thermus sp. strain 2.9
MHHHHHHGGSGMLPLFEPKGRVLLVDGHHLAYRNFFALKGLTTSRGEPVQGVYGFAKSLLKALKEDGDVVIVVFDAKAPSFRHEAYEAYKAGRAPTPEDFPRQLALMKELVDLLGLERLEVPGFEADDVLATLAKKAEREGYEVQILTADRDLFQLLSPRVSVLHPEGHRITPEWLWEKYGLRPEQWVDFRALVGDPSDNIPGVKGIGEKTALKLLKEWGSLENLLKNLDQVKPASVREKILAHLEDLKLSLELSRVRTDLPLEVDFRGRREPDWEGLKAFLERLEFGSLLHEFGLLESPLPAEEAPWPPPEGAFLGYRLSRPEPMWAELLALAASAQGRVYRAEDPHGALRGLKEVRGLLAKDLAVVALREGLDLPPTDDPMLLAYLLDPSNTTPEGVARRYGGEWTEDAAERALLAERLHANLLGRLQGEERLLWLYEEVEKPLSRVLAHMEATGVKLDVAYLEALSLEVAAEMRRLEEEVFRLAGHSFNLNSRDQLERVLFDELGLPPIGKTEKTGKRSTSAAVLEALREVHPIVDKILQYRELAKLKGTYIDPLPALVHPKTGRLHTRFNQTATATGRLSSSDPNLQNIPVRTPLGQKIRRAFVAEEGWRLVALDYSQIELRVLAHLSGDENLIRVFQEGRDIHTQTASWMFGLSAEAIDPLMRRAAKTINFGVLYGMSAHRLSQELGIPYEEAAAFIQRYFQSYPKVKAWIEKTLEEGRTRGYVETLFGRRRYVPDLNARVKSVREAAERMAFNMPVQGTAADLMKLAMVRLFPQLREVGARMLLQVHDELLLEAPKERAEEVAALAKEVMEGVWPLAVPLEVEVGIGEDWLAAKG

SEQ ID NO: 353 - DNA, 2529 bp, synthetic construct
  misc_feature 1..2529: note = Variant of DNA polymerase I from Thermus sp. strain 2.9
  source 1..2529: mol_type = other DNA
atgcaccatcatcatcatcatggcggtagcggcatgttaccgttgttcgaacctaaaggtcgcgtgcttctggttgatggccatcatctcgcgtatcgtaacttctttgccctgaaaggattaaccaccagccgtggcgagccggtacagggtgtctacggctttgcaaagtcgctcctgaaagctctgaaagaagacggtgatgtggtgattgttgtctttgatgcgaaagcgccaagttttcgccacgaagcgtacgaagcttacaaagccgggcgtgctccaacgccggaagactttcctcgccaattggcgcttatgaaggaattagtggatttgcttggcctcgaacgcttggaagttcccggtttcgaggcagacgacgtattagcgactctcgcaaagaaagccgaacgtgagggctatgaagtccagatcttgacagcagatcgcgatcttttccagcttttatctccgcgcatctcggtgttacacccggaagggcatcgtatcaccccggaatggctctgggagaaatatggtttgcgtcccgaacaatgggtggattttcgcgccttagcgggcgatccgagcgacaatattccgggagttaaaggtatcggcgagaagacggcgctcaagctccttaaagaatgggggtcgttggagaacttgcttaagaatttagatcaggtcaaaccagagtcagtgcgtgagaagattcttgcacacctcgaagacctcaaattaagccgcgaattgtcccgtgtacgcaccgatttgccgctcgaagttgatttccgtggccgccgcgaacctgactgggagggtcttaaagcgtttttagagcgtcttgaatttggttcgctcttgcatgaattcggccttttagaaagcccgttaccagccgaagaagcaccttggccaccgcccgaaggcgcgtttttaggttaccgtttgagtcgcccggaaccgatgtgggccgaattattggctcttgcagcgtctgcccagggacgtgtgtatcgcgcggaagaccctcatggtgcgctcaaaggcctcaaagaagtccgtggactccttgccaaagacttagctgttgttgcattgcgcgaaggtcttgatttacctccgactgatgatccaatgcttcttgcgtacctcttggacccgtcaaacacgacgcccgaaggcgtagcccgtcgttacggcggcgagtggaccgaagatgcaggtgagcgcgcgttattggccgaacgtttgcacgccaatttattaggacgtttgcaaggcgaggaacgtctcctctggctttacgaagaagtggagaaaccattgagtcgcgtgctcgcgcatatggaagctaccggtgtcaaattagacgtggcgtatttggaggcactcagccttgaagttgctgccgaaatgcgccgcttggaggaagaagtattccgtttagcaggccactcctttaaccttaattctcgcgatcagttagaacgtgtgttgttcgatgaacttggtctccctcctatcggcaagacagagaagaccggtaaacgtagcacttcagcggcggttttagaagctcttcgcgaagtccatcccattgtggacaagatcttgcagtaccgcgaactcgcgaaattgaaaggcacctatattgaccctcttccggcattagtccacccgaaaacgggacgcctccatacccgcttcaaccaaacagccacggcgaccggtcgtttgtcctcctctgatccaaaccttcagaatattccagtacgtaccccattgggccagaagatccgccgcgcgtttgtagctgaggagggttggcgtttagtggccctcgattatagccaaattgaattacgtgtccttgcccatctttctggcgatgagaacctcatccgcgtgtttcaggaaggccgcgacattcacactcaaacggcaagctggatgtttggattatcagctgaagcgatcgatcctttgatgcgtcgtgcagcgaagaccatcaatttcggtgttctctacggtatgagtgcccatcgtttgtcgcaggaattaggcattccctatgaagaagctgcggcgttcattcagcgctactttcaaagctatcccaaagttaaagcatggatcgagaagactctcgaagaaggccgcacacgtggttacgtagagaccttatttggacgtcgccgctatgttcccgatttaaacgctcgcgtgaaatctgtccgtgaagccgccgaacgcatggcgttcaacatgcctgtacagggcacggcagctgacctcatgaaacttgcaatggtgcgcctttttccacaattgcgtgaagttggtgcccgcatgctcttgcaggtccacgatgaactcttgttagaagcgccaaaagagcgtgcggaagaggtggcagccctcgcgaaagaggttatggaaggcgtgtggcccttagcggtgcctcttgaagtcgaagttggtattggcgaggattggttggctgccaaaggataatga

SEQ ID NO: 354 - protein, 841 aa, synthetic construct
  REGION 1..841: note = Variant of DNA polymerase I from Thermus sp. strain 2.9
MHHHHHHGGSGMLPLFEPKGRVLLVDGHHLAYRNFFALKGLTTSRGEPVQGVYGFAKSLLKALKEDGDVVIVVFDAKAPSFRHEAYEAYKAGRAPTPEDFPRQLALMKELVDLLGLERLEVPGFEADDVLATLAKKAEREGYEVQILTADRDLFQLLSPRISVLHPEGHRITPEWLWEKYGLRPEQWVDFRALAGDPSDNIPGVKGIGEKTALKLLKEWGSLENLLKNLDQVKPESVREKILAHLEDLKLSRELSRVRTDLPLEVDFRGRREPDWEGLKAFLERLEFGSLLHEFGLLESPLPAEEAPWPPPEGAFLGYRLSRPEPMWAELLALAASAQGRVYRAEDPHGALKGLKEVRGLLAKDLAVVALREGLDLPPTDDPMLLAYLLDPSNTTPEGVARRYGGEWTEDAGERALLAERLHANLLGRLQGEERLLWLYEEVEKPLSRVLAHMEATGVKLDVAYLEALSLEVAAEMRRLEEEVFRLAGHSFNLNSRDQLERVLFDELGLPPIGKTEKTGKRSTSAAVLEALREVHPIVDKILQYRELAKLKGTYIDPLPALVHPKTGRLHTRFNQTATATGRLSSSDPNLQNIPVRTPLGQKIRRAFVAEEGWRLVALDYSQIELRVLAHLSGDENLIRVFQEGRDIHTQTASWMFGLSAEAIDPLMRRAAKTINFGVLYGMSAHRLSQELGIPYEEAAAFIQRYFQSYPKVKAWIEKTLEEGRTRGYVETLFGRRRYVPDLNARVKSVREAAERMAFNMPVQGTAADLMKLAMVRLFPQLREVGARMLLQVHDELLLEAPKERAEEVAALAKEVMEGVWPLAVPLEVEVGIGEDWLAAKG

SEQ ID NO: 355 - DNA, 2529 bp, synthetic construct
  misc_feature 1..2529: note = Variant of DNA polymerase I from Thermus sp. strain 2.9
  source 1..2529: mol_type = other DNA
atgcaccatcatcatcatcatggcggtagcggcatgttaccgttgttcgaacctaaaggtcgcgtgcttctggttgatggccatcatctcgcgtatcgtaacttctttgccctgaaaggattaaccaccagccgtggcgagccggtacagggtgtctacggctttgcaaagtcgctcctgaaagctctgaaagaagacggtgatgtggtgattgttgtctttgatgcgaaagcgccaagttttcgccacgaagcgtacgaagcttacaaagccgggcgtgctccaacgccggaagactttcctcgccaattggcgcttatgaaggaattagtggatttgcttggcctcgaacgcttggaagttcccggtttcgaggcagacgacgtattagcgactctcgcaaagaaagccgaacgtgagggctatgaagtccagatcttgacagcagatcgcgatcttttccagcttttatctccgcgcatcgcggtgttacacccggaagggcatcgcatcaccccggaatggctctgggagaaatatggtttgcgtcccgaacaatgggtggattttcgcgccttagcaggcgatccgagcgacaatattccgggagttaaaggtatcggcgagaagacggcgctcaagctccttaaagaatgggggtcgttggagaacttgcttaagaatttagatcaggtcaaaccagagtcagtgcgtgagaagattcttgcacacctcgaagacctcaaattaagccgcgaattgtcccgtgtacgcaccgatttgccgctcgaagttgatttccgtcgccgccgcgaacctgactgggagggtcttaaagcgtttttagagcgtcttgaatttggttcgctcttgcatgaattcggccttttagaaagcccgttaccagccgaagaagcaccttggccaccgcccgaaggcgcgtttttaggttaccgtttgagtcgcccggaaccgatgtgggccgaattattggctcttgcagcgtctgcccagggacgtgtgtatcgcgcggaagaccctcatggtgcgctccgcggcctcaaagaagtccgtggactccttgccaaagacttagctgttgttgcattgcgcgaaggtcttgatttacctccgactgatgatccaatgcttcttgcgtacctcttggacccgtcaaacacgacgcccgaaggcgtagcccgtcgttacggcggcgagtggaccgaagatgcaggcgagcgcgcgttattggccgaacgtttgcaccagaatttattaggacgtttgcaaggcgaggaacgtctcctctggctttacgaagaagtggagaaaccattgagtcgcgtgctcgcgcatatggaagctaccggtgtcaaattagacgtggcgtatttggaggcactcagccttgaagttgctgccgaaattcgccgcttggaggaagaagtattccgtttagcaggccactcctttaaccttaattctcgcgatcagttagaacgtgtgttgttcgatgaacttggtctccctcctatcggcaagacagagaagaccggtaaacgtagcacttcagcggcggttttagaagctcttcgcgaagtccatcccattgtggacaagatcttgcagtaccgcgaactcgcgaaattgaaaggcacctatattgaccctcttccggcattagtccacccgaaaacgggacgcctccatacccgcttcaaccaaacagccacggcgaccggtcgtttgtcctcctctgatccaaaccttcagaatattccagtacgtaccccattgggccagaagatccgccgcgcgtttgtagctgaggagggttggcgtttagtggccctcgattatagccaaattgaattacgtgtccttgcccatctttctggcgatgagaacctcatccgcgtgtttcaggaaggcaaagacattcacactcaaacggcaagctggatgtttggattaccggcggaagcgatcgatcctttgatgcgtcgtgcagcgaagaccattaatttcggtgttctctacggtatgagtgcccatcgtttgtcgcaggaattaggcattccctatgaagaagctgcggcgttcattcagcgctactttcaaagctatcccaaagttaaagcatggatcgagaagactctcgaagaaggccgcacacgtggttacgtagagaccttatttggacgtcgccgctatgttcccgatttaaacgctcgcgtgaaatctgtccgtgaagccgccgaacgcatggcgttcaacatgcctgtacagggcacggcagctgacctcatgaaacttgcaatggtgcgcctttttccacaattgcgtgaagttggtgcccgcatgctcttgcaggtccacgatgaactcttgttagaagcgccaaaagagcgtgcggaagaggtggcagccctcgcgaaagaggttatggaaggcgtgtggcccttagcggtgcctcttgaagtcgaagttggtattggcgaggattggttggctgccaaaggataatga

SEQ ID NO: 356 - protein, 841 aa, synthetic construct
  REGION 1..841: note = Variant of DNA polymerase I from Thermus sp. strain 2.9
MHHHHHHGGSGMLPLFEPKGRVLLVDGHHLAYRNFFALKGLTTSRGEPVQGVYGFAKSLLKALKEDGDVVIVVFDAKAPSFRHEAYEAYKAGRAPTPEDFPRQLALMKELVDLLGLERLEVPGFEADDVLATLAKKAEREGYEVQILTADRDLFQLLSPRIAVLHPEGHRITPEWLWEKYGLRPEQWVDFRALAGDPSDNIPGVKGIGEKTALKLLKEWGSLENLLKNLDQVKPESVREKILAHLEDLKLSRELSRVRTDLPLEVDFRRRREPDWEGLKAFLERLEFGSLLHEFGLLESPLPAEEAPWPPPEGAFLGYRLSRPEPMWAELLALAASAQGRVYRAEDPHGALRGLKEVRGLLAKDLAVVALREGLDLPPTDDPMLLAYLLDPSNTTPEGVARRYGGEWTEDAGERALLAERLHQNLLGRLQGEERLLWLYEEVEKPLSRVLAHMEATGVKLDVAYLEALSLEVAAEIRRLEEEVFRLAGHSFNLNSRDQLERVLFDELGLPPIGKTEKTGKRSTSAAVLEALREVHPIVDKILQYRELAKLKGTYIDPLPALVHPKTGRLHTRFNQTATATGRLSSSDPNLQNIPVRTPLGQKIRRAFVAEEGWRLVALDYSQIELRVLAHLSGDENLIRVFQEGKDIHTQTASWMFGLPAEAIDPLMRRAAKTINFGVLYGMSAHRLSQELGIPYEEAAAFIQRYFQSYPKVKAWIEKTLEEGRTRGYVETLFGRRRYVPDLNARVKSVREAAERMAFNMPVQGTAADLMKLAMVRLFPQLREVGARMLLQVHDELLLEAPKERAEEVAALAKEVMEGVWPLAVPLEVEVGIGEDWLAAKG

SEQ ID NO: 357 - DNA, 2529 bp, synthetic construct
  misc_feature 1..2529: note = Variant of DNA polymerase I from Thermus sp. strain 2.9
  source 1..2529: mol_type = other DNA
atgcaccatcatcatcatcatggcggtagcggcatgttaccgttgttcgaacctaaaggtcgcgtgcttctggttgatggccatcatctcgcgtatcgtaacttctttgccctgaaaggattaaccaccagccgtggcgagccggtacagggtgtctacggctttgcaaagtcgctcctgaaagctctgaaagaagacggtgatgtggtgattgttgtctttgatgcgaaagcgccaagttttcgccacgaagcgtacgaagcttacaaagccgggcgtgctccaacgccggaagactttcctcgccaattggcgcttatgaaggaattagtggatttgcttggcctcgaacgcttggaagttcccggtttcgaggcagacgacgtattagcgactctcgcaaagaaagccgaacgtgagggctatgaagtccagatcttgacagcagatcgcgatcttttccagcttttatctccgcgcatttccgtgttacacccggaagggcatctgatcaccccggaatggctctgggagaaatatggtttgcgtcccgaacaatgggtggattttcgcgccttagtaggcgatccgagcgacaatattccgggagttaaaggtatcggcgagaagacggcgctcaagctccttaaagaatgggggtcgttggagaacttgcttaagaatttagatcaggtcaaaccagcgtcagtgcgtgagaagattcttgcacacctcgaagacctcaaattaagccgcgaattgtcccgtgtacgcaccgatttgccgctcgaagttgatttccgtggccgccgcgaacctgactgggagggtcttaaagcgtttttagagcgtcttgaatttggttcgctcttgcatgaattcggccttttagaaagcccgttaccagccgaagaagcaccttggccaccgcccgaaggcgcgtttttaggttacgttttgagtcgcccggaaccgatgtgggccgaattattggctcttgcagcgtctgcccagggacgtgtgtatcgcgcggaagaccctcatggtgcgctcaaaggcctcaaagaagtccgtggactccttgccaaagacttagctgttgttgcattgcgcgaaggtcttgatttacctccgactgatgatccaatgcttcttgcgtacctcttggacccgtcaaacacgacgcccgaaggcgtagcccgtcgttacggcggcgagtggaccgaagatgcaggcgagcgcgcgttattggccgaacgtttgcacgccaatttattaggacgtttgcaaggcgaggaacgtctcctctggctttacgaagaagtggagaaaccattgagtcgcgtgctcgcgcatatggaagctaccggtgtcaaattagacgtggcgtatttggaggcactcagccttgaagttgctgccgaaattcgccgcttggaggaagaagtattccgtttagcaggccactcctttaaccttaattctcgcgatcagttagaacgtgtgttgttcgatgaacttggtctccctcctatcggcaagacagagaagaccggtaaacgtagcacttcagcggcggttttagaagctcttcgcgaagtccatcccattgtggacaagatcttgcagtaccgcgaactcgcgaaattgaaaggcacctatattgaccctcttccggcattagtccacccgaaaacgggacgcctccatacccgcttcaaccaaacagccacggcgaccggtcgtttgtcctcctctgatccaaaccttcagaatattccagtacgtaccccattgggccagaagatccgcaaagcgtttgtagctgaggagggttggcgtttagtggccctcgattatagccaaattgaattacgtgtccttgcccatctttctggcgatgagaacctcatccgcgtgtttcaggaaggccgcgacattcacactcaaacggcaagctggatgtttggattatcagctgaagcgatcgatcctttgatgcgtcgtgcagcgaagaccattaatttcggtgttctctacggtatgagtgcccatcgtttgtcgcaggaattaggcattccctatgaagaagctgtggcgttcattcagcgctactttcaaagctatcccaaagttaaagcatggatcgagaagactctcgaagaaggccgcacacgtggttacgtagagaccttatttggacgtcgccgctatgttcccgatttaaacgctcgcgtgaaatctgtccgtgaagccgccgaacgcatggcgttcaacatgcctgtacagggcacggcagctgacctcatgaaacttgcaatggtgcgcctttttccacaattgcgtgaagttggtgcccgcatgctcttgcaggtccacgatgaactcttgttagaagcgccaaaagagcgtgcggaagaggtggcagccctcgcgaaagaggttatggaaggcgtgtggcccttagcggtgcctcttgaagtcgaagttggtattggcgaggattggttggctgccaaaggataatga

SEQ ID NO: 358 - protein, 841 aa, synthetic construct
  REGION 1..841: note = Variant of DNA polymerase I from Thermus sp. strain 2.9
MHHHHHHGGSGMLPLFEPKGRVLLVDGHHLAYRNFFALKGLTTSRGEPVQGVYGFAKSLLKALKEDGDVVIVVFDAKAPSFRHEAYEAYKAGRAPTPEDFPRQLALMKELVDLLGLERLEVPGFEADDVLATLAKKAEREGYEVQILTADRDLFQLLSPRISVLHPEGHLITPEWLWEKYGLRPEQWVDFRALVGDPSDNIPGVKGIGEKTALKLLKEWGSLENLLKNLDQVKPASVREKILAHLEDLKLSRELSRVRTDLPLEVDFRGRREPDWEGLKAFLERLEFGSLLHEFGLLESPLPAEEAPWPPPEGAFLGYVLSRPEPMWAELLALAASAQGRVYRAEDPHGALKGLKEVRGLLAKDLAVVALREGLDLPPTDDPMLLAYLLDPSNTTPEGVARRYGGEWTEDAGERALLAERLHANLLGRLQGEERLLWLYEEVEKPLSRVLAHMEATGVKLDVAYLEALSLEVAAEIRRLEEEVFRLAGHSFNLNSRDQLERVLFDELGLPPIGKTEKTGKRSTSAAVLEALREVHPIVDKILQYRELAKLKGTYIDPLPALVHPKTGRLHTRFNQTATATGRLSSSDPNLQNIPVRTPLGQKIRKAFVAEEGWRLVALDYSQIELRVLAHLSGDENLIRVFQEGRDIHTQTASWMFGLSAEAIDPLMRRAAKTINFGVLYGMSAHRLSQELGIPYEEAVAFIQRYFQSYPKVKAWIEKTLEEGRTRGYVETLFGRRRYVPDLNARVKSVREAAERMAFNMPVQGTAADLMKLAMVRLFPQLREVGARMLLQVHDELLLEAPKERAEEVAALAKEVMEGVWPLAVPLEVEVGIGEDWLAAKG

SEQ ID NO: 359 - DNA, 2529 bp, synthetic construct
  misc_feature 1..2529: note = Variant of DNA polymerase I from Thermus sp. strain 2.9
  source 1..2529: mol_type = other DNA
atgcaccatcatcatcatcatggcggtagcggcatgttaccgttgttcgaacctaaaggtcgcgtgcttctggttgatggccatcatctcgcgtatcgtaacttctttgccctgaaaggattaaccaccagccgtggcgagccggtacagggtgtctacggctttgcaaagtcgctcctgaaagctctgaaagaagacggtgatgtggtgattgttgtctttgatgcgaaagcgccaagttttcgccacgaagcgtacgaagcttacaaagccgggcgtgctccaacgccggaagactttcctcgccaattggcgcttatgaaggaattagtggatttgcttggcctcgaacgcttggaagttcccggtttcgaggcagacgacgtattagcgactctcgcaaagaaagccgaacgtgagggctatgaagtccagatcttgacagcagatcgcgatcttttccagcttttatctccgcgcatttccgtgttacacccggaagggcatcgtatcaccccggaatggctctgggagaaatatggtttgcgtcccgaacaatgggtggattttcgcgccttagcgggcgatccgagcgacaatattccgggagttaaaggtatcggcgagaagacggcgctcaagctccttaaagaatgggggtcgttggagaacttgcttaagaatttagatcaggtcaaaccagcttcagtgcgtgagaagattcttgcacacctcgaagacctcaaattaagccgcgaattgtcccgtgtacgcaccgatttgccgctcgaagttgatttccgtggccgccgcgaacctgactgggagggtcttaaagcgtttttagagcgtcttgaatttggttcgctcttgcatgaattcggccttacggaaagcccgttaccagccgaagaagcaccttggccaccgcccgaaggcgcgtttttaggttaccgtttgagtcgcccggaaccgatgtgggccgaattattggctcttgcagcgtctgcccagggacgtgtgtatcgcgcggaagaccctcatggtgcgctccgtggcctcaaagaagtccgtggactccttgccaaagacttagctgttgttgcattgcgcgaaggtcttgatttacctccgactgatgatccaatgcttcttgcgtacctcttggacccgtcaaacacgacgcccgaaggcgtagcccgtcgttacggcggcgagtggaccgaagatgcaggtgagcgcgcgttattggccgaacgtttgcacgccaatttattaggacgtttgcaaggcgaggaacgtctcctctggctttacgaagaagtggagaaaccattgagtcgcgtgctcgcgcatatggaagctaccggtgtcaaattagacgtggcgtatttggaggcactcagccttgaagttgctgccgaaatgcgccgcttggaggaagaagtattccgtttagcaggccactcctttaaccttaattctcgcgatcagttagaacgtgtgttgttcgatgaacttggtctccctcctatcggcaagacagagaagaccggtaaacgtagcacttcagcggcggttttagaagctcttcgcgaagtccatcccattgtggacaagatcttgcagtaccgcgaactcgcgaaattgaaaggcacctatattgaccctcttccggcattagtccacccgaaaacgggacgcctccatacccgcttcaaccaaacagccacggcgaccggtcgtttgtcctcctctgatccaaaccttcagaatattccagtacgtaccccattgggccagaagatccgcaaagcgtttgtagctgaggagggttggcgtttagtggccctcgattatagccaaattgaattacgtgtccttgcccatctttctggcgatgagaacctcatccgcgtgtttcaggaaggccgcgacattcacactcaaacggcaagctggatgtttggattatcagctgaagcgatcgatcctttgatgcgtcgtgcagcgaagaccatcaatttcggtgttctctacggtatgagtgcccatcgtttgtcgcaggaattaggcattccctatgaagaagctgcggcgttcattcagcgctactttcaaagctatcccaaagttaaagcatggatcgagaagactctcgaagaaggccgcacacgtggttacgtagagaccttatttggacgtcgccgctatgttcccgatttaaacgctcgcgtgaaatctgtccgtgaagccgccgaacgcatggcgttcaacatgcctgtacagggcacggcagctgacctcatgaaacttgcaatggtgcgcctttttccacaattgcgtgaagttggtgcccgcatgctcttgcaggtccacgatgaactcttgttagaagcgccaaaagagcgtgcggaagaggtggcagccctcgcgaaagaggttatggaaggcgtgtggcccttagcggtgcctcttgaagtcgaagttggtattggcgaggattggttggctgccaaaggataatga

SEQ ID NO: 360 - protein, 841 aa, synthetic construct
  REGION 1..841: note = Variant of DNA polymerase I from Thermus sp. strain 2.9
MHHHHHHGGSGMLPLFEPKGRVLLVDGHHLAYRNFFALKGLTTSRGEPVQGVYGFAKSLLKALKEDGDVVIVVFDAKAPSFRHEAYEAYKAGRAPTPEDFPRQLALMKELVDLLGLERLEVPGFEADDVLATLAKKAEREGYEVQILTADRDLFQLLSPRISVLHPEGHRITPEWLWEKYGLRPEQWVDFRALAGDPSDNIPGVKGIGEKTALKLLKEWGSLENLLKNLDQVKPASVREKILAHLEDLKLSRELSRVRTDLPLEVDFRGRREPDWEGLKAFLERLEFGSLLHEFGLTESPLPAEEAPWPPPEGAFLGYRLSRPEPMWAELLALAASAQGRVYRAEDPHGALRGLKEVRGLLAKDLAVVALREGLDLPPTDDPMLLAYLLDPSNTTPEGVARRYGGEWTEDAGERALLAERLHANLLGRLQGEERLLWLYEEVEKPLSRVLAHMEATGVKLDVAYLEALSLEVAAEMRRLEEEVFRLAGHSFNLNSRDQLERVLFDELGLPPIGKTEKTGKRSTSAAVLEALREVHPIVDKILQYRELAKLKGTYIDPLPALVHPKTGRLHTRFNQTATATGRLSSSDPNLQNIPVRTPLGQKIRKAFVAEEGWRLVALDYSQIELRVLAHLSGDENLIRVFQEGRDIHTQTASWMFGLSAEAIDPLMRRAAKTINFGVLYGMSAHRLSQELGIPYEEAAAFIQRYFQSYPKVKAWIEKTLEEGRTRGYVETLFGRRRYVPDLNARVKSVREAAERMAFNMPVQGTAADLMKLAMVRLFPQLREVGARMLLQVHDELLLEAPKERAEEVAALAKEVMEGVWPLAVPLEVEVGIGEDWLAAKG

SEQ ID NO: 361 - DNA, 2529 bp, synthetic construct
  misc_feature 1..2529: note = Variant of DNA polymerase I from Thermus sp. strain 2.9
  source 1..2529: mol_type = other DNA
atgcaccatcatcatcatcatggcggtagcggcatgttaccgttgttcgaacctaaaggtcgcgtgcttctggttgatggccatcatctcgcgtatcgtaacttctttgccctgaaaggattaaccaccagccgtggcgagccggtacagggtgtctacggctttgcaaagtcgctcctgaaagctctgaaagaagacggtgatgtggtgattgttgtctttgatgcgaaagcgccaagttttcgccacgaagcgtacgaagcttacaaagccgggcgtgctccaacgccggaagactttcctcgccaattggcgcttatgaaggaattagtggatttgcttggcctcgaacgcttggaagttcccggtttcgaggcagacgacgtattagcgactctcgcaaagaaagccgaacgtgagggctatgaagtccatatcttgacagcagatcgcgatcttttccagcttttatctccgcgcatttccgtgttacacccggaagggcatcgtatcaccccggaatggctctgggagaaatatggtttgcgtcccgaacaatgggtggattttcgcgccttagcgggcgatccgagcgacaatattccgggagttaaaggtatcggcgagaagacggcgctcaagctccttaaagaatgggggtcgttggagaacttgcttaagaatttagatcaggtcaaaccagcttcagtgcgtgagaagattcttgcacacctcgaagacctcaaattaagccgcgaattggtccgtgtacgcaccgatttgccgctcgaagttgatttccgtggccgccgcgaacctgactgggagggtcttaaagcgtttttagagcgtcttgaatttggttcgctcttgcatgaattcggccttttagaaagcccgttaccagccgaagaagcaccttggccaccgcccgaaggcgcgtttttaggttaccgtttgagtcgcccggaaccgatgtgggccgaattattggctcttgcagcgtctgcccagggacgtgtgtatcgcgcggaagaccctcatggtgcgctccgtggcctcaaagaagtccgtggactccttgccaaagacttagctgttgttgcattgcgcgaaggtcttgatttacctccgactgatgatccaatgcttcttgcgtacctcttggacccgtcaaacacgacgcccgaacgcgtagcccgtcgttacggcggcgagtggaccgaagatgcaggtgagcgcgcgttattggccgaacgtttgcacgccaatttattaggacgtttgcaaggcgaggaacgtctcctctggctttacgaagaagtggagaaaccattgagtcgcgtgctcgcgcatatggaagctaccggtgtcaaattagacgtggcgtatttggaggcactcagccttgaagccgctgccgaactgcgccgcttggaggaagaagtattccgtttagcaggccactcctttaaccttaattctcgcgatcagttagaacgtgtgttgttcgatgaacttggtctccctcctatcaccaagacagagaagaccggtaaacgtagcacttcagcggcggttttagaagctcttcgcgaagtccatcccattgtggacaagatcttgcagtaccgcgaactcgcgaaattgaaaggcacctatattgaccgtcttccggcattagtccacccgaaaacgggacgcctccatacccgcttcaaccaaacagccacggcgaccggtcgtttgtcctcctctgatccaaaccttcagaatattccagtacgtaccccattgggccagaaaatccgcaaagcgtttgtagctgaggagggttggcgtttagtggccctcgattatagccaaattgaattacgtgtccttgcccatctttctggcgatgagaacctcatccgcgtgtttcaggaaggccgcgacattcacactcaaacggcaagctggatgtttggagtgtcatcggaagcgatcgatcctttgatgcgtcgtgcagcgaagaccatcaatttcggtgttctctacggtatgagtgcccatcgtttgtcgcaggaattaggcattccctatgaagaagctgcggcgttcattcagcgctactttcaaagctatcccaaagttaaagcatggatcgagaagactctcgaagaaggccgcacacgtggttacgtagagaccttatttggacgtcgccgctatgttcccgatttaaacgctcgcgtgaaatctgtccgtgaagccgccgaacgcatggcgtttaacatgcctgtacagggcacggcagctgacctcatgaaacttgcaatggtgcgcctttttccacaattgcgtgaagttggtgcccgcatgctcttgcaggtccacgatgaactcttgttagaagcgccaaaagagcgtgcggaagaggtggcagccctcgcgaaagaggttatggaaggcgtgtggcccttagcggtgcctcttgaagtcgaagttggtattggcgaggattggttggctgccaaaggataatga

SEQ ID NO: 362 - protein, 841 aa, synthetic construct
  REGION 1..841: note = Variant of DNA polymerase I from Thermus sp. strain 2.9
MHHHHHHGGSGMLPLFEPKGRVLLVDGHHLAYRNFFALKGLTTSRGEPVQGVYGFAKSLLKALKEDGDVVIVVFDAKAPSFRHEAYEAYKAGRAPTPEDFPRQLALMKELVDLLGLERLEVPGFEADDVLATLAKKAEREGYEVHILTADRDLFQLLSPRISVLHPEGHRITPEWLWEKYGLRPEQWVDFRALAGDPSDNIPGVKGIGEKTALKLLKEWGSLENLLKNLDQVKPASVREKILAHLEDLKLSRELVRVRTDLPLEVDFRGRREPDWEGLKAFLERLEFGSLLHEFGLLESPLPAEEAPWPPPEGAFLGYRLSRPEPMWAELLALAASAQGRVYRAEDPHGALRGLKEVRGLLAKDLAVVALREGLDLPPTDDPMLLAYLLDPSNTTPERVARRYGGEWTEDAGERALLAERLHANLLGRLQGEERLLWLYEEVEKPLSRVLAHMEATGVKLDVAYLEALSLEAAAELRRLEEEVFRLAGHSFNLNSRDQLERVLFDELGLPPITKTEKTGKRSTSAAVLEALREVHPIVDKILQYRELAKLKGTYIDRLPALVHPKTGRLHTRFNQTATATGRLSSSDPNLQNIPVRTPLGQKIRKAFVAEEGWRLVALDYSQIELRVLAHLSGDENLIRVFQEGRDIHTQTASWMFGVSSEAIDPLMRRAAKTINFGVLYGMSAHRLSQELGIPYEEAAAFIQRYFQSYPKVKAWIEKTLEEGRTRGYVETLFGRRRYVPDLNARVKSVREAAERMAFNMPVQGTAADLMKLAMVRLFPQLREVGARMLLQVHDELLLEAPKERAEEVAALAKEVMEGVWPLAVPLEVEVGIGEDWLAAKG

SEQ ID NO: 363 - DNA, 2529 bp, synthetic construct
  misc_feature 1..2529: note = Variant of DNA polymerase I from Thermus sp. strain 2.9
  source 1..2529: mol_type = other DNA
atgcaccatcatcatcatcatggcggtagcggcatgttaccgttgttcgaacctaaaggtcgcgtgcttctggttgatggccatcatctcgcgtatcgtaacttctttgccctgaaaggattaaccaccagccgtggcgagccggtacagggtgtctacggctttgcaaagtcgctcctgaaagctctgaaagaagacggtgatgtggtgattgttgtctttgatgcgaaagcgccaagttttcgccacgaagcgtacgaagcttacaaagccgggcgtgctccaacgccggaagactttcctcgccaattggcgcttatgaaggaattagtggatttgcttggcctcgaacgcttggaagttcccggtttcgaggcagacgacgtattagcgactctcgcaaagaaagccgaacgtgagggctatgaagtccagatcttgacagcagatcgcgatcttttccagcttttatctccgcgcatttccgtgttacacccggaagggcatcgtatcaccccggaatggctctgggagaaatatggtttgcgtcccgaacaatgggtggattttcgcgccttagcgggcgatccgagcgacaatattccgggagttaaaggtatcggcgagaagacggcgctcaagctccttaaagaatgggggtcgttggagaacttgcttaagaatttagatcaggtcaaaccagcttcagtgcgtgagaagattcttgcacacctcgaagacctcaaattaagccgcgaattggtccgtgtacgcaccgatttgccgctcgaagttgatttccgtggccgccgcgaacctgactgggagggtcttaaagcgtttttagagcgtcttgaatttggttcgctcttgcatgaattcggccttttagaaagcccgttaccagccgaagaagcaccttggccaccgcccgaaggcgcgtttttaggttaccgtttgagtcgcccggaaccgatgtgggccgaattattggctcttgcagcgtctgcccagggacgtgtgtatcgcgcggaagaccctcatggtgcgctccgtggcctcaaagaagtccgtggactccttgccaaagacttagctgttgttgcattgcgcgaaggtcttgatttacctccgactgatgatccaatgcttcttgcgtacctcttggactcgtcaaacacgacgcccgaaggcgtagcccgtcgttacggcggcgagtggaccgaagatgcaggtgagcgcgcgttattggccgaacgtttgcacgccaatttattaggacgtttgcaaggcgaggaacgtctcctctggctttacgaagaagtggagaaaccattgagtcgcgtgctcgcgcatatggaagctaccggtgtcaaattagacgtggcgtatttggaggcactcagccttgaagtcgctgccgaaatgcgccgcttggaggaagaagtattccgtttagcaggccactcctttaaccttaattctcgcgatcagttagaacgtgtgttgttcgatgaacttggtctccctcctatcggcaagacagagaagaccggtaaacgtagcacttcagcggcggttttagaagctcttcgcgaagtccatcccattgtggacaagatcttgcagtaccgcgaactcgcgaaattgaaaggcacctatattgaccctcttccggcattagtccacccgaaaacgggacgcctccatacccgcttcaaccaaacagccacggcgaccggtcgtttgtcctcctctgatccaaaccttcagaatattccagtacgtaccccattgggccagaagatccgcaaagcgtttgtagctgaggagggttggcgtttagtggccctcgattatagccaaattgaattacgtgtccttgcccatctttctggcgatgagaacctcatccgcgtgtttcaggaaggccgcgacattcacactcaaacggcaagctggatgtttggattatcagctgaagcgatcgatcctttgatgcgtcgtgcagcgaagaccatcaatttcggtgttctctacggtatgagtgcccatcgtttgtcgcaggaattaggcattccctatgaagaagctgcggcgttcattcagcgctactttcaaagctatcccaaagttaaagcatggatcgagaagactctcgaagaaggccgcacacgtggttacgtagagaccttatttggacgtcgccgctatgttcccgatttaaacgctcgcgtgaaatctgtccgtgaagccgccgaacgcatggcgttcaacatgcctgtacagggcacggcagctgacctcatgaaacttgcaatggtgcgcctttttccacaattgcgtgaagttggtgcccgcatgctcttgcaggtccacgatgaactcttgttagaagcgccaaaagagcgtgcggaagaggtggcagccctcgcgaaagaggttatggaaggcgtgtggcccttagcggtgcctcttgaagtcgaagttggtattggcgaggattggttggctgccaaaggataatga

SEQ ID NO: 364 - protein, 841 aa, synthetic construct
  REGION 1..841: note = Variant of DNA polymerase I from Thermus sp. strain 2.9
MHHHHHHGGSGMLPLFEPKGRVLLVDGHHLAYRNFFALKGLTTSRGEPVQGVYGFAKSLLKALKEDGDVVIVVFDAKAPSFRHEAYEAYKAGRAPTPEDFPRQLALMKELVDLLGLERLEVPGFEADDVLATLAKKAEREGYEVQILTADRDLFQLLSPRISVLHPEGHRITPEWLWEKYGLRPEQWVDFRALAGDPSDNIPGVKGIGEKTALKLLKEWGSLENLLKNLDQVKPASVREKILAHLEDLKLSRELVRVRTDLPLEVDFRGRREPDWEGLKAFLERLEFGSLLHEFGLLESPLPAEEAPWPPPEGAFLGYRLSRPEPMWAELLALAASAQGRVYRAEDPHGALRGLKEVRGLLAKDLAVVALREGLDLPPTDDPMLLAYLLDSSNTTPEGVARRYGGEWTEDAGERALLAERLHANLLGRLQGEERLLWLYEEVEKPLSRVLAHMEATGVKLDVAYLEALSLEVAAEMRRLEEEVFRLAGHSFNLNSRDQLERVLFDELGLPPIGKTEKTGKRSTSAAVLEALREVHPIVDKILQYRELAKLKGTYIDPLPALVHPKTGRLHTRFNQTATATGRLSSSDPNLQNIPVRTPLGQKIRKAFVAEEGWRLVALDYSQIELRVLAHLSGDENLIRVFQEGRDIHTQTASWMFGLSAEAIDPLMRRAAKTINFGVLYGMSAHRLSQELGIPYEEAAAFIQRYFQSYPKVKAWIEKTLEEGRTRGYVETLFGRRRYVPDLNARVKSVREAAERMAFNMPVQGTAADLMKLAMVRLFPQLREVGARMLLQVHDELLLEAPKERAEEVAALAKEVMEGVWPLAVPLEVEVGIGEDWLAAKG

SEQ ID NO: 365 - DNA, 2529 bp, synthetic construct
  misc_feature 1..2529: note = Variant of DNA polymerase I from Thermus sp. strain 2.9
  source 1..2529: mol_type = other DNA
atgcaccatcatcatcatcatggcggtagcggcatgttaccgttgttcgaacctaaaggtcgcgtgcttctggttgatggccatcatctcgcgtatcgtaacttctttgccctgaaaggattaaccaccagccgtggcgagccggtacagggtgtctacggctttgcaaagtcgctcctgaaagctctgaaagaagacggtgatgtggtgattgttgtctttgatgcgaaagcgccaagttttcgccacgaagcgtacgaagcttacaaagccgggcgtgctccaacgccggaagactttcctcgccaattggcgcttatgaaggaattagtggatttgcttggcctcgaacgcttggaagttcccggtttcgaggcagacgacgtattagcgactctcgcaaagaaagccgaacgtgagggctatgaagtccatatcttgacagcagatcgcgatcttttccagcttttatctccgcgcatttccgtgttacacccggaagggcatcgtatcaccccggaatggctctgggagaaatatggtttgcgtcccgaacaatgggtggattttcgcgccttagcgggcgatccgagcgacaatattccgggagttaaaggtatcggcgagaagacggcgctcaagctccttaaagaatgggggtcgttggagaacttgcttaagaatttagatcaggtcaaaccagcttcagtgcgtgagaagattcttgcacacctcgaagacctcaaattaagccgcgaattgtcgcgtgtacgcaccgatttgccgctcgaagttgatttccgtggccgccgcgaacctgactgggagggtcttaaagcgtttttagagcgtcttgaatttggttcgctcttgcatgaattcggccttttagaaagcccgttaccagccgaagaagcaccttggccaccgcccgaaggcgcgtttttaggttaccgtttgagtcgcccggaaccgatgtgggccgaattattggctcttgcagcgtctgcccagggacgtgtgtatcgcgcggaagaccctcatggtgcgctccgtggcctcaaagaagtccgtggactccttgccaaagacttagctgttgttgcattgcgcgaaggtcttgatttacctccgactgatgatccaatgcttcttgcgtacctcttggactcgtcaaacacgacgcccgaaggcgtagcccgtcgttacggcggcgagtggaccgaagatgcaggtgagcgcgcgttattggccgaacgtttgcacgccaatttattaggacgtttgcaaggcgaggaacgtctcctctggctttacgaagaagtggagaaaccattgagtcgcgtgctcgcgcatatggaagctaccggtgtcaaattagacgtggcgtatttggaggcactcagccttgaagtcgctgccgaaatgcgccgcttggaggaagaagtattccgtttagcaggccactcctttaaccttaattctcgcgatcagttagaacgtgtgttgttcgatgaacttggtctccctcctatcaccaagacagagaagaccggtaaacgtagcacttcagcggcggttttagaagctcttcgcgaagtccatcccattgtggacaagatcttgcagtaccgcgaactcgcgaaattgaaaggcacctatattgaccgtcttccggcattagtccacccgaaaacgggacgcctccatacccgcttcaaccaaacagccacggcgaccggtcgtttgtcctcctctgatccaaaccttcagaatattccagtacgtaccccattgggccagcatatccgcaaagcgtttgtagctgaggagggttggcgtttagtggccctcgattatagccaaattgaattacgtgtccttgcccatctttctggcgatgagaacctcatccgcgtgtttcaggaaggccgcgacattcacactcaaacggcaagctggatgtttggattatcagctgaagcgatcgatcctttgatgcgtcgtgcagcgaagaccatcaatttcggtgttctctacggtatgagtgcccatcgtttgtcgcaggaattaggcattccctatgaagaagctgcggcgttcattcagcgctactttcaaagctatcccaaagttaaagcatggatcgagaagactctcgaagaaggccgcacacgtggttacgtagagaccttatttggacgtcgccgctatgttcccgatttaaatgctcgcgtgaaatctgtccgtgaagccgccgaacgcatggcgttcaacatgcctgtacagggcacggcagctgacctcatgaaacttgcaatggtgcgcctttttccacaattgcgtgaagttggtgcccgcatgctcttgcaggtccacgatgaactcttgttagaagcgccaaaagagcgtgcggaagaggtggcagccctcgcgaaagaggttatggaaggcgtgtggcccttagcggtgcctcttgaagtcgaagttggtattggcgaggattggttggctgccaaaggataatga

SEQ ID NO: 366 - protein, 841 aa, synthetic construct
  REGION 1..841: note = Variant of DNA polymerase I from Thermus sp. strain 2.9
MHHHHHHGGSGMLPLFEPKGRVLLVDGHHLAYRNFFALKGLTTSRGEPVQGVYGFAKSLLKALKEDGDVVIVVFDAKAPSFRHEAYEAYKAGRAPTPEDFPRQLALMKELVDLLGLERLEVPGFEADDVLATLAKKAEREGYEVHILTADRDLFQLLSPRISVLHPEGHRITPEWLWEKYGLRPEQWVDFRALAGDPSDNIPGVKGIGEKTALKLLKEWGSLENLLKNLDQVKPASVREKILAHLEDLKLSRELSRVRTDLPLEVDFRGRREPDWEGLKAFLERLEFGSLLHEFGLLESPLPAEEAPWPPPEGAFLGYRLSRPEPMWAELLALAASAQGRVYRAEDPHGALRGLKEVRGLLAKDLAVVALREGLDLPPTDDPMLLAYLLDSSNTTPEGVARRYGGEWTEDAGERALLAERLHANLLGRLQGEERLLWLYEEVEKPLSRVLAHMEATGVKLDVAYLEALSLEVAAEMRRLEEEVFRLAGHSFNLNSRDQLERVLFDELGLPPITKTEKTGKRSTSAAVLEALREVHPIVDKILQYRELAKLKGTYIDRLPALVHPKTGRLHTRFNQTATATGRLSSSDPNLQNIPVRTPLGQHIRKAFVAEEGWRLVALDYSQIELRVLAHLSGDENLIRVFQEGRDIHTQTASWMFGLSAEAIDPLMRRAAKTINFGVLYGMSAHRLSQELGIPYEEAAAFIQRYFQSYPKVKAWIEKTLEEGRTRGYVETLFGRRRYVPDLNARVKSVREAAERMAFNMPVQGTAADLMKLAMVRLFPQLREVGARMLLQVHDELLLEAPKERAEEVAALAKEVMEGVWPLAVPLEVEVGIGEDWLAAKG

SEQ ID NO: 367 - DNA, 2529 bp, synthetic construct
  misc_feature 1..2529: note = Variant of DNA polymerase I from Thermus sp. strain 2.9
  source 1..2529: mol_type = other DNA
atgcaccatcatcatcatcatggcggtagcggcatgttaccgttgttcgaacctaaaggtcgcgtgcttctggttgatggccatcatctcgcgtatcgtaacttctttgccctgaaaggattaaccaccagccgtggcgagccggtacagggtgtctacggctttgcaaagtcgctcctgaaagctctgaaagaagacggtgatgtggtgattgttgtctttgatgcgaaagcgccaagttttcgccacgaagcgtacgaagcttacaaagccgggcgtgctccaacgccggaagactttcctcgccaattggcgcttatgaaggaattagtggatttgcttggcctcgaacgcttggaagttcccggtttcgaggcagacgacgtattagcgactctcgcaaagaaagccgaacgtgagggctatgaagtccatatcttgacagcagatcgcgatcttttccagcttttatctccgcgcatttccgtgttacacccggaagggcatcgtatcaccccggaatggctctgggagaaatatggtttgcgtcccgaacaatgggtggattttcgcgccttagcgggcgatccgagcgacaatattccgggagttaaaggtatcggcgagaagacggcgctcaagctccttaaagaatgggggtcgttggagaacttgcttaagaatttagatcaggtcaaaccagcttcagtgcgtgagaagattcttgcacacctcgaagacctcaaattaagccgcgaattgtcgcgtgtacgcaccgatttgccgctcgaagttgatttccgtggccgccgcgaacctgactgggagggtcttaaagcgtttttagagcgtcttgaatttggttcgctcttgcatgaattcggccttttagaaagcccgttaccagccgaagaagcaccttggccaccgcccgaaggcgcgtttttaggttaccgtttgagtcgcccggaaccgatgtgggccgaattattggctcttgcagcgtctgcccagggacgtgtgtatcgcgcggaagaccctcatggtgcgctccgtggcctcaaagaagtccgtggactccttgccaaagacttagctgttgttgcattgcgcgaaggtcttgatttacctccgactgatgatccaatgcttcttgcgtacctcttggactcgtcaaacacgacgcccgaaggcgtagcccgtcgttacggcggcgagtggaccgaagatgcaggtgagcgcgcgttattggccgaacgtttgcacgccaatttattaggacgtttgcaaggcgaggaacgtctcctctggctttacgaagaagtggagaaaccattgagtcgcgtgctcgcgcatatggaagctaccggtgtcaaattagacgtggcgtatttggaggcactcagccttgaagccgctgccgaactgcgccgcttggaggaagaagtattccgtttagcaggccactcctttaaccttaattctcgcgatcagttagaacgtgtgttgttcgatgaacttggtctccctcctatcaccaagacagagaagaccggtaaacgtagcacttcagcggcggttttagaagctcttcgcgaagtccatcccattgtggacaagatcttgcagtaccgcgaactcgcgaaattgaaaggcacctatattgaccgtcttccggcattagtccacccgaaaacgggacgcctccatacccgcttcaaccaaacagccacggcgaccggtcgtttgtcctcctctgatccaaaccttcagaatattccagtacgtaccccattgggccagaaaatccgcaaagcgtttgtagctgaggagggttggcgtttagtggccctcgattatagccaaattgaattacgtgtccttgcccatctttctggcgatgagaacctcatccgcgtgtttcaggaaggccgcgacattcacactcaaacggcaagctggatgtttggagtgtcagcggaagcgatcgatcctttgatgcgtcgtgcagcgaagaccatcaatttcggtgttctctacggtatgagtgccgcgcgtttgtcgcaggaattaggcattccctatgaagaagctgcggcgttcattcagcgctactttcaaagctatcccaaagttaaagcatggatcgagaagactctcgaagaaggccgcacacgtggttacgtagagaccttatttggacgtcgccgctatgttcccgatttaaacgctcgcgtgaaatctgtccgtgaagccgccgaacgcatggcgtggaacatgcctgtacagggcacggcagctgacctcatgaaacttgcaatggtgcgcctttttccacaattgcgtgaagttggtgcccgcatgctcttgcaggtccacgatgaactcttgttagaagcgccaaaagagcgtgcggaagaggtggcagccctcgcgaaagaggttatggaaggcgtgtggcccttagcggtgcctcttgaagtcgaagttggtattggcgaggattggttggctgccaaaggataatga

SEQ ID NO: 368 - protein, 841 aa, synthetic construct
  REGION 1..841: note = Variant of DNA polymerase I from Thermus sp. strain 2.9
MHHHHHHGGSGMLPLFEPKGRVLLVDGHHLAYRNFFALKGLTTSRGEPVQGVYGFAKSLLKALKEDGDVVIVVFDAKAPSFRHEAYEAYKAGRAPTPEDFPRQLALMKELVDLLGLERLEVPGFEADDVLATLAKKAEREGYEVHILTADRDLFQLLSPRISVLHPEGHRITPEWLWEKYGLRPEQWVDFRALAGDPSDNIPGVKGIGEKTALKLLKEWGSLENLLKNLDQVKPASVREKILAHLEDLKLSRELSRVRTDLPLEVDFRGRREPDWEGLKAFLERLEFGSLLHEFGLLESPLPAEEAPWPPPEGAFLGYRLSRPEPMWAELLALAASAQGRVYRAEDPHGALRGLKEVRGLLAKDLAVVALREGLDLPPTDDPMLLAYLLDSSNTTPEGVARRYGGEWTEDAGERALLAERLHANLLGRLQGEERLLWLYEEVEKPLSRVLAHMEATGVKLDVAYLEALSLEAAAELRRLEEEVFRLAGHSFNLNSRDQLERVLFDELGLPPITKTEKTGKRSTSAAVLEALREVHPIVDKILQYRELAKLKGTYIDRLPALVHPKTGRLHTRFNQTATATGRLSSSDPNLQNIPVRTPLGQKIRKAFVAEEGWRLVALDYSQIELRVLAHLSGDENLIRVFQEGRDIHTQTASWMFGVSAEAIDPLMRRAAKTINFGVLYGMSAARLSQELGIPYEEAAAFIQRYFQSYPKVKAWIEKTLEEGRTRGYVETLFGRRRYVPDLNARVKSVREAAERMAWNMPVQGTAADLMKLAMVRLFPQLREVGARMLLQVHDELLLEAPKERAEEVAALAKEVMEGVWPLAVPLEVEVGIGEDWLAAKG

SEQ ID NO: 369 - DNA, 2529 bp, synthetic construct
  misc_feature 1..2529: note = Variant of DNA polymerase I from Thermus sp. strain 2.9
  source 1..2529: mol_type = other DNA
atgcaccatcatcatcatcatggcggtagcggcatgttaccgttgttcgaacctaaaggtcgcgtgcttctggttgatggccatcatctcgcgtatcgtaacttctttgccctgaaaggattaaccaccagccgtggcgagccggtacagggtgtctacggctttgcaaagtcgctcctgaaagctctgaaagaagacggtgatgtggtgattgttgtctttgatgcgaaagcgccaagttttcgccacgaagcgtacgaagcttacaaagccgggcgtgctccaacgccggaagactttcctcgccaattggcgcttatgaaggaattagtggatttgcttggcctcgaacgcttggaagttcccggtttcgaggcagacgacgtattagcgactctcgcaaagaaagccgaacgtgagggctatgaagtccagatcttgacagcagatcgcgatcttttccagcttttatctccgcgcgtctcggtgttacacccggaagggcatcgcatcaccccggaatggctctgggagaaatatggtttgcgtcccgaacaatgggtggattttcgcgccttagtaggcgatccgggcgacaatattccgggagttaaaggtatcggcgagaagacggcgctcaagctccttaaagaatgggggtcgttggagaacttgcttaagaatttagatcaggtcaaaccagagtcagtgcgtgagaagattcttgcacacctcgaagacctcaaattaagcctggaattgtcccgtgtacgcaccgatttgccgctcgaagttgatttccgtggccgccgcgaacctgactgggagggtcttaaagcgtttttagagcgtcttgaatttggttcgctcttgcatgaattcggccttttagaaagcccgttaccagccgaagaagcaccttggccaccgcccgaaggcgcgtttttaggttaccgtttgagtcgcccggaaccgatgtgggccgaattattggctcttgcagcgtctgcccagggacgtgtgtatcgcgcggaagaccctcatggtgcgctccgcggcctcaaagaagtccgtggactccttgccaaagacttagctgttgttgcattgcgcgaaggtcttgatttacctccgactgatgatccaatgcttcttgcgtacctcttggacccgtcaaacacgacgcccgaaggcgtagcccgtcgttacggcggcgagtggaccgaagatgcaggcgagcgcgcgttattggccgaacgtttgcaccagaatttattaggacgtttgcaaggcgaggaaaagctcctctggctttacgaagaagtggagaaaccattgagtcgcgtgctcgcgcatatggaagctaccggtgtcaaattagacgtggcgtatttggaggcactcagccttgaagttgctgccgaaatgcgccgcttggaggaagaagtattccgtttagcaggccactcctttaaccttaattctcgcgatcagttagaacgtgtgttgttcgatgaacttggtctccctcctatcggcaagacagagaagaccggtaaacgtagcacttcagcggcggttttagaagctcttcgcgaagtccatcccattgtggacaagatcttgcagtaccgcgaactcgcgaaattgaaaggcacctatattgaccctcttccggcattagtccacccgaaaacgggacgcctccatacccgcttcaaccaaacagccacggcgaccggtcgtttgtcctcctctgatccaaaccttcagaatattccagtacgtaccccattgggccagaagatccgccgcgcgtttgtagctgaggagggttggcgtttagtggccctcgattatagccaaattgaattacgtgtccttgcccatctttctggcgatgagaacctcatccgcgtgtttcaggaaggcaaagacattcacactcaaacggcaagctggatgtttggattatcggcggaagcgatcgatcctttgatgcgtcgtgcagcgaagaccatcaatttcggtgttctctacggtatgagtgcccatcgtttgtcgcaggaattaggcattccctatgaagaagctgtggcgttcattcagcgctactttcaaagctatcccaaagttaaagcatggatcgagaagactctcgaagaaggccgcacacgtggttacgtagagaccttatttggacgtcgccgctatgttcccgatttaaacgctcgcgtgaaatctgtccgtgaagccgccgaacgcatggcgttcaacatgcctgtacagggcacggcagctgacctcatgaaacttgcaatggtgcgcctttttccacaattgcgtgaagttggtgcccgcatgctcttgcaggtccacgatgaactcttgttagaagcgccaaaagagcgtgcggaagaggtggcagccctcgcgaaagaggttatggaaggcgtgtggcccttagcggtgcctcttgaagtcgaagttggtattggcgaggattggttggctgccaaaggataatga

SEQ ID NO: 370 - protein, 841 aa, synthetic construct
  REGION 1..841: note = Variant of DNA polymerase I from Thermus sp. strain 2.9
MHHHHHHGGSGMLPLFEPKGRVLLVDGHHLAYRNFFALKGLTTSRGEPVQGVYGFAKSLLKALKEDGDVVIVVFDAKAPSFRHEAYEAYKAGRAPTPEDFPRQLALMKELVDLLGLERLEVPGFEADDVLATLAKKAEREGYEVQILTADRDLFQLLSPRVSVLHPEGHRITPEWLWEKYGLRPEQWVDFRALVGDPGDNIPGVKGIGEKTALKLLKEWGSLENLLKNLDQVKPESVREKILAHLEDLKLSLELSRVRTDLPLEVDFRGRREPDWEGLKAFLERLEFGSLLHEFGLLESPLPAEEAPWPPPEGAFLGYRLSRPEPMWAELLALAASAQGRVYRAEDPHGALRGLKEVRGLLAKDLAVVALREGLDLPPTDDPMLLAYLLDPSNTTPEGVARRYGGEWTEDAGERALLAERLHQNLLGRLQGEEKLLWLYEEVEKPLSRVLAHMEATGVKLDVAYLEALSLEVAAEMRRLEEEVFRLAGHSFNLNSRDQLERVLFDELGLPPIGKTEKTGKRSTSAAVLEALREVHPIVDKILQYRELAKLKGTYIDPLPALVHPKTGRLHTRFNQTATATGRLSSSDPNLQNIPVRTPLGQKIRRAFVAEEGWRLVALDYSQIELRVLAHLSGDENLIRVFQEGKDIHTQTASWMFGLSAEAIDPLMRRAAKTINFGVLYGMSAHRLSQELGIPYEEAVAFIQRYFQSYPKVKAWIEKTLEEGRTRGYVETLFGRRRYVPDLNARVKSVREAAERMAFNMPVQGTAADLMKLAMVRLFPQLREVGARMLLQVHDELLLEAPKERAEEVAALAKEVMEGVWPLAVPLEVEVGIGEDWLAAKG

SEQ ID NO: 371 - DNA, 2529 bp, synthetic construct
  misc_feature 1..2529: note = Variant of DNA polymerase I from Thermus sp. strain 2.9
  source 1..2529: mol_type = other DNA
atgcaccatcatcatcatcatggcggtagcggcatgttaccgttgttcgaacctaaaggtcgcgtgcttctggttgatggccatcatctcgcgtatcgtaacttctttgccctgaaaggattaaccaccagccgtggcgagccggtacagggtgtctacggctttgcaaagtcgctcctgaaagctctgaaagaagacggtgatgtggtgattgttgtctttgatgcgaaagcgccaagttttcgccacgaagcgtacgaagcttacaaagccgggcgtgctccaacgccggaagactttcctcgccaattggcgcttatgaaggaattagtggatttgcttggcctcgaacgcttggaagttcccggtttcgaggcagacgacgtattagcgactctcgcaaagaaagccgaacgtgagggctatgaagtccagatcttgacagcagatcgcgatcttttccagcttttatctccgcgcatttccgtgttacacccggaagggcatcgcatcaccccggaatggctctgggagaaatatggtttgcgtcccgaacaatgggtggattttcgcgccttagcgggcgatccgagcgacaatattccgggagttaaaggtatcggcgagaagacggcgctcaagctccttaaagaatgggggtcgttggagaacttgcttaagaatttagatcaggtcaaaccagcttcagtgcgtgagaagattcttgcacacctcgaagacctcaaattaagccgcgaattgtcccgtgtacgcaccgatttgccgctcgaagttgatttccgtggccgccgcgaacctgactgggagggtcttaaagcgtttttagagcgtcttgaatttggttcgctcttgcatgaattcggccttttagaaagcccgttaccagccgaagaagcaccttggccaccgcccgaaggcgcgtttttaggttacgttttgagtcgcccggaaccgatgtgggccgaattattggctcttgcagcgtctgcccagggacgtgtgtatcgcgcggaagaccctcatggtgcgctccgtggcctcaaagaagtccgtggactccttgccaaagacttagctgttgttgcattgcgcgaaggtcttgatttacctccgactgatgatccaatgcttcttgcgtacctcttggacccgtcaaacacgacgcccgaaggcgtagcccgtcgttacggcggcgagtggaccgaagatgcaggtgagcgcgcgttattggccgaacgtttgcacgccaatttattaggacgtttgcaaggcgaggaacgtctcctctggctttacgaagaagtggagaaaccattgagtcgcgtgctcgcgcatatggaagctaccggtgtcaaattagacgtggcgtatttggaggcactcagccttgaagttgctgccgaaatgcgccgcttggaggaagaagtattccgtttagcaggccactcctttaaccttaattctcgcgatcagttagaacgtgtgttgttcgatgaacttggtctccctcctatcggcaagacagagaagaccggtaaacgtagcacttcagcggcggttttagaagctcttcgcgaagtccatcccattgtggacaagatcttgcagtaccgcgaactcgcgaaattgaaaggcacctatattgaccctcttccggcattagtccacccgaaaacgggacgcctccatacccgcttcaaccaaacagccacggcgaccggtcgtttgtcctcctctgatccaaaccttcagaatattccagtacgtaccccattgggccagaagatccgcaaagcgtttgtagctgaggagggttggcgtttagtggccctcgattatagccaaattgaattacgtgtccttgcccatctttctggcgatgagaacctcatccgcgtgtttcaggaaggccgcgacattcacactcaaacggcaagctggatgtttggattatcagctgaagcgatcgatcctttgatgcgtcgtgcagcgaagaccatcaatttcggtgttctctacggtatgagtgcccatcgtttgtcgcaggaattaggcattccctatgaagaagctgcggcgttcattcagcgctactttcaaagctatcccaaagttaaagcatggatcgagaagactctcgaagaaggccgcacacgtggttacgtagagaccttatttggacgtcgccgctatgttcccgatttaaacgctcgcgtgaaatctgtccgtgaagccgccgaacgcatggcgttcaacatgcctgtacagggcacggcagctgacctcatgaaacttgcaatggtgcgcctttttccacaattgcgtgaagttggtgcccgcatgctcttgcaggtccacgatgaactcttgttagaagcgccaaaagagcgtgcggaagaggtggcagccctcgcgaaagaggttatggaaggcgtgtggcccttagcggtgcctcttgaagtcgaagttggtattggcgaggattggttggctgccaaaggataatga

SEQ ID NO: 372 - protein, 841 aa, synthetic construct
  REGION 1..841: note = Variant of DNA polymerase I from Thermus sp. strain 2.9
MHHHHHHGGSGMLPLFEPKGRVLLVDGHHLAYRNFFALKGLTTSRGEPVQGVYGFAKSLLKALKEDGDVVIVVFDAKAPSFRHEAYEAYKAGRAPTPEDFPRQLALMKELVDLLGLERLEVPGFEADDVLATLAKKAEREGYEVQILTADRDLFQLLSPRISVLHPEGHRITPEWLWEKYGLRPEQWVDFRALAGDPSDNIPGVKGIGEKTALKLLKEWGSLENLLKNLDQVKPASVREKILAHLEDLKLSRELSRVRTDLPLEVDFRGRREPDWEGLKAFLERLEFGSLLHEFGLLESPLPAEEAPWPPPEGAFLGYVLSRPEPMWAELLALAASAQGRVYRAEDPHGALRGLKEVRGLLAKDLAVVALREGLDLPPTDDPMLLAYLLDPSNTTPEGVARRYGGEWTEDAGERALLAERLHANLLGRLQGEERLLWLYEEVEKPLSRVLAHMEATGVKLDVAYLEALSLEVAAEMRRLEEEVFRLAGHSFNLNSRDQLERVLFDELGLPPIGKTEKTGKRSTSAAVLEALREVHPIVDKILQYRELAKLKGTYIDPLPALVHPKTGRLHTRFNQTATATGRLSSSDPNLQNIPVRTPLGQKIRKAFVAEEGWRLVALDYSQIELRVLAHLSGDENLIRVFQEGRDIHTQTASWMFGLSAEAIDPLMRRAAKTINFGVLYGMSAHRLSQELGIPYEEAAAFIQRYFQSYPKVKAWIEKTLEEGRTRGYVETLFGRRRYVPDLNARVKSVREAAERMAFNMPVQGTAADLMKLAMVRLFPQLREVGARMLLQVHDELLLEAPKERAEEVAALAKEVMEGVWPLAVPLEVEVGIGEDWLAAKG

SEQ ID NO: 373 - DNA, 2529 bp, synthetic construct
  misc_feature 1..2529: note = Variant of DNA polymerase I from Thermus sp. strain 2.9
  source 1..2529: mol_type = other DNA
atgcaccatcatcatcatcatggcggtagcggcatgttaccgttgttcgaacctaaaggtcgcgtgcttctggttgatggccatcatctcgcgtatcgtaacttctttgccctgaaaggattaaccaccagccgtggcgagccggtacagggtgtctacggctttgcaaagtcgctcctgaaagctctgaaagaagacggtgatgtggtgattgttgtctttgatgcgaaagcgccaagttttcgccacgaagcgtacgaagcttacaaagccgggcgtgctccaacgccggaagactttcctcgccaattggcgcttatgaaggaattagtggatttgcttggcctcgaacgcttggaagttcccggtttcgaggcagacgacgtattagcgactctcgcaaagaaagccgaacgtgagggctatgaagtccatatcttgacagcagatcgcgatcttttccagcttttatctccgcgcatttccgtgttacacccggaagggcatcgtatcaccccggaatggctctgggagaaatatggtttgcgtcccgaacaatgggtggattttcgcgccttagcgggcgatccgagcgacaatattccgggagttaaaggtatcggcgagaagacggcgctcaagctccttaaagaatgggggtcgttggagaacttgcttaagaatttagatcaggtcaaaccagcttcagtgcgtgagaagattcttgcacacctcgaagacctcaaattaagccgcgaattggtccgtgtacgcaccgatttgccgctcgaagttgatttccgtggccgccgcgaacctgactgggagggtcttaaagcgtttttagagcgtcttgaatttggttcgctcttgcatgaattcggccttttagaaagcccgttaccagccgaagaagcaccttggccaccgcccgaaggcgcgtttttaggttaccgtttgagtcgcccggaaccgatgtgggccgaattattggctcttgcagcgtctgcccagggacgtgtgtatcgcgcggaagaccctcatggtgcgctccgtggcctcaaagaagtccgtggactccttgccaaagacttagctgttgttgcattgcgcgaaggtcttgatttacctccgactgatgatccaatgcttcttgcgtacctcttggacccgtcaaacacgacgcccgaaggcgtagcccgtcgttacggcggcgagtggaccgaagatgcaggtgagcgcgcgttattggccgaacgtttgcacgccaatttattaggacgtttgcaaggcgaggaacgtctcctctggctttacgaagaagtggagaaaccattgagtcgcgtgctcgcgcatatggaagctaccggtgtcaaattagacgtggcgtatttggaggcactcagccttgaagccgctgccgaactgcgccgcttggaggaagaagtattccgtttagcaggccactcctttaaccttaattctcgcgatcagttagaacgtgtgttgttcgatgaacttggtctccctcctatcggtaagacagagaagaccggtaaacgtagcacttcagcggcggttttagaagctcttcgcgaagtccatcccattgtggacaagatcttgcagtaccgcgaactcgcgaaattgaaaggcacctatattgaccgtcttccggcattagtccacccgaaaacgggacgcctccatacccgcttcaaccaaacagccacggcgaccggtcgtttgtcctcctctgatccaaaccttcagaatattccagtacgtaccccattgggccagaaaatccgcaaagcgtttgtagctgaggagggttggcgtttagtggccctcgattatagccaaattgaattacgtgtccttgcccatctttctggcgatgagaacctcatccgcgtgtttcaggaaggccgcgacattcacactcaaacggcaagctggatgtttggactgtcagcggaagcgatcgatcctttgatgcgtcgtgcagcgaagaccatcaatttcggtgttctctacggtatgagtgccgcgcgtttgtcgcaggaattaggcattccctatgaagaagctgcggcgttcattcagcgctactttcaaagctatcccaaagttaaagcatggatcgagaagactctcgaagaaggccgcacacgtggttacgtagagaccttatttggacgtcgccgctatgttcccgatttaactgctcgcgtgaaatctgtccgtgaagccgccgaacgcatggcgtggaacatgcctgtacagggcacggcagctgacctcatgaaacttgcaatggtgcgcctttttccacaattgcgtgaagttggtgcccgcatgctcttgcaggtccacgatgaactcttgttagaagcgccaaaagagcgtgcggaagaggtggcagccctcgcgaaagaggttatggaaggcgtgtggcccttagcggtgcctcttgaagtcgaagttggtattggcgaggattggttggctgccaaaggataatga

SEQ ID NO: 374 - protein, 841 aa, synthetic construct
  REGION 1..841: note = Variant of DNA polymerase I from Thermus sp. strain 2.9
MHHHHHHGGSGMLPLFEPKGRVLLVDGHHLAYRNFFALKGLTTSRGEPVQGVYGFAKSLLKALKEDGDVVIVVFDAKAPSFRHEAYEAYKAGRAPTPEDFPRQLALMKELVDLLGLERLEVPGFEADDVLATLAKKAEREGYEVHILTADRDLFQLLSPRISVLHPEGHRITPEWLWEKYGLRPEQWVDFRALAGDPSDNIPGVKGIGEKTALKLLKEWGSLENLLKNLDQVKPASVREKILAHLEDLKLSRELVRVRTDLPLEVDFRGRREPDWEGLKAFLERLEFGSLLHEFGLLESPLPAEEAPWPPPEGAFLGYRLSRPEPMWAELLALAASAQGRVYRAEDPHGALRGLKEVRGLLAKDLAVVALREGLDLPPTDDPMLLAYLLDPSNTTPEGVARRYGGEWTEDAGERALLAERLHANLLGRLQGEERLLWLYEEVEKPLSRVLAHMEATGVKLDVAYLEALSLEAAAELRRLEEEVFRLAGHSFNLNSRDQLERVLFDELGLPPIGKTEKTGKRSTSAAVLEALREVHPIVDKILQYRELAKLKGTYIDRLPALVHPKTGRLHTRFNQTATATGRLSSSDPNLQNIPVRTPLGQKIRKAFVAEEGWRLVALDYSQIELRVLAHLSGDENLIRVFQEGRDIHTQTASWMFGLSAEAIDPLMRRAAKTINFGVLYGMSAARLSQELGIPYEEAAAFIQRYFQSYPKVKAWIEKTLEEGRTRGYVETLFGRRRYVPDLTARVKSVREAAERMAWNMPVQGTAADLMKLAMVRLFPQLREVGARMLLQVHDELLLEAPKERAEEVAALAKEVMEGVWPLAVPLEVEVGIGEDWLAAKG

SEQ ID NO: 375 - DNA, 2529 bp, synthetic construct
  misc_feature 1..2529: note = Variant of DNA polymerase I from Thermus sp. strain 2.9
  source 1..2529: mol_type = other DNA
atgcaccatcatcatcatcatggcggtagcggcatgttaccgttgttcgaacctaaaggtcgcgtgcttctggttgatggccatcatctcgcgtatcgtaacttctttgccctgaaaggattaaccaccagccgtggcgagccggtacagggtgtctacggctttgcaaagtcgctcctgaaagctctgaaagaagacggtgatgtggtgattgttgtctttgatgcgaaagcgccaagttttcgccacgaagcgtacgaagcttacaaagccgggcgtgctccaacgccggaagactttcctcgccaattggcgcttatgaaggaattagtggatttgcttggcctcgaacgcttggaagttcccggtttcgaggcagacgacgtattagcgactctcgcaaagaaagccgaacgtgagggctatgaagtccagatcttgacagcagatcgcgatcttttccagcttttatctccgcgcgtctcggtgttacacccggaagggcatcgcatcaccccggaatggctctgggagaaatatggtttgcgtcccgaacaatgggtggattttcgcgccttagtaggcgatccgagcgacaatattccgggagttaaaggtatcggcgagaagacggcgctcaagctccttaaagaatgggggtcgttggagaacttgcttaagaatttagatcaggtcaaaccagcttcagtgcgtgagaagattcttgcacacctcgaagacctcaaattaagcctggaattgtcccgtgtacgcaccgatttgccgctcgaagttgatttccgtggccgccgcgaacctgactgggagggtcttaaagcgtttttagagcgtcttgaatttggttcgctcttgcatgaattcggccttttagaaagcccgttaccagccgaagaagcaccttggccaccgcccgaaggcgcgtttttaggttaccgtttgagtcgctcggaaccgatgtgggccgaattattggctcttgcagcgtctgcccagggacgtgtgtatcgcgcggaagaccctcatggtgcgctcaaaggcctcaaagaagtccgtggactccttgccaaagacttagctgttgttgcattgcgcgaaggtcttgatttacctccgactgatgatccaatgcttcttgcgtacctcttggacccgtcaaacacgacgcccgaaggcgtagcccgtcgttacggcggcgagtggaccgaagatgcagccgagcgcgcgttattggccgaacgtttgcacgccaatttattaggacgtttgcaaggcgaggaacgtctcctctggctttacgaagaagtggagaaaccattgagtcgcgtgctcgcgcatatggaagctaccggtgtcaaattagacgtggcgtatttggaggcactcagccttgaagttgctgccgaaatgcgccgcttggaggaagaagtattccgtttagcaggccactcctttaaccttaattctcgcgatcagttagaacgtgtgttgttcgatgaacttggtctccctcctatcggcaagacagagaagaccggtaaacgtagcacttcagcggcggttttagaagctcttcgcgaagtccatcccattgtggacaagatcttgcagtaccgcgaactcgcgaaattgaaaggcacctatattgaccctcttccggcattagtccacccgaaaacgggacgcctccatacccgcttcaaccaaacagccacggcgaccggtcgtttgtcctcctctgatccaaaccttcagaatattccagtacgtaccccattgggccagaagatccgccgcgcgtttgtagctgaggagggttggcgtttagtggccctcgattatagccaaattgaattacgtgtccttgcccatctttctggcgatgagaacctcatccgcgtgtttcaggaaggccgtgacattcacactcaaacggcaagctggatgtttggattaccgccggaagcgatcgatcctttgatgcgtcgtgcagcgaagaccgttaatttcggtgttctctacggtatgagtgcccatcgtttgtcgcaggaattaggcattccctatgaagaagctgtggcgttcattcagcgctactttcaaagctatcccaaagttaaagcatggatcgagaagactctcgaagaaggccgcacacgtggttacgtagagaccttatttggacgtcgccgctatgttcccgatttaaacgctcgcgtgaaatctgtccgtgaagccgccgaacgcatggcgttcaacatgcctgtacagggcacggcagctgacctcatgaaacttgcaatggtgcgcctttttccacaattgcgtgaagttggtgcccgcatgctcttgcaggtccacgatgaactcttgttagaagcgccaaaagagcgtgcggaagaggtggcagccctcgcgaaagaggttatggaaggcgtgtggcccttagcggtgcctcttgaagtcgaagttggtattggcgaggattggttggctgccaaaggataatga

SEQ ID NO: 376 - protein, 841 aa, synthetic construct
  REGION 1..841: note = Variant of DNA polymerase I from Thermus sp. strain 2.9
MHHHHHHGGSGMLPLFEPKGRVLLVDGHHLAYRNFFALKGLTTSRGEPVQGVYGFAKSLLKALKEDGDVVIVVFDAKAPSFRHEAYEAYKAGRAPTPEDFPRQLALMKELVDLLGLERLEVPGFEADDVLATLAKKAEREGYEVQILTADRDLFQLLSPRVSVLHPEGHRITPEWLWEKYGLRPEQWVDFRALVGDPSDNIPGVKGIGEKTALKLLKEWGSLENLLKNLDQVKPASVREKILAHLEDLKLSLELSRVRTDLPLEVDFRGRREPDWEGLKAFLERLEFGSLLHEFGLLESPLPAEEAPWPPPEGAFLGYRLSRSEPMWAELLALAASAQGRVYRAEDPHGALKGLKEVRGLLAKDLAVVALREGLDLPPTDDPMLLAYLLDPSNTTPEGVARRYGGEWTEDAAERALLAERLHANLLGRLQGEERLLWLYEEVEKPLSRVLAHMEATGVKLDVAYLEALSLEVAAEMRRLEEEVFRLAGHSFNLNSRDQLERVLFDELGLPPIGKTEKTGKRSTSAAVLEALREVHPIVDKILQYRELAKLKGTYIDPLPALVHPKTGRLHTRFNQTATATGRLSSSDPNLQNIPVRTPLGQKIRRAFVAEEGWRLVALDYSQIELRVLAHLSGDENLIRVFQEGRDIHTQTASWMFGLPPEAIDPLMRRAAKTVNFGVLYGMSAHRLSQELGIPYEEAVAFIQRYFQSYPKVKAWIEKTLEEGRTRGYVETLFGRRRYVPDLNARVKSVREAAERMAFNMPVQGTAADLMKLAMVRLFPQLREVGARMLLQVHDELLLEAPKERAEEVAALAKEVMEGVWPLAVPLEVEVGIGEDWLAAKG

SEQ ID NO: 377 - DNA, 2529 bp, synthetic construct
  misc_feature 1..2529: note = Variant of DNA polymerase I from Thermus sp. strain 2.9
  source 1..2529: mol_type = other DNA
atgcaccatcatcatcatcatggcggtagcggcatgttaccgttgttcgaacctaaaggtcgcgtgcttctggttgatggccatcatctcgcgtatcgtaacttctttgccctgaaaggattaaccaccagccgtggcgagccggtacagggtgtctacggctttgcaaagtcgctcctgaaagctctgaaagaagacggtgatgtggtgattgttgtctttgatgcgaaagcgccaagttttcgccacgaagcgtacgaagcttacaaagccgggcgtgctccaacgccggaagactttcctcgccaattggcgcttatgaaggaattagtggatttgcttggcctcgaacgcttggaagttcccggtttcgaggcagacgacgtattagcgactctcgcaaagaaagccgaacgtgagggctatgaagtccagatcttgacagcagatcgcgatcttttccagcttttatctccgcgcatttccgtgttacacccggaagggcatcgcatcaccccggaatggctctgggagaaatatggtttgcgtcccgaacaatgggtggattttcgcgccttagtaggcgatccgagcgacaatattccgggagttaaaggtatcggcgagaagacggcgctcaagctccttaaagaatgggggtcgttggagaacttgcttaagaatttagatcaggtcaaaccagcttcagtgcgtgagaagattcttgcacacctcgaagacctcaaattaagccgcgaattgtcccgtgtacgcaccgatttgccgctcgaagttgatttccgtggccgccgcgaacctgactgggagggtcttaaagcgtttttagagcgtcttgaatttggttcgctcttgcatgaattcggccttttagaaagcccgttaccagccgaagaagcaccttggccaccgcccgaaggcgcgtttttaggttaccgtttgagtcgcccggaaccgatgtgggccgaattattggctcttgcagcgtctgcccagggacgtgtgtatcgcgcggaagaccctcatggtgcgctcaaaggcctcaaagaagtccgtggactccttgccaaagacttagctgttgttgcattgcgcgaaggtcttgatttacctccgactgatgatccaatgcttcttgcgtacctcttggacccgtcaaacacgacgcccgaaggcgtagcccgtcgttacggcggcgagtggaccgaagatgcaggtgagcgcgcgttattggccgaacgtttgcacgccaatttattaggacgtttgcaaggcgaggaacgtctcctctggctttacgaagaagtggagaaaccattgagtcgcgtgctcgcgcatatggaagctaccggtgtcaaattagacgtggcgtatttggaggcactcagccttgaagttgctgccgaaatgcgccgcttggaggaagaagtattccgtttagcaggccactcctttaaccttaattctcgcgatcagttagaacgtgtgttgttcgatgaacttggtctccctcctatcggcaagacagagaagaccggtaaacgtagcacttcagcggcggttttagaagctcttcgcgaagtccatcccattgtggacaagatcttgcagtaccgcgaactcgcgaaattgaaaggcacctatattgaccctcttccggcattagtccacccgaaaacgggacgcctccatacccgcttcaaccaaacagccacggcgaccggtcgtttgtcctcctctgatccaaaccttcagaatattccagtacgtaccccattgggccagaagatccgccgcgcgtttgtagctgaggagggttggcgtttagtggccctcgattatagccaaattgaattacgtgtccttgcccatctttctggcgatgagaacctcatccgcgtgtttcaggaaggcaaagacattcacactcaaacggcaagctggatgtttggattatcagctgaagcgatcgatcctttgatgcgtcgtgcagcgaagaccatcaatttcggtgttctctacggtatgagtgcccatcgtttgtcgcaggaattaggcattccctatgaagaagctgtggcgttcattcagcgctactttcaaagctatcccaaagttaaagcatggatcgagaagactctcgaagaaggccgcacacgtggttacgtagagaccttatttggacgtcgccgctatgttcccgatttaaacgctcgcgtgaaatctgtccgtgaagccgccgaacgcatggcgttcaacatgcctgtacagggcacggcagctgacctcatgaaacttgcaatggtgcgcctttttccacaattgcgtgaagttggtgcccgcatgctcttgcaggtccacgatgaactcttgttagaagcgccaaaagagcgtgcggaagaggtggcagccctcgcgaaagaggttatggaaggcgtgtggcccttagcggtgcctcttgaagtcgaagttggtattggcgaggattggttggctgccaaaggataatga

SEQ ID NO: 378 - protein, 841 aa, synthetic construct
  REGION 1..841: note = Variant of DNA polymerase I from Thermus sp. strain 2.9
MHHHHHHGGSGMLPLFEPKGRVLLVDGHHLAYRNFFALKGLTTSRGEPVQGVYGFAKSLLKALKEDGDVVIVVFDAKAPSFRHEAYEAYKAGRAPTPEDFPRQLALMKELVDLLGLERLEVPGFEADDVLATLAKKAEREGYEVQILTADRDLFQLLSPRISVLHPEGHRITPEWLWEKYGLRPEQWVDFRALVGDPSDNIPGVKGIGEKTALKLLKEWGSLENLLKNLDQVKPASVREKILAHLEDLKLSRELSRVRTDLPLEVDFRGRREPDWEGLKAFLERLEFGSLLHEFGLLESPLPAEEAPWPPPEGAFLGYRLSRPEPMWAELLALAASAQGRVYRAEDPHGALKGLKEVRGLLAKDLAVVALREGLDLPPTDDPMLLAYLLDPSNTTPEGVARRYGGEWTEDAGERALLAERLHANLLGRLQGEERLLWLYEEVEKPLSRVLAHMEATGVKLDVAYLEALSLEVAAEMRRLEEEVFRLAGHSFNLNSRDQLERVLFDELGLPPIGKTEKTGKRSTSAAVLEALREVHPIVDKILQYRELAKLKGTYIDPLPALVHPKTGRLHTRFNQTATATGRLSSSDPNLQNIPVRTPLGQKIRRAFVAEEGWRLVALDYSQIELRVLAHLSGDENLIRVFQEGKDIHTQTASWMFGLSAEAIDPLMRRAAKTINFGVLYGMSAHRLSQELGIPYEEAVAFIQRYFQSYPKVKAWIEKTLEEGRTRGYVETLFGRRRYVPDLNARVKSVREAAERMAFNMPVQGTAADLMKLAMVRLFPQLREVGARMLLQVHDELLLEAPKERAEEVAALAKEVMEGVWPLAVPLEVEVGIGEDWLAAKG

SEQ ID NO: 379 - DNA, 2529 bp, synthetic construct
  misc_feature 1..2529: note = Variant of DNA polymerase I from Thermus sp. strain 2.9
  source 1..2529: mol_type = other DNA
atgcaccatcatcatcatcatggcggtagcggcatgttaccgttgttcgaacctaaaggtcgcgtgcttctggttgatggccatcatctcgcgtatcgtaacttctttgccctgaaaggattaaccaccagccgtggcgagccggtacagggtgtctacggctttgcaaagtcgctcctgaaagctctgaaagaagacggtgatgtggtgattgttgtctttgatgcgaaagcgccaagttttcgccacgaagcgtacgaagcttacaaagccgggcgtgctccaacgccggaagactttcctcgccaattggcgcttatgaaggaattagtggatttgcttggcctcgaacgcttggaagttcccggtttcgaggcagacgacgtattagcgactctcgcaaagaaagccgaacgtgagggctatgaagtccagatcttgacagcagatcgcgatcttttccagcttttatctccgcgcatttccgtgttacacccggaagggcatcgtatcaccccggaatggctctgggagaaatatggtttgcgtcccgaacaatgggtggattttcgcgccttagcgggcgatccgagcgacaatattccgggagttaaaggtatcggcgagaagacggcgctcaagctccttaaagaatgggggtcgttggagaacttgcttaagaatttagatcaggtcaaaccagcttcagtgcgtgagaagattcttgcacacctcgaagacctcaaattaagccgcgaattgtcgcgtgtacgcaccgatttgccgctcgaagttgatttccgtggccgccgcgaacctgactgggagggtcttaaagcgtttttagagcgtcttgaatttggttcgctcttgcatgaattcggccttttagaaagcccgttaccagccgaagaagcaccttggccaccgcccgaaggcgcgtttttaggttaccgtttgagtcgcccggaaccgatgtgggccgaattattggctcttgcagcgtctgcccagggacgtgtgtatcgcgcggaagaccctcatggtgcgctccgtggcctcaaagaagtccgtggactccttgccaaagacttagctgttgttgcattgcgcgaaggtcttgatttacctccgactgatgatccaatgcttcttgcgtacctcttggactcgtcaaacacgacgcccgaaggcgtagcccgtcgttacggcggcgagtggaccgaagatgcaggtgagcgcgcgttattggccgaacgtttgcacgccaatttattaggacgtttgcaaggcgaggaacgtctcctctggctttacgaagaagtggagaaaccattgagtcgcgtgctcgcgcatatggaagctaccggtgtcaaattagacgtggcgtatttggaggcactcagccttgaagtcgctgccgaaatgcgccgcttggaggaagaagtattccgtttagcaggccactcctttaaccttaattctcgcgatcagttagaacgtgtgttgttcgatgaacttggtctccctcctatcggcaagacagagaagaccggtaaacgtagcacttcagcggcggttttagaagctcttcgcgaagtccatcccattgtggacaagatcttgcagtaccgcgaactcgcgaaattgaaaggcacctatattgaccctcttccggcattagtccacccgaaaacgggacgcctccatacccgcttcaaccaaacagccacggcgaccggtcgtttgtcctcctctgatccaaaccttcagaatattccagtacgtaccccattgggccagaagatccgcaaagcgtttgtagctgaggagggttggcgtttagtggccctcgattatagccaaattgaattacgtgtccttgcccatctttctggcgatgagaacctcatccgcgtgtttcaggaaggccgcgacattcacactcaaacggcaagctggatgtttggattatcagctgaagcgatcgatcctttgatgcgtcgtgcagcgaagaccatcaatttcggtgttctctacggtatgagtgcccatcgtttgtcgcaggaattaggcattccctatgaagaagctgcggcgttcattcagcgctactttcaaagctatcccaaagttaaagcatggatcgagaagactctcgaagaaggccgcacacgtggttacgtagagaccttatttggacgtcgccgctatgttcccgatttaaacgctcgcgtgaaatctgtccgtgaagccgccgaacgcatggcgtttaacatgcctgtacagggcacggcagctgacctcatgaaacttgcaatggtgcgcctttttccacaattgcgtgaagttggtgcccgcatgctcttgcaggtccacgatgaactcttgttagaagcgccaaaagagcgtgcggaagaggtggcagccctcgcgaaagaggttatggaaggcgtgtggcccttagcggtgcctcttgaagtcgaagttggtattggcgaggattggttggctgccaaaggataatga

SEQ ID NO: 380 - protein, 841 aa, synthetic construct
  REGION 1..841: note = Variant of DNA polymerase I from Thermus sp. strain 2.9
MHHHHHHGGSGMLPLFEPKGRVLLVDGHHLAYRNFFALKGLTTSRGEPVQGVYGFAKSLLKALKEDGDVVIVVFDAKAPSFRHEAYEAYKAGRAPTPEDFPRQLALMKELVDLLGLERLEVPGFEADDVLATLAKKAEREGYEVQILTADRDLFQLLSPRISVLHPEGHRITPEWLWEKYGLRPEQWVDFRALAGDPSDNIPGVKGIGEKTALKLLKEWGSLENLLKNLDQVKPASVREKILAHLEDLKLSRELSRVRTDLPLEVDFRGRREPDWEGLKAFLERLEFGSLLHEFGLLESPLPAEEAPWPPPEGAFLGYRLSRPEPMWAELLALAASAQGRVYRAEDPHGALRGLKEVRGLLAKDLAVVALREGLDLPPTDDPMLLAYLLDSSNTTPEGVARRYGGEWTEDAGERALLAERLHANLLGRLQGEERLLWLYEEVEKPLSRVLAHMEATGVKLDVAYLEALSLEVAAEMRRLEEEVFRLAGHSFNLNSRDQLERVLFDELGLPPIGKTEKTGKRSTSAAVLEALREVHPIVDKILQYRELAKLKGTYIDPLPALVHPKTGRLHTRFNQTATATGRLSSSDPNLQNIPVRTPLGQKIRKAFVAEEGWRLVALDYSQIELRVLAHLSGDENLIRVFQEGRDIHTQTASWMFGLSAEAIDPLMRRAAKTINFGVLYGMSAHRLSQELGIPYEEAAAFIQRYFQSYPKVKAWIEKTLEEGRTRGYVETLFGRRRYVPDLNARVKSVREAAERMAFNMPVQGTAADLMKLAMVRLFPQLREVGARMLLQVHDELLLEAPKERAEEVAALAKEVMEGVWPLAVPLEVEVGIGEDWLAAKG

SEQ ID NO: 381 - DNA, 2529 bp, synthetic construct
  misc_feature 1..2529: note = Variant of DNA polymerase I from Thermus sp. strain 2.9
  source 1..2529: mol_type = other DNA
atgcaccatcatcatcatcatggcggtagcggcatgttaccgttgttcgaacctaaaggtcgcgtgcttctggttgatggccatcatctcgcgtatcgtaacttctttgccctgaaaggattaaccaccagccgtggcgagccggtacagggtgtctacggctttgcaaagtcgctcctgaaagctctgaaagaagacggtgatgtggtgattgttgtctttgatgcgaaagcgccaagttttcgccacgaagcgtacgaagcttacaaagccgggcgtgctccaacgccggaagactttcctcgccaattggcgcttatgaaggaattagtggatttgcttggcctcgaacgcttggaagttcccggtttcgaggcagacgacgtattagcgactctcgcaaagaaagccgaacgtgagggctatgaagtccagatcttgacagcagatcgcgatcttttccagcttttatctccgcgcatttccgtgttacacccggaagggcatctgatcaccccggaatggctctgggagaaatatggtttgcgtcccgaacaatgggtggattttcgcgccttagtaggcgatccgagcgacaatattccgggagttaaaggtatcggcgagaagacggcgctcaagctccttaaagaatgggggtcgttggagaacttgcttaagaatttagatcaggtcaaaccagagtcagtgcgtgagaagattcttgcacacctcgaagacctcaaattaagccgcgaattgtcccgtgtacgcaccgatttgccgctcgaagttgatttccgtggccgccgcgaacctgactgggagggtcttaaagcgtttttagagcgtcttgaatttggttcgctcttgcatgaattcggccttttagaaagcccgttaccagccgaagaagcaccttggccaccgcccgaaggcgcgtttttaggttacgttttgagtcgcccggaaccgatgtgggccgaattattggctcttgcagcgtctgcccagggacgtgtgtatcgcgcggaagaccctcatggtgcgctccgcggcctcaaagaagtccgtggactccttgccaaagacttagctgttgttgcattgcgcgaaggtcttgatttacctccgactgatgatccaatgcttcttgcgtacctcttggacccgtcaaacacgacgcccgaaggcgtagcccgtcgttacggcggcgagtggaccgaagatgcagccgagcgcgcgttattggccgaacgtttgcacgccaatttattaggacgtttgcaaggcgaggaacgtctcctctggctttacgaagaagtggagaaaccattgagtcgcgtgctcgcgcatatggaagctaccggtgtcaaattagacgtggcgtatttggaggcactcagccttgaagttgctgccgaaattcgccgcttggaggaagaagtattccgtttagcaggccactcctttaaccttaattctcgcgatcagttagaacgtgtgttgttcgatgaacttggtctccctcctatcggcaagacagagaagaccggtaaacgtagcacttcagcggcggttttagaagctcttcgcgaagtccatcccattgtggacaagatcttgcagtaccgcgaactcgcgaaattgaaaggcacctatattgaccctcttccggcattagtccacccgaaaacgggacgcctccatacccgcttcaaccaaacagccacggcgaccggtcgtttgtcctcctcagatccaaaccttcagaatattccagtacgtaccccattgggccagaagatccgcaaagcgtttgtagctgaggagggttggcgtttagtggccctcgattatagccaaattgaattacgtgtccttgcccatctttctggcgatgagaacctcatccgcgtgtttcaggaaggccgcgacattcacactcaaacggcaagctggatgtttggattatcagctgaagcgatcgatcctttgatgcgtcgtgcagcgaagaccattaatttcggtgttctctacggtatgagtgcccatcgtttgtcgcaggaattaggcattccctatgaagaagctgtggcgttcattcagcgctactttcaaagctatcccaaagttaaagcatggatcgagaagactctcgaagaaggccgcacacgtggttacgtagagaccttatttggacgtcgccgctatgttcccgatttaaacgctcgcgtgaaatctgtccgtgaagccgccgaacgcatggcgttcaacatgcctgtacagggcacggcagctgacctcatgaaacttgcaatggtgcgcctttttccacaattgcgtgaagttggtgcccgcatgctcttgcaggtccacgatgaactcttgttagaagcgccaaaagagcgtgcggaagaggtggcagccctcgcgaaagaggttatggaaggcgtgtggcccttagcggtgcctcttgaagtcgaagttggtattggcgaggattggttggctgccaaaggataatga

SEQ ID NO: 382 - protein, 841 aa, synthetic construct
  REGION 1..841: note = Variant of DNA polymerase I from Thermus sp. strain 2.9
MHHHHHHGGSGMLPLFEPKGRVLLVDGHHLAYRNFFALKGLTTSRGEPVQGVYGFAKSLLKALKEDGDVVIVVFDAKAPSFRHEAYEAYKAGRAPTPEDFPRQLALMKELVDLLGLERLEVPGFEADDVLATLAKKAEREGYEVQILTADRDLFQLLSPRISVLHPEGHLITPEWLWEKYGLRPEQWVDFRALVGDPSDNIPGVKGIGEKTALKLLKEWGSLENLLKNLDQVKPESVREKILAHLEDLKLSRELSRVRTDLPLEVDFRGRREPDWEGLKAFLERLEFGSLLHEFGLLESPLPAEEAPWPPPEGAFLGYVLSRPEPMWAELLALAASAQGRVYRAEDPHGALRGLKEVRGLLAKDLAVVALREGLDLPPTDDPMLLAYLLDPSNTTPEGVARRYGGEWTEDAAERALLAERLHANLLGRLQGEERLLWLYEEVEKPLSRVLAHMEATGVKLDVAYLEALSLEVAAEIRRLEEEVFRLAGHSFNLNSRDQLERVLFDELGLPPIGKTEKTGKRSTSAAVLEALREVHPIVDKILQYRELAKLKGTYIDPLPALVHPKTGRLHTRFNQTATATGRLSSSDPNLQNIPVRTPLGQKIRKAFVAEEGWRLVALDYSQIELRVLAHLSGDENLIRVFQEGRDIHTQTASWMFGLSAEAIDPLMRRAAKTINFGVLYGMSAHRLSQELGIPYEEAVAFIQRYFQSYPKVKAWIEKTLEEGRTRGYVETLFGRRRYVPDLNARVKSVREAAERMAFNMPVQGTAADLMKLAMVRLFPQLREVGARMLLQVHDELLLEAPKERAEEVAALAKEVMEGVWPLAVPLEVEVGIGEDWLAAKG

SEQ ID NO: 383 - DNA, 2529 bp, synthetic construct
  misc_feature 1..2529: note = Variant of DNA polymerase I from Thermus sp. strain 2.9
  source 1..2529: mol_type = other DNA
atgcaccatcatcatcatcatggcggtagcggcatgttaccgttgttcgaacctaaaggtcgcgtgcttctggttgatggccatcatctcgcgtatcgtaacttctttgccctgaaaggattaaccaccagccgtggcgagccggtacagggtgtctacggctttgcaaagtcgctcctgaaagctctgaaagaagacggtgatgtggtgattgttgtctttgatgcgaaagcgccaagttttcgccacgaagcgtacgaagcttacaaagccgggcgtgctccaacgccggaagactttcctcgccaattggcgcttatgaaggaattagtggatttgcttggcctcgaacgcttggaagttcccggtttcgaggcagacgacgtattagcgactctcgcaaagaaagccgaacgtgagggctatgaagtccagatcttgacagcagatcgcgatcttttccagcttttatctccgcgcatttccgtgttacacccggaagggcatcgtatcaccccggaatggctctgggagaaatatggtttgcgtcccgaacaatgggtggattttcgcgccttagcgggcgatccgagcgacaatattccgggagttaaaggtatcggcgagaagacggcgctcaagctccttaaagaatgggggtcgttggagaacttgcttaagaatttagatcaggtcaaaccagcttcagtgcgtgagaagattcttgcacacctcgaagacctcaaattaagccgcgaattgtcgcgtgtacgcaccgatttgccgctcgaagttgatttccgtggccgccgcgaacctgactgggagggtcttaaagcgtttttagagcgtcttgaatttggttcgctcttgcatgaattcggccttttagaaagcccgttaccagccgaagaagcaccttggccaccgcccgaaggcgcgtttttaggttaccgtttgagtcgcccggaaccgatgtgggccgaattattggctcttgcagcgtctgcccagggacgtgtgtatcgcgcggaagaccctcatggtgcgctccgtggcctcaaagaagtccgtggactccttgccaaagacttagctgttgttgcattgcgcgaaggtcttgatttacctccgactgatgatccaatgcttcttgcgtacctcttggacccgtcaaacacgacgcccgaaggcgtagcccgtcgttacggcggcgagtggaccgaagatgcaggtgagcgcgcgttattggccgaacgtttgcacgccaatttattaggacgtttgcaaggcgaggaacgtctcctctggctttacgaagaagtggagaaaccattgagtcgcgtgctcgcgcatatggaagctaccggtgtcaaattagacgtggcgtatttggaggcactcagccttgaagtcgctgccgaaatgcgccgcttggaggaagaagtattccgtttagcaggccactcctttaaccttaattctcgcgatcagttagaacgtgtgttgttcgatgaacttggtctccctcctatcggcaagacagagaagaccggtaaacgtagcacttcagcggcggttttagaagctcttcgcgaagtccatcccattgtggacaagatcttgcagtaccgcgaactcgcgaaattgaaaggcacctatattgaccctcttccggcattagtccacccgaaaacgggacgcctccatacccgcttcaaccaaacagccacggcgaccggtcgtttgtcctcctctgatccaaaccttcagaatattccagtacgtaccccattgggccagcatatccgcaaagcgtttgtagctgaggagggttggcgtttagtggccctcgattatagccaaattgaattacgtgtccttgcccatctttctggcgatgagaacctcatccgcgtgtttcaggaaggccgcgacattcacactcaaacggcaagctggatgtttggattatcagctgaagcgatcgatcctttgatgcgtcgtgcagcgaagaccatcaatttcggtgttctctacggtatgagtgccgcgcgtttgtcgcaggaattaggcattccctatgaagaagctgcggcgttcattcagcgctactttcaaagctatcccaaagttaaagcatggatcgagaagactctcgaagaaggccgcacacgtggttacgtagagaccttatttggacgtcgccgctatgttcccgatttaaacgctcgcgtgaaatctgtccgtgaagccgccgaacgcatggcgtttaacatgcctgtacagggcacggcagctgacctcatgaaacttgcaatggtgcgcctttttccacaattgcgtgaagttggtgcccgcatgctcttgcaggtccacgatgaactcttgttagaagcgccaaaagagcgtgcggaagaggtggcagccctcgcgaaagaggttatggaaggcgtgtggcccttagcggtgcctcttgaagtcgaagttggtattggcgaggattggttggctgccaaaggataatga

SEQ ID NO: 384 - protein, 841 aa, synthetic construct
  REGION 1..841: note = Variant of DNA polymerase I from Thermus sp. strain 2.9
MHHHHHHGGSGMLPLFEPKGRVLLVDGHHLAYRNFFALKGLTTSRGEPVQGVYGFAKSLLKALKEDGDVVIVVFDAKAPSFRHEAYEAYKAGRAPTPEDFPRQLALMKELVDLLGLERLEVPGFEADDVLATLAKKAEREGYEVQILTADRDLFQLLSPRISVLHPEGHRITPEWLWEKYGLRPEQWVDFRALAGDPSDNIPGVKGIGEKTALKLLKEWGSLENLLKNLDQVKPASVREKILAHLEDLKLSRELSRVRTDLPLEVDFRGRREPDWEGLKAFLERLEFGSLLHEFGLLESPLPAEEAPWPPPEGAFLGYRLSRPEPMWAELLALAASAQGRVYRAEDPHGALRGLKEVRGLLAKDLAVVALREGLDLPPTDDPMLLAYLLDPSNTTPEGVARRYGGEWTEDAGERALLAERLHANLLGRLQGEERLLWLYEEVEKPLSRVLAHMEATGVKLDVAYLEALSLEVAAEMRRLEEEVFRLAGHSFNLNSRDQLERVLFDELGLPPIGKTEKTGKRSTSAAVLEALREVHPIVDKILQYRELAKLKGTYIDPLPALVHPKTGRLHTRFNQTATATGRLSSSDPNLQNIPVRTPLGQHIRKAFVAEEGWRLVALDYSQIELRVLAHLSGDENLIRVFQEGRDIHTQTASWMFGLSAEAIDPLMRRAAKTINFGVLYGMSAARLSQELGIPYEEAAAFIQRYFQSYPKVKAWIEKTLEEGRTRGYVETLFGRRRYVPDLNARVKSVREAAERMAFNMPVQGTAADLMKLAMVRLFPQLREVGARMLLQVHDELLLEAPKERAEEVAALAKEVMEGVWPLAVPLEVEVGIGEDWLAAKG

SEQ ID NO: 385 - DNA, 2529 bp, synthetic construct
  misc_feature 1..2529: note = Variant of DNA polymerase I from Thermus sp. strain 2.9
  source 1..2529: mol_type = other DNA
atgcaccatcatcatcatcatggcggtagcggcatgttaccgttgttcgaacctaaaggtcgcgtgcttctggttgatggccatcatctcgcgtatcgtaacttctttgccctgaaaggattaaccaccagccgtggcgagccggtacagggtgtctacggctttgcaaagtcgctcctgaaagctctgaaagaagacggtgatgtggtgattgttgtctttgatgcgaaagcgccaagttttcgccacgaagcgtacgaagcttacaaagccgggcgtgctccaacgccggaagactttcctcgccaattggcgcttatgaaggaattagtggatttgcttggcctcgaacgcttggaagttcccggtttcgaggcagacgacgtattagcgactctcgcaaagaaagccgaacgtgagggctatgaagtccagatcttgacagcagatcgcgatcttttccagcttttatctccgcgcatttccgtgttacacccggaagggcatcgtatcaccccggaatggctctgggagaaatatggtttgcgtcccgaacaatgggtggattttcgcgccttagcgggcgatccgagcgacaatattccgggagttaaaggtatcggcgagaagacggcgctcaagctccttaaagaatgggggtcgttggagaacttgcttaagaatttagatcaggtcaaaccagcttcagtgcgtgagaagattcttgcacacctcgaagacctcaaattaagccgcgaattgtcccgtgtacgcaccgatttgccgctcgaagttgatttccgtggccgccgcgaacctgactgggagggtcttaaagcgtttttagagcgtcttgaatttggttcgctcttgcatgaattcggccttttagaaagcccgttaccagccgaagaagcaccttggccaccgcccgaaggcgcgtttttaggttaccgtttgagtcgcccggaaccgatgtgggccgaattattggctcttgcagcgtctgcccagggacgtgtgtatcgcgcggaagaccctcatggtgcgctccgtggcctcaaagaagtccgtggactccttgccaaagacatcgctgttgttgcattgcgcgaaggtcttgatttacctccgactgatgatccaatgcttcttgcgtacctcttggacccgtcaaacacgacgcccgaaggcgtagcccgtcgttacggcggcgagtggaccgaagatgcaggtgagcgcgcgttattggccgaacgtttgcacgccaatttattaggacgtttgcaaggcgaggaacgtctcctctggctttacgaagaagtggagaaaccattgagtcgcgtgctcgcgcatatggaagctaccggtgtcaaattagacgtggcgtatttggaggcactcagccttgaagttgctgccgaaatgcgccgcttggaggaagaagtattccgtttagcaggccactcctttaaccttaattctcgcgatcagttagaacgtgtgttgttcgatgaacttggtctccctcctatcggcaagacagagaagaccggtaaacgtagcacttcagcggcggttttagaagctcttcgcgaagtccatcccattgtggacaagatcttgcagtaccgcgaactcgcgaaattgaaaggcacctatattgaccctcttccggcattagtccacccgaaaacgggacgcctccatacccgcttcaaccaaacagccacggcgaccggtcgtttgtcctcctctgatccaaaccttcagaatattccagtacgtaccccattgggccagaagatccgcaaagcgtttgtagctgaggagggttggcgtttagtggccctcgattatagccaaattgaattacgtgtccttgcccatctttctggcgatgagaacctcatccgcgtgtttcaggaaggccgcgacattcacactcaaacggcaagctggatgtttggattatcagctgaagcgatcgatcctttgatgcgtcgtgcagcgaagaccatcaatttcggtgttctctacggtatgagtgcccatcgtttgtcgcaggaattaggcattccctatgaagaagctgcggcgttcattcagcgctactttcaaagctatcccaaagttaaagcatggatcgagaagactctcgaagaaggccgcacacgtggttacgtagagaccttatttggacgtcgccgctatgttcccgatttaaacgctcgcgtgaaatctgtccgtgaagccgccgaacgcatggcgttcaacatgcctgtacagggcacggcagctgacctcatgaaacttgcaatggtgcgcctttttccacaattgcgtgaagttggtgcccgcatgctcttgcaggtccacgatgaactcttgttagaagcgccaaaagagcgtgcggaagaggtggcagccctcgcgaaagaggttatggaaggcgtgtggcccttagcggtgcctcttgaagtcgaagttggtattggcgaggattggttggctgccaaaggataatga

SEQ ID NO: 386 - protein, 841 aa, synthetic construct
  REGION 1..841: note = Variant of DNA polymerase I from Thermus sp. strain 2.9
MHHHHHHGGSGMLPLFEPKGRVLLVDGHHLAYRNFFALKGLTTSRGEPVQGVYGFAKSLLKALKEDGDVVIVVFDAKAPSFRHEAYEAYKAGRAPTPEDFPRQLALMKELVDLLGLERLEVPGFEADDVLATLAKKAEREGYEVQILTADRDLFQLLSPRISVLHPEGHRITPEWLWEKYGLRPEQWVDFRALAGDPSDNIPGVKGIGEKTALKLLKEWGSLENLLKNLDQVKPASVREKILAHLEDLKLSRELSRVRTDLPLEVDFRGRREPDWEGLKAFLERLEFGSLLHEFGLLESPLPAEEAPWPPPEGAFLGYRLSRPEPMWAELLALAASAQGRVYRAEDPHGALRGLKEVRGLLAKDIAVVALREGLDLPPTDDPMLLAYLLDPSNTTPEGVARRYGGEWTEDAGERALLAERLHANLLGRLQGEERLLWLYEEVEKPLSRVLAHMEATGVKLDVAYLEALSLEVAAEMRRLEEEVFRLAGHSFNLNSRDQLERVLFDELGLPPIGKTEKTGKRSTSAAVLEALREVHPIVDKILQYRELAKLKGTYIDPLPALVHPKTGRLHTRFNQTATATGRLSSSDPNLQNIPVRTPLGQKIRKAFVAEEGWRLVALDYSQIELRVLAHLSGDENLIRVFQEGRDIHTQTASWMFGLSAEAIDPLMRRAAKTINFGVLYGMSAHRLSQELGIPYEEAAAFIQRYFQSYPKVKAWIEKTLEEGRTRGYVETLFGRRRYVPDLNARVKSVREAAERMAFNMPVQGTAADLMKLAMVRLFPQLREVGARMLLQVHDELLLEAPKERAEEVAALAKEVMEGVWPLAVPLEVEVGIGEDWLAAKG

SEQ ID NO: 387 - DNA, 2529 bp, synthetic construct
  misc_feature 1..2529: note = Variant of DNA polymerase I from Thermus sp. strain 2.9
  source 1..2529: mol_type = other DNA
atgcaccatcatcatcatcatggcggtagcggcatgttaccgttgttcgaacctaaaggtcgcgtgcttctggttgatggccatcatctcgcgtatcgtaacttctttgccctgaaaggattaaccaccagccgtggcgagccggtacagggtgtctacggctttgcaaagtcgctcctgaaagctctgaaagaagacggtgatgtggtgattgttgtctttgatgcgaaagcgccaagttttcgccacgaagcgtacgaagcttacaaagccgggcgtgctccaacgccggaagactttcctcgccaattggcgcttatgaaggaattagtggatttgcttggcctcgaacgcttggaagttcccggtttcgaggcagacgacgtattagcgactctcgcaaagaaagccgaacgtgagggctatgaagtccagatcttgacagcagatcgcgatcttttccagcttttatctccgcgcatttccgtgttacacccggaagggcatcgtatcaccccggaatggctctgggagaaatatggtttgcgtcccgaacaatgggtggattttcgcgccttagcgggcgatccgagcgacaatattccgggagttaaaggtatcggcgagaagacggcgctcaagctccttaaagaatgggggtcgttggagaacttgcttaagaatttagatcaggtcaaaccagcttcagtgcgtgagaagattcttgcacacctcgaagacctcaaattaagccgcgaattgtcgcgtgtacgcaccgatttgccgctcgaagttgatttccgtggccgccgcgaacctgactgggagggtcttaaagcgtttttagagcgtcttgaatttggttcgctcttgcatgaattcggccttttagaaagcccgttaccagccgaagaagcaccttggccaccgcccgaaggcgcgtttttaggttaccgtttgagtcgcccggaaccgatgtgggccgaattattggctcttgcagcgtctgcccagggacgtgtgtatcgcgcggaagaccctcatggtgcgctccgtggcctcaaagaagtccgtggactccttgccaaagacttagctgttgttgcattgcgcgaaggtcttgatttacctccgactgatgatccaatgcttcttgcgtacctcttggactcgtcaaacacgacgcccgaaggcgtagcccgtcgttacggcggcgagtggaccgaagatgcaggtgagcgcgcgttattggccgaacgtttgcacgccaatttattaggacgtttgcaaggcgaggaacgtctcctctggctttacgaagaagtggagaaaccattgagtcgcgtgctcgcgcatatggaagctaccggtgtcaaattagacgtggcgtatttggaggcactcagccttgaagtcgctgccgaaatgcgccgcttggaggaagaagtattccgtttagcaggccactcctttaaccttaattctcgcgatcagttagaacgtgtgttgttcgatgaacttggtctccctcctatcggcaagacagagaagaccggtaaacgtagcacttcagcggcggttttagaagctcttcgcgaagtccatcccattgtggacaagatcttgcagtaccgcgaactcgcgaaattgaaaggcacctatattgaccctcttccggcattagtccacccgaaaacgggacgcctccatacccgcttcaaccaaacagccacggcgaccggtcgtttgtcctcctctgatccaaaccttcagaatattccagtacgtaccccattgggccagcatatccgcaaagcgtttgtagctgaggagggttggcgtttagtggccctcgattatagccaaattgaattacgtgtccttgcccatctttctggcgatgagaacctcatccgcgtgtttcaggaaggccgcgacattcacactcaaacggcaagctggatgtttggattatcagctgaagcgatcgatcctttgatgcgtcgtgcagcgaagaccatcaatttcggtgttctctacggtatgagtgcccatcgtttgtcgcaggaattaggcattccctatgaagaagctgcggcgttcattcagcgctactttcaaagctatcccaaagttaaagcatggatcgagaagactctcgaagaaggccgcacacgtggttacgtagagaccttatttggacgtcgccgctatgttcccgatttaaacgctcgcgtgaaatctgtccgtgaagccgccgaacgcatggcgttcaacatgcctgtacagggcacggcagctgacctcatgaaacttgcaatggtgcgcctttttccacaattgcgtgaagttggtgcccgcatgctcttgcaggtccacgatgaactcttgttagaagcgccaaaagagcgtgcggaagaggtggcagccctcgcgaaagaggttatggaaggcgtgtggcccttagcggtgcctcttgaagtcgaagttggtattggcgaggattggttggctgccaaaggataatga

SEQ ID NO: 388 - protein, 841 aa, synthetic construct
  REGION 1..841: note = Variant of DNA polymerase I from Thermus sp. strain 2.9
MHHHHHHGGSGMLPLFEPKGRVLLVDGHHLAYRNFFALKGLTTSRGEPVQGVYGFAKSLLKALKEDGDVVIVVFDAKAPSFRHEAYEAYKAGRAPTPEDFPRQLALMKELVDLLGLERLEVPGFEADDVLATLAKKAEREGYEVQILTADRDLFQLLSPRISVLHPEGHRITPEWLWEKYGLRPEQWVDFRALAGDPSDNIPGVKGIGEKTALKLLKEWGSLENLLKNLDQVKPASVREKILAHLEDLKLSRELSRVRTDLPLEVDFRGRREPDWEGLKAFLERLEFGSLLHEFGLLESPLPAEEAPWPPPEGAFLGYRLSRPEPMWAELLALAASAQGRVYRAEDPHGALRGLKEVRGLLAKDLAVVALREGLDLPPTDDPMLLAYLLDSSNTTPEGVARRYGGEWTEDAGERALLAERLHANLLGRLQGEERLLWLYEEVEKPLSRVLAHMEATGVKLDVAYLEALSLEVAAEMRRLEEEVFRLAGHSFNLNSRDQLERVLFDELGLPPIGKTEKTGKRSTSAAVLEALREVHPIVDKILQYRELAKLKGTYIDPLPALVHPKTGRLHTRFNQTATATGRLSSSDPNLQNIPVRTPLGQHIRKAFVAEEGWRLVALDYSQIELRVLAHLSGDENLIRVFQEGRDIHTQTASWMFGLSAEAIDPLMRRAAKTINFGVLYGMSAHRLSQELGIPYEEAAAFIQRYFQSYPKVKAWIEKTLEEGRTRGYVETLFGRRRYVPDLNARVKSVREAAERMAFNMPVQGTAADLMKLAMVRLFPQLREVGARMLLQVHDELLLEAPKERAEEVAALAKEVMEGVWPLAVPLEVEVGIGEDWLAAKG

SEQ ID NO: 389 - DNA, 2529 bp, synthetic construct
  misc_feature 1..2529: note = Variant of DNA polymerase I from Thermus sp. strain 2.9
  source 1..2529: mol_type = other DNA
atgcaccatcatcatcatcatggcggtagcggcatgttaccgttgttcgaacctaaaggtcgcgtgcttctggttgatggccatcatctcgcgtatcgtaacttctttgccctgaaaggattaaccaccagccgtggcgagccggtacagggtgtctacggctttgcaaagtcgctcctgaaagctctgaaagaagacggtgatgtggtgattgttgtctttgatgcgaaagcgccaagttttcgccacgaagcgtacgaagcttacaaagccgggcgtgctccaacgccggaagactttcctcgccaattggcgcttatgaaggaattagtggatttgcttggcctcgaacgcttggaagttcccggtttcgaggcagacgacgtattagcgactctcgcaaagaaagccgaacgtgagggctatgaagtccagatcttgacagcagatcgcgatcttttccagcttttatctccgcgcatttccgtgttacacccggaagggcatcgtatcaccccggaatggctctgggagaaatatggtttgcgtcccgaacaatgggtggattttcgcgccttagcgggcgatccgagcgacaatattccgggagttaaaggtatcggcgagaagacggcgctcaagctccttaaagaatgggggtcgttggagaacttgcttaagaatttagatcaggtcaaaccagcttcagtgcgtgagaagattcttgcacacctcgaagacctcaaattaagccgcgaattgtcgcgtgtacgcaccgatttgccgctcgaagttgatttccgtggccgccgcgaacctgactgggagggtcttaaagcgtttttagagcgtcttgaatttggttcgctcttgcatgaattcggccttttagaaagcccgttaccagccgaagaagcaccttggccaccgcccgaaggcgcgtttttaggttaccgtttgagtcgcccggaaccgatgtgggccgaattattggctcttgcagcgtctgcccagggacgtgtgtatcgcgcggaagaccctcatggtgcgctccgtggcctcaaagaagtccgtggactccttgccaaagacttagctgttgttgcattgcgcgaaggtcttgatttacctccgactgatgatccaatgcttcttgcgtacctcttggactcgtcaaacacgacgcccgaaggcgtagcccgtcgttacggcggcgagtggaccgaagatgcaggtgagcgcgcgttattggccgaacgtttgcacgccaatttattaggacgtttgcaaggcgaggaacgtctcctctggctttacgaagaagtggagaaaccattgagtcgcgtgctcgcgcatatggaagctaccggtgtcaaattagacgtggcgtatttggaggcactcagccttgaagtcgctgccgaaatgcgccgcttggaggaagaagtattccgtttagcaggccactcctttaaccttaattctcgcgatcagttagaacgtgtgttgttcgatgaacttggtctccctcctatcggtaagacagagaagaccggtaaacgtagcacttcagcggcggttttagaagctcttcgcgaagtccatcccattgtggacaagatcttgcagtaccgcgaactcgcgaaattgaaaggcacctatattgaccctcttccggcattagtccacccgaaaacgggacgcctccatacccgcttcaaccaaacagccacggcgaccggtcgtttgtcctcctctgatccaaaccttcagaatattccagtacgtaccccattgggccagaaaatccgcaaagcgtttgtagctgaggagggttggcgtttagtggccctcgattatagccaaattgaattacgtgtccttgcccatctttctggcgatgagaacctcatccgcgtgtttcaggaaggccgcgacattcacactcaaacggcaagctggatgtttggactgtcatcggaagcgatcgatcctttgatgcgtcgtgcagcgaagaccatcaatttcggtgttctctacggtatgagtgcccatcgtttgtcgcaggaattaggcattccctatgaagaagctgcggcgttcattcagcgctactttcaaagctatcccaaagttaaagcatggatcgagaagactctcgaagaaggccgcacacgtggttacgtagagaccttatttggacgtcgccgctatgttcccgatttaactgctcgcgtgaaatctgtccgtgaagccgccgaacgcatggcgtggaacatgcctgtacagggcacggcagctgacctcatgaaacttgcaatggtgcgcctttttccacaattgcgtgaagttggtgcccgcatgctcttgcaggtccacgatgaactcttgttagaagcgccaaaagagcgtgcggaagaggtggcagccctcgcgaaagaggttatggaaggcgtgtggcccttagcggtgcctcttgaagtcgaagttggtattggcgaggattggttggctgccaaaggataatga

SEQ ID NO: 390 - protein, 841 aa, synthetic construct
  REGION 1..841: note = Variant of DNA polymerase I from Thermus sp. strain 2.9
MHHHHHHGGSGMLPLFEPKGRVLLVDGHHLAYRNFFALKGLTTSRGEPVQGVYGFAKSLLKALKEDGDVVIVVFDAKAPSFRHEAYEAYKAGRAPTPEDFPRQLALMKELVDLLGLERLEVPGFEADDVLATLAKKAEREGYEVQILTADRDLFQLLSPRISVLHPEGHRITPEWLWEKYGLRPEQWVDFRALAGDPSDNIPGVKGIGEKTALKLLKEWGSLENLLKNLDQVKPASVREKILAHLEDLKLSRELSRVRTDLPLEVDFRGRREPDWEGLKAFLERLEFGSLLHEFGLLESPLPAEEAPWPPPEGAFLGYRLSRPEPMWAELLALAASAQGRVYRAEDPHGALRGLKEVRGLLAKDLAVVALREGLDLPPTDDPMLLAYLLDSSNTTPEGVARRYGGEWTEDAGERALLAERLHANLLGRLQGEERLLWLYEEVEKPLSRVLAHMEATGVKLDVAYLEALSLEVAAEMRRLEEEVFRLAGHSFNLNSRDQLERVLFDELGLPPIGKTEKTGKRSTSAAVLEALREVHPIVDKILQYRELAKLKGTYIDPLPALVHPKTGRLHTRFNQTATATGRLSSSDPNLQNIPVRTPLGQKIRKAFVAEEGWRLVALDYSQIELRVLAHLSGDENLIRVFQEGRDIHTQTASWMFGLSSEAIDPLMRRAAKTINFGVLYGMSAHRLSQELGIPYEEAAAFIQRYFQSYPKVKAWIEKTLEEGRTRGYVETLFGRRRYVPDLTARVKSVREAAERMAWNMPVQGTAADLMKLAMVRLFPQLREVGARMLLQVHDELLLEAPKERAEEVAALAKEVMEGVWPLAVPLEVEVGIGEDWLAAKG

SEQ ID NO: 391 - DNA, 2529 bp, synthetic construct
  misc_feature 1..2529: note = Variant of DNA polymerase I from Thermus sp. strain 2.9
  source 1..2529: mol_type = other DNA
atgcaccatcatcatcatcatggcggtagcggcatgttaccgttgttcgaacctaaaggtcgcgtgcttctggttgatggccatcatctcgcgtatcgtaacttctttgccctgaaaggattaaccaccagccgtggcgagccggtacagggtgtctacggctttgcaaagtcgctcctgaaagctctgaaagaagacggtgatgtggtgattgttgtctttgatgcgaaagcgccaagttttcgccacgaagcgtacgaagcttacaaagccgggcgtgctccaacgccggaagactttcctcgccaattggcgcttatgaaggaattagtggatttgcttggcctcgaacgcttggaagttcccggtttcgaggcagacgacgtattagcgactctcgcaaagaaagccgaacgtgagggctatgaagtccagatcttgacagcagatcgcgatcttttccagcttttatctccgcgcatcgcggtgttacacccggaagggcatcgtatcaccccggaatggctctgggagaaatatggtttgcgtcccgaacaatgggtggattttcgcgccttagcgggcgatccgagcgacaatattccgggagttaaaggtatcggcgagaagacggcgctcaagctccttaaagaatgggggtcgttggagaacttgcttaagaatttagatcaggtcaaaccagcttcagtgcgtgagaagattcttgcacacctcgaagacctcaaattaagccgcgaattgtcccgtgtacgcaccgatttgccgctcgaagttgatttccgtggccgccgcgaacctgactgggagggtcttaaagcgtttttagagcgtcttgaatttggttcgctcttgcatgaattcggccttttagaaagcccgttaccagccgaagaagcaccttggccaccgcccgaaggcgcgtttttaggttaccgtttgagtcgcccggaaccgatgtgggccgaattattggctcttgcagcgtctgcccagggacgtgtgtatcgcgcggaagaccctcatggtgcgctcaaaggcctcaaagaagtccgtggactccttgccaaagacttagctgttgttgcattgcgcgaaggtcttgatttacctccgactgatgatccaatgcttcttgcgtacctcttggacccgtcaaacacgacgcccgaaggcgtagcccgtcgttacggcggcgagtggaccgaagatgcaggtgagcgcgcgttattggccgaacgtttgcacgccaatttattaggacgtttgcaaggcgaggaacgtctcctctggctttacgaagaagtggagaaaccattgagtcgcgtgctcgcgcatatggaagctaccggtgtcaaattagacgtggcgtatttggaggcactcagccttgaagttgctgccgaaatgcgccgcttggaggaagaagtattccgtttagcaggccactcctttaaccttaattctcgcgatcagttagaacgtgtgttgttcgatgaacttggtctccctcctatcggcaagacagagaagaccggtaaacgtagcacttcagcggcggttttagaagctcttcgcgaagtccatcccattgtggacaagatcttgcagtaccgcgaactcgcgaaattgaaaggcacctatattgaccctcttccggcattagtccacccgaaaacgggacgcctccatacccgcttcaaccaaacagccacggcgaccggtcgtttgtcctcctctgatccaaaccttcagaatattccagtacgtaccccattgggccagaagatccgcaaagcgtttgtagctgaggagggttggcgtttagtggccctcgattatagccaaattgaattacgtgtccttgcccatctttctggcgatgagaacctcatccgcgtgtttcaggaaggccgcgacattcacactcaaacggcaagctggatgtttggattatcagctgaagcgatcgatcctttgatgcgtcgtgcagcgaagaccatcaatttcggtgttctctacggtatgagtgcccatcgtttgtcgcaggaattaggcattccctatgaagaagctgcggcgttcattcagcgctactttcaaagctatcccaaagttaaagcatggatcgagaagactctcgaagaaggccgcacacgtggttacgtagagaccttatttggacgtcgccgctatgttcccgatttaaacgctcgcgtgaaatctgtccgtgaagccgccgaacgcatggcgttcaacatgcctgtacagggcacggcagctgacctcatgaaacttgcaatggtgcgcctttttccacaattgcgtgaagttggtgcccgcatgctcttgcaggtccacgatgaactcttgttagaagcgccaaaagagcgtgcggaagaggtggcagccctcgcgaaagaggttatggaaggcgtgtggcccttagcggtgcctcttgaagtcgaagttggtattggcgaggattggttggctgccaaaggataatga

SEQ ID NO: 392 - protein, 841 aa, synthetic construct
  REGION 1..841: note = Variant of DNA polymerase I from Thermus sp. strain 2.9
MHHHHHHGGSGMLPLFEPKGRVLLVDGHHLAYRNFFALKGLTTSRGEPVQGVYGFAKSLLKALKEDGDVVIVVFDAKAPSFRHEAYEAYKAGRAPTPEDFPRQLALMKELVDLLGLERLEVPGFEADDVLATLAKKAEREGYEVQILTADRDLFQLLSPRIAVLHPEGHRITPEWLWEKYGLRPEQWVDFRALAGDPSDNIPGVKGIGEKTALKLLKEWGSLENLLKNLDQVKPASVREKILAHLEDLKLSRELSRVRTDLPLEVDFRGRREPDWEGLKAFLERLEFGSLLHEFGLLESPLPAEEAPWPPPEGAFLGYRLSRPEPMWAELLALAASAQGRVYRAEDPHGALKGLKEVRGLLAKDLAVVALREGLDLPPTDDPMLLAYLLDPSNTTPEGVARRYGGEWTEDAGERALLAERLHANLLGRLQGEERLLWLYEEVEKPLSRVLAHMEATGVKLDVAYLEALSLEVAAEMRRLEEEVFRLAGHSFNLNSRDQLERVLFDELGLPPIGKTEKTGKRSTSAAVLEALREVHPIVDKILQYRELAKLKGTYIDPLPALVHPKTGRLHTRFNQTATATGRLSSSDPNLQNIPVRTPLGQKIRKAFVAEEGWRLVALDYSQIELRVLAHLSGDENLIRVFQEGRDIHTQTASWMFGLSAEAIDPLMRRAAKTINFGVLYGMSAHRLSQELGIPYEEAAAFIQRYFQSYPKVKAWIEKTLEEGRTRGYVETLFGRRRYVPDLNARVKSVREAAERMAFNMPVQGTAADLMKLAMVRLFPQLREVGARMLLQVHDELLLEAPKERAEEVAALAKEVMEGVWPLAVPLEVEVGIGEDWLAAKG

SEQ ID NO: 393 - DNA, 2529 bp, synthetic construct
  misc_feature 1..2529: note = Variant of DNA polymerase I from Thermus sp. strain 2.9
  source 1..2529: mol_type = other DNA
atgcaccatcatcatcatcatggcggtagcggcatgttaccgttgttcgaacctaaaggtcgcgtgcttctggttgatggccatcatctcgcgtatcgtaacttctttgccctgaaaggattaaccaccagccgtggcgagccggtacagggtgtctacggctttgcaaagtcgctcctgaaagctctgaaagaagacggtgatgtggtgattgttgtctttgatgcgaaagcgccaagttttcgccacgaagcgtacgaagcttacaaagccgggcgtgctccaacgccggaagactttcctcgccaattggcgcttatgaaggaattagtggatttgcttggcctcgaacgcttggaagttcccggtttcgaggcagacgacgtattagcgactctcgcaaagaaagccgaacgtgagggctatgaagtccagatcttgacagcagatcgcgatcttttccagcttttatctccgcgcatctcggtgttacacccggaagggcatcgtatcaccccggaatggctctgggagaaatatggtttgcgtcccgaacaatgggtggattttcgcgccttagcgggcgatccgagcgacaatattccgggagttaaaggtatcggcgagaagacggcgctcaagctccttaaagaatgggggtcgttggagaacttgcttaagaatttagatcaggtcaaaccagcttcagtgcgtgagaagattcttgcacacctcgaagacctcaaattaagcctggaattgtcccgtgtacgcaccgatttgccgctcgaagttgatttccgtggccgccgcgaacctgactgggagggtcttaaagcgtttttagagcgtcttgaatttggttcgctcttgcatgaattcggccttttagaaagcccgttaccagccgaagaagcaccttggccaccgcccgaaggcgcgtttttaggttaccgtttgagtcgcccggaaccgatgtgggccgaattattggctcttgcagcgtctgcccagggacgtgtgtatcgcgcggaagaccctcatggtgcgctcaaaggcctcaaagaagtccgtggactccttgccaaagacttagctgttgttgcattgcgcgaaggtcttgatttacctccgactgatgatccaatgcttcttgcgtacctcttggacccgtcaaacacgacgcccgaaggcgtagcccgtcgttacggcggcgagtggaccgaagatgcaggcgagcgcgcgttattggccgaacgtttgcacgccaatttattaggacgtttgcaaggcgaggaacgcctcctctggctttacgaagaagtggagaaaccattgagtcgcgtgctcgcgcatatggaagctaccggtgtcaaattagacgtggcgtatttggaggcactcagccttgaagttgctgccgaaatgcgccgcttggaggaagaagtattccgtttagcaggccactcctttaaccttaattctcgcgatcagttagaacgtgtgttgttcgatgaacttggtctccctcctatcggcaagacagagaagaccggtaaacgtagcacttcagcggcggttttagaagctcttcgcgaagtccatcccattgtggacaagatcttgcagtaccgcgaactcgcgaaattgaaaggcacctatattgaccctcttccggcattagtccacccgaaaacgggacgcctccatacccgcttcaaccaaacagccacggcgaccggtcgtttgtcctcctctgatccaaaccttcagaatattccagtacgtaccccattgggccagaagatccgcaaagcgtttgtagctgaggagggttggcgtttagtggccctcgattatagccaaattgaattacgtgtccttgcccatctttctggcgatgagaacctcatccgcgtgtttcaggaaggcaaagacattcacactcaaacggcaagctggatgtttggattatcgccggaagcgatcgatcctttgatgcgtcgtgcagcgaagaccatcaatttcggtgttctctacggtatgagtgcccatcgtttgtcgcaggaattaggcattccctatgaagaagctgcggcgttcattcagcgctactttcaaagctatcccaaagttaaagcatggatcgagaagactctcgaagaaggccgcacacgtggttacgtagagaccttatttggacgtcgccgctatgttcccgatttaaacgctcgcgtgaaatctgtccgtgaagccgccgaacgcatggcgttcaacatgcctgtacagggcacggcagctgacctcatgaaacttgcaatggtgcgcctttttccacaattgcgtgaagttggtgcccgcatgctcttgcaggtccacgatgaactcttgttagaagcgccaaaagagcgtgcggaagaggtggcagccctcgcgaaagaggttatggaaggcgtgtggcccttagcggtgcctcttgaagtcgaagttggtattggcgaggattggttggctgccaaaggataatga

SEQ ID NO: 394 - protein, 841 aa, synthetic construct
  REGION 1..841: note = Variant of DNA polymerase I from Thermus sp. strain 2.9
MHHHHHHGGSGMLPLFEPKGRVLLVDGHHLAYRNFFALKGLTTSRGEPVQGVYGFAKSLLKALKEDGDVVIVVFDAKAPSFRHEAYEAYKAGRAPTPEDFPRQLALMKELVDLLGLERLEVPGFEADDVLATLAKKAEREGYEVQILTADRDLFQLLSPRISVLHPEGHRITPEWLWEKYGLRPEQWVDFRALAGDPSDNIPGVKGIGEKTALKLLKEWGSLENLLKNLDQVKPASVREKILAHLEDLKLSLELSRVRTDLPLEVDFRGRREPDWEGLKAFLERLEFGSLLHEFGLLESPLPAEEAPWPPPEGAFLGYRLSRPEPMWAELLALAASAQGRVYRAEDPHGALKGLKEVRGLLAKDLAVVALREGLDLPPTDDPMLLAYLLDPSNTTPEGVARRYGGEWTEDAGERALLAERLHANLLGRLQGEERLLWLYEEVEKPLSRVLAHMEATGVKLDVAYLEALSLEVAAEMRRLEEEVFRLAGHSFNLNSRDQLERVLFDELGLPPIGKTEKTGKRSTSAAVLEALREVHPIVDKILQYRELAKLKGTYIDPLPALVHPKTGRLHTRFNQTATATGRLSSSDPNLQNIPVRTPLGQKIRKAFVAEEGWRLVALDYSQIELRVLAHLSGDENLIRVFQEGKDIHTQTASWMFGLSPEAIDPLMRRAAKTINFGVLYGMSAHRLSQELGIPYEEAAAFIQRYFQSYPKVKAWIEKTLEEGRTRGYVETLFGRRRYVPDLNARVKSVREAAERMAFNMPVQGTAADLMKLAMVRLFPQLREVGARMLLQVHDELLLEAPKERAEEVAALAKEVMEGVWPLAVPLEVEVGIGEDWLAAKG

SEQ ID NO: 395 - DNA, 2529 bp, synthetic construct
  misc_feature 1..2529: note = Variant of DNA polymerase I from Thermus sp. strain 2.9
  source 1..2529: mol_type = other DNA
atgcaccatcatcatcatcatggcggtagcggcatgttaccgttgttcgaacctaaaggtcgcgtgcttctggttgatggccatcatctcgcgtatcgtaacttctttgccctgaaaggattaaccaccagccgtggcgagccggtacagggtgtctacggctttgcaaagtcgctcctgaaagctctgaaagaagacggtgatgtggtgattgttgtctttgatgcgaaagcgccaagttttcgccacgaagcgtacgaagcttacaaagccgggcgtgctccaacgccggaagactttcctcgccaattggcgcttatgaaggaattagtggatttgcttggcctcgaacgcttggaagttcccggtttcgaggcagacgacgtattagcgactctcgcaaagaaagccgaacgtgagggctatgaagtccatatcttgacagcagatcgcgatcttttccagcttttatctccgcgcatttccgtgttacacccggaagggcatcgtatcaccccggaatggctctgggagaaatatggtttgcgtcccgaacaatgggtggattttcgcgccttagcgggcgatccgagcgacaatattccgggagttaaaggtatcggcgagaagacggcgctcaagctccttaaagaatgggggtcgttggagaacttgcttaagaatttagatcaggtcaaaccagcttcagtgcgtgagaagattcttgcacacctcgaagacctcaaattaagccgcgaattggtccgtgtacgcaccgatttgccgctcgaagttgatttccgtggccgccgcgaacctgactgggagggtcttaaagcgtttttagagcgtcttgaatttggttcgctcttgcatgaattcggccttttagaaagcccgttaccagccgaagaagcaccttggccaccgcccgaaggcgcgtttttaggttaccgtttgagtcgcccggaaccgatgtgggccgaattattggctcttgcagcgtctgcccagggacgtgtgtatcgcgcggaagaccctcatggtgcgctccgtggcctcaaagaagtccgtggactccttgccaaagacttagctgttgttgcattgcgcgaaggtcttgatttacctccgactgatgatccaatgcttcttgcgtacctcttggacccgtcaaacacgacgcccgaaggcgtagcccgtcgttacggcggcgagtggaccgaagatgcaggtgagcgcgcgttattggccgaacgtttgcacgccaatttattaggacgtttgcaaggcgaggaacgtctcctctggctttacgaagaagtggagaaaccattgagtcgcgtgctcgcgcatatggaagctaccggtgtcaaattagacgtggcgtatttggaggcactcagccttgaagtcgctgccgaaatgcgccgcttggaggaagaagtattccgtttagcaggccactcctttaaccttaattctcgcgatcagttagaacgtgtgttgttcgatgaacttggtctccctcctatcggcaagacagagaagaccggtaaacgtagcacttcagcggcggttttagaagctcttcgcgaagtccatcccattgtggacaagatcttgcagtaccgcgaactcgcgaaattgaaaggcacctatattgaccctcttccggcattagtccacccgaaaacgggacgcctccatacccgcttcaaccaaacagccacggcgaccggtcgtttgtcctcctctgatccaaaccttcagaatattccagtacgtaccccattgggccagaagatccgcaaagcgtttgtagctgaggagggttggcgtttagtggccctcgattatagccaaattgaattacgtgtccttgcccatctttctggcgatgagaacctcatccgcgtgtttcaggaaggccgcgacattcacactcaaacggcaagctggatgtttggattatcagctgaagcgatcgatcctttgatgcgtcgtgcagcgaagaccatcaatttcggtgttctctacggtatgagtgcccatcgtttgtcgcaggaattaggcattccctatgaagaagctgcggcgttcattcagcgctactttcaaagctatcccaaagttaaagcatggatcgagaagactctcgaagaaggccgcacacgtggttacgtagagaccttatttggacgtcgccgctatgttcccgatttaactgctcgcgtgaaatctgtccgtgaagccgccgaacgcatggcgtggaacatgcctgtacagggcacggcagctgacctcatgaaacttgcaatggtgcgcctttttccacaattgcgtgaagttggtgcccgcatgctcttgcaggtccacgatgaactcttgttagaagcgccaaaagagcgtgcggaagaggtggcagccctcgcgaaagaggttatggaaggcgtgtggcccttagcggtgcctcttgaagtcgaagttggtattggcgaggattggttggctgccaaaggataatga

SEQ ID NO: 396 - protein, 841 aa, synthetic construct
  REGION 1..841: note = Variant of DNA polymerase I from Thermus sp. strain 2.9
MHHHHHHGGSGMLPLFEPKGRVLLVDGHHLAYRNFFALKGLTTSRGEPVQGVYGFAKSLLKALKEDGDVVIVVFDAKAPSFRHEAYEAYKAGRAPTPEDFPRQLALMKELVDLLGLERLEVPGFEADDVLATLAKKAEREGYEVHILTADRDLFQLLSPRISVLHPEGHRITPEWLWEKYGLRPEQWVDFRALAGDPSDNIPGVKGIGEKTALKLLKEWGSLENLLKNLDQVKPASVREKILAHLEDLKLSRELVRVRTDLPLEVDFRGRREPDWEGLKAFLERLEFGSLLHEFGLLESPLPAEEAPWPPPEGAFLGYRLSRPEPMWAELLALAASAQGRVYRAEDPHGALRGLKEVRGLLAKDLAVVALREGLDLPPTDDPMLLAYLLDPSNTTPEGVARRYGGEWTEDAGERALLAERLHANLLGRLQGEERLLWLYEEVEKPLSRVLAHMEATGVKLDVAYLEALSLEVAAEMRRLEEEVFRLAGHSFNLNSRDQLERVLFDELGLPPIGKTEKTGKRSTSAAVLEALREVHPIVDKILQYRELAKLKGTYIDPLPALVHPKTGRLHTRFNQTATATGRLSSSDPNLQNIPVRTPLGQKIRKAFVAEEGWRLVALDYSQIELRVLAHLSGDENLIRVFQEGRDIHTQTASWMFGLSAEAIDPLMRRAAKTINFGVLYGMSAHRLSQELGIPYEEAAAFIQRYFQSYPKVKAWIEKTLEEGRTRGYVETLFGRRRYVPDLTARVKSVREAAERMAWNMPVQGTAADLMKLAMVRLFPQLREVGARMLLQVHDELLLEAPKERAEEVAALAKEVMEGVWPLAVPLEVEVGIGEDWLAAKG

SEQ ID NO: 397 - DNA, 2529 bp, synthetic construct
  misc_feature 1..2529: note = Variant of DNA polymerase I from Thermus sp. strain 2.9
  source 1..2529: mol_type = other DNA
atgcaccatcatcatcatcatggcggtagcggcatgttaccgttgttcgaacctaaaggtcgcgtgcttctggttgatggccatcatctcgcgtatcgtaacttctttgccctgaaaggattaaccaccagccgtggcgagccggtacagggtgtctacggctttgcaaagtcgctcctgaaagctctgaaagaagacggtgatgtggtgattgttgtctttgatgcgaaagcgccaagttttcgccacgaagcgtacgaagcttacaaagccgggcgtgctccaacgccggaagactttcctcgccaattggcgcttatgaaggaattagtggatttgcttggcctcgaacgcttggaagttcccggtttcgaggcagacgacgtattagcgactctcgcaaagaaagccgaacgtgagggctatgaagtccagatcttgacagcagatcgcgatcttttccagcttttatctccgcgcatctcggtgttacacccggaagggcatctgatcaccccggaatggctctgggagaaatatggtttgcgtcccgaacaatgggtggattttcgcgccttagcaggcgatccgagcgacaatattccgggagttaaaggtatcggcgagaagacggcgctcaagctccttaaagaatgggggtcgttggagaacttgcttaagaatttagatcaggtcaaaccagagtcagtgcgtgagaagattcttgcacacctcgaagacctcaaattaagccgcgaattgtcccgtgtacgcaccgatttgccgctcgaagttgatttccgtcgccgccgcgaacctgactgggagggtcttaaagcgtttttagagcgtcttgaatttggttcgctcttgcatgaattcggccttttagaaagcccgttaccagccgaagaagcaccttggccaccgcccgaaggcgcgtttttaggttaccgtttgagtcgcccggaaccgatgtgggccgaattattggctcttgcagcgtctgcccagggacgtgtgtatcgcgcggaagaccctcatggtgcgctcaaaggcctcaaagaagtccgtggactccttgccaaagacttagctgttgttgcattgcgcgaaggtcttgatttacctccgactgatgatccaatgcttcttgcgtacctcttggacccgtcaaacacgacgcccgaaggcgtagcccgtcgttacggcggcgagtggaccgaagatgcaggtgagcgcgcgttattggccgaacgtttgcacgccaatttattaggacgtttgcaaggcgaggaacgtctcctctggctttacgaagaagtggagaaaccattgagtcgcgtgctcgcgcatatggaagctaccggtgtcaaattagacgtggcgtatttggaggcactcagccttgaagttgctgccgaaatgcgccgcttggaggaagaagtattccgtttagcaggccactcctttaaccttaattctcgcgatcagttagaacgtgtgttgttcgatgaacttggtctccctcctatcggcaagacagagaagaccggtaaacgtagcacttcagcggcggttttagaagctcttcgcgaagtccatcccattgtggacaagatcttgcagtaccgcgaactcgcgaaattgaaaggcacctatattgaccctcttccggcattagtccacccgaaaacgggacgcctccatacccgcttcaaccaaacagccacggcgaccggtcgtttgtcctcctctgatccaaaccttcagaatattccagtacgtaccccattgggccagaagatccgcaaagcgtttgtagctgaggagggttggcgtttagtggccctcgattatagccaaattgaattacgtgtccttgcccatctttctggcgatgagaacctcatccgcgtgtttcaggaaggccgcgacattcacactcaaacggcaagctggatgtttggattatcagctgaagcgatcgatcctttgatgcgtcgtgcagcgaagaccattaatttcggtgttctctacggtatgagtgcccatcgtttgtcgcaggaattaggcattccctatgaagaagctgcggcgttcattcagcgctactttcaaagctatcccaaagttaaagcatggatcgagaagactctcgaagaaggccgcacacgtggttacgtagagaccttatttggacgtcgccgctatgttcccgatttaaacgctcgcgtgaaatctgtccgtgaagccgccgaacgcatggcgttcaacatgcctgtacagggcacggcagctgacctcatgaaacttgcaatggtgcgcctttttccacaattgcgtgaagttggtgcccgcatgctcttgcaggtccacgatgaactcttgttagaagcgccaaaagagcgtgcggaagaggtggcagccctcgcgaaagaggttatggaaggcgtgtggcccttagcggtgcctcttgaagtcgaagttggtattggcgaggattggttggctgccaaaggataatga

SEQ ID NO: 398 - protein, 841 aa, synthetic construct
  REGION 1..841: note = Variant of DNA polymerase I from Thermus sp. strain 2.9
MHHHHHHGGSGMLPLFEPKGRVLLVDGHHLAYRNFFALKGLTTSRGEPVQGVYGFAKSLLKALKEDGDVVIVVFDAKAPSFRHEAYEAYKAGRAPTPEDFPRQLALMKELVDLLGLERLEVPGFEADDVLATLAKKAEREGYEVQILTADRDLFQLLSPRISVLHPEGHLITPEWLWEKYGLRPEQWVDFRALAGDPSDNIPGVKGIGEKTALKLLKEWGSLENLLKNLDQVKPESVREKILAHLEDLKLSRELSRVRTDLPLEVDFRRRREPDWEGLKAFLERLEFGSLLHEFGLLESPLPAEEAPWPPPEGAFLGYRLSRPEPMWAELLALAASAQGRVYRAEDPHGALKGLKEVRGLLAKDLAVVALREGLDLPPTDDPMLLAYLLDPSNTTPEGVARRYGGEWTEDAGERALLAERLHANLLGRLQGEERLLWLYEEVEKPLSRVLAHMEATGVKLDVAYLEALSLEVAAEMRRLEEEVFRLAGHSFNLNSRDQLERVLFDELGLPPIGKTEKTGKRSTSAAVLEALREVHPIVDKILQYRELAKLKGTYIDPLPALVHPKTGRLHTRFNQTATATGRLSSSDPNLQNIPVRTPLGQKIRKAFVAEEGWRLVALDYSQIELRVLAHLSGDENLIRVFQEGRDIHTQTASWMFGLSAEAIDPLMRRAAKTINFGVLYGMSAHRLSQELGIPYEEAAAFIQRYFQSYPKVKAWIEKTLEEGRTRGYVETLFGRRRYVPDLNARVKSVREAAERMAFNMPVQGTAADLMKLAMVRLFPQLREVGARMLLQVHDELLLEAPKERAEEVAALAKEVMEGVWPLAVPLEVEVGIGEDWLAAKG

SEQ ID NO: 399 - DNA, 2529 bp, synthetic construct
  misc_feature 1..2529: note = Variant of DNA polymerase I from Thermus sp. strain 2.9
  source 1..2529: mol_type = other DNA
atgcaccatcatcatcatcatggcggtagcggcatgttaccgttgttcgaacctaaaggtcgcgtgcttctggttgatggccatcatctcgcgtatcgtaacttctttgccctgaaaggattaaccaccagccgtggcgagccggtacagggtgtctacggctttgcaaagtcgctcctgaaagctctgaaagaagacggtgatgtggtgattgttgtctttgatgcgaaagcgccaagttttcgccacgaagcgtacgaagcttacaaagccgggcgtgctccaacgccggaagactttcctcgccaattggcgcttatgaaggaattagtggatttgcttggcctcgaacgcttggaagttcccggtttcgaggcagacgacgtattagcgactctcgcaaagaaagccgaacgtgagggctatgaagtccagatcttgacagcagatcgcgatcttttccagcttttatctccgcgcatttccgtgttacacccggaagggcatcgcatcaccccggaatggctctgggagaaatatggtttgcgtcccgaacaatgggtggattttcgcgccttagcgggcgatccgagcgacaatattccgggagttaaaggtatcggcgagaagacggcgctcaagctccttaaagaatgggggtcgttggagaacttgcttaagaatttagatcaggtcaaaccagagtcagtgcgtgagaagattcttgcacacctcgaagacctcaaattaagccgcgaattgtcccgtgtacgcaccgatttgccgctcgaagttgatttccgtggccgccgcgaacctgactgggagggtcttaaagcgtttttagagcgtcttgaatttggttcgctcttgcatgaattcggccttttagaaagcccgttaccagccgaagaagcaccttggccaccgcccgaaggcgcgtttttaggttaccgtttgagtcgcccggaaccgatgtgggccgaattattggctcttgcagcgtctgcccagggacgtgtgtatcgcgcggaagaccctcatggtgcgctcaaaggcctcaaagaagtccgtggactccttgccaaagacttagctgttgttgcattgcgcgaaggtcttgatttacctccgactgatgatccaatgcttcttgcgtacctcttggacccgtcaaacacgacgcccgaaggcgtagcccgtcgttacggcggcgagtggaccgaagatgcaggcgagcgcgcgttattggccgaacgtttgcacgccaatttattaggacgtttgcaaggcgaggaacgtctcctctggctttacgaagaagtggagaaaccattgagtcgcgtgctcgcgcatatggaagctaccggtgtcaaattagacgtggcgtatttggaggcactcagccttgaagttgctgccgaaatgcgccgcttggaggaagaagtattccgtttagcaggccactcctttaaccttaattctcgcgatcagttagaacgtgtgttgttcgatgaacttggtctccctcctatcggcaagacagagaagaccggtaaacgtagcacttcagcggcggttttagaagctcttcgcgaagtccatcccattgtggacaagatcttgcagtaccgcgaactcgcgaaattgaaaggcacctatattgaccctcttccggcattagtccacccgaaaacgggacgcctccatacccgcttcaaccaaacagccacggcgaccggtcgtttgtcctcctctgatccaaaccttcagaatattccagtacgtaccccattgggccagaagatccgcaaagcgtttgtagctgaggagggttggcgtttagtggccctcgattatagccaaattgaattacgtgtccttgcccatctttctggcgatgagaacctcatccgcgtgtttcaggaaggccgcgacattcacactcaaacggcaagctggatgtttggattatcagctgaagcgatcgatcctttgatgcgtcgtgcagcgaagaccatcaatttcggtgttctctacggtatgagtgcccatcgtttgtcgcaggaattaggcattccctatgaagaagctgcggcgttcattcagcgctactttcaaagctatcccaaagttaaagcatggatcgagaagactctcgaagaaggccgcacacgtggttacgtagagaccttatttggacgtcgccgctatgttcccgatttaaacgctcgcgtgaaatctgtccgtgaagccgccgaacgcatggcgttcaacatgcctgtacagggcacggcagctgacctcatgaaacttgcaatggtgcgcctttttccacaattgcgtgaagttggtgcccgcatgctcttgcaggtccacgatgaactcttgttagaagcgccaaaagagcgtgcggaagaggtggcagccctcgcgaaagaggttatggaaggcgtgtggcccttagcggtgcctcttgaagtcgaagttggtattggcgaggattggttggctgccaaaggataatga

SEQ ID NO: 400 - protein, 841 aa, synthetic construct
  REGION 1..841: note = Variant of DNA polymerase I from Thermus sp. strain 2.9
MHHHHHHGGSGMLPLFEPKGRVLLVDGHHLAYRNFFALKGLTTSRGEPVQGVYGFAKSLLKALKEDGDVVIVVFDAKAPSFRHEAYEAYKAGRAPTPEDFPRQLALMKELVDLLGLERLEVPGFEADDVLATLAKKAEREGYEVQILTADRDLFQLLSPRISVLHPEGHRITPEWLWEKYGLRPEQWVDFRALAGDPSDNIPGVKGIGEKTALKLLKEWGSLENLLKNLDQVKPESVREKILAHLEDLKLSRELSRVRTDLPLEVDFRGRREPDWEGLKAFLERLEFGSLLHEFGLLESPLPAEEAPWPPPEGAFLGYRLSRPEPMWAELLALAASAQGRVYRAEDPHGALKGLKEVRGLLAKDLAVVALREGLDLPPTDDPMLLAYLLDPSNTTPEGVARRYGGEWTEDAGERALLAERLHANLLGRLQGEERLLWLYEEVEKPLSRVLAHMEATGVKLDVAYLEALSLEVAAEMRRLEEEVFRLAGHSFNLNSRDQLERVLFDELGLPPIGKTEKTGKRSTSAAVLEALREVHPIVDKILQYRELAKLKGTYIDPLPALVHPKTGRLHTRFNQTATATGRLSSSDPNLQNIPVRTPLGQKIRKAFVAEEGWRLVALDYSQIELRVLAHLSGDENLIRVFQEGRDIHTQTASWMFGLSAEAIDPLMRRAAKTINFGVLYGMSAHRLSQELGIPYEEAAAFIQRYFQSYPKVKAWIEKTLEEGRTRGYVETLFGRRRYVPDLNARVKSVREAAERMAFNMPVQGTAADLMKLAMVRLFPQLREVGARMLLQVHDELLLEAPKERAEEVAALAKEVMEGVWPLAVPLEVEVGIGEDWLAAKG

SEQ ID NO: 401 - DNA, 2529 bp, synthetic construct
  misc_feature 1..2529: note = Variant of DNA polymerase I from Thermus sp. strain 2.9
  source 1..2529: mol_type = other DNA
atgcaccatcatcatcatcatggcggtagcggcatgttaccgttgttcgaacctaaaggtcgcgtgcttctggttgatggccatcatctcgcgtatcgtaacttctttgccctgaaaggattaaccaccagccgtggcgagccggtacagggtgtctacggctttgcaaagtcgctcctgaaagctctgaaagaagacggtgatgtggtgattgttgtctttgatgcgaaagcgccaagttttcgccacgaagcgtacgaagcttacaaagccgggcgtgctccaacgccggaagactttcctcgccaattggcgcttatgaaggaattagtggatttgcttggcctcgaacgcttggaagttcccggtttcgaggcagacgacgtattagcgactctcgcaaagaaagccgaacgtgagggctatgaagtccagatcttgacagcagatcgcgatcttttccagcttttatctccgcgcatttccgtgttacacccggaagggcatcgtatcaccccggaatggctctgggagaaatatggtttgcgtcccgaacaatgggtggattttcgcgccttagcgggcgatccgagcgacaatattccgggagttaaaggtatcggcgagaagacggcgctcaagctccttaaagaatgggggtcgttggagaacttgcttaagaatttagatcaggtcaaaccagcttcagtgcgtgagaagattcttgcacacctcgaagacctcaaattaagccgcgaattgtcccgtgtacgcaccgatttgccgctcgaagttgatttccgtggccgccgcgaacctgactgggagggtcttaaagcgtttttagagcgtcttgaatttggttcgctcttgcatgaattcggccttttagaaagcccgttaccagccgaagaagcaccttggccaccgcccgaaggcgcgtttttaggttaccgtttgagtcgcccggaaccgatgtgggccgaattattggctcttgcagcgtctgcccagggacgtgtgtatcgcgcggaagaccctcatggtgcgctccgtggcctcaaagaagtccgtggactccttgccaaagacttagctgttgttgcattgcgcgaaggtcttgatttacctccgactgatgatccaatgcttcttgcgtacctcttggacccgtcaaacacgacgcccgaaggcgtagcccgtcgttacggcggcgagtggaccgaagatgcaggtgagcgcgcgttattggccgaacgtttgcacgccaatttattaggacgtttgcaaggcgaggaacgtctcctctggctttacgaagaagtggagaaaccattgagtcgcgtgctcgcgcatatggaagctaccggtgtcaaattagacgtggcgtatttggaggcactcagccttgaagttgctgccgaaatgcgccacttggaggaagaagtattccgtttagcaggccactcctttaaccttaattctcgcgatcagttagaacgtgtgttgttcgatgaacttggtctccctcctatcggcaagacagagaagaccggtaaacgtagcacttcagcggcggttttagaagctcttcgcgaagtccatcccattgtggacaagatcttgcagtaccgcgaactcgcgaaattgaaaggcacctatattgaccgtcttccggcattagtccacccgaaaacgggacgcctccatacccgcttcaaccaaacagccacggcgaccggtcgtttgtcctcctctgatccaaaccttcagaatattccagtacgtaccccattgggccagaagatccgcaaagcgtttgtagctgaggagggttggcgtttagtggccctcgattatagccaaattgaattacgtgtccttgcccatctttctggcgatgagaacctcatccgcgtgtttcaggaaggccgcgacattcacactcaaacggcaagctggatgtttggattatcagctgaagcgatcgatcctttgatgcgtcgtgcagcgaagaccatcaatttcggtgttctctacggtatgagtgcccatcgtttgtcgcaggaattaggcattccctatgaagaagctgcggcgttcattcagcgctactttcaaagctatcccaaagttaaagcatggatcgagaagactctcgaagaaggccgcacacgtggttacgtagagaccttatttggacgtcgccgctatgttcccgatttaaacgctcgcgtgaaatctgtccgtgaagccgccgaacgcatggcgttcaacatgcctgtacagggcacggcagctgacctcatgaaacttgcaatggtgcgcctttttccacaattgcgtgaagttggtgcccgcatgctcttgcaggtccacgatgaactcttgttagaagcgccaaaagagcgtgcggaagaggtggcagccctcgcgaaagaggttatggaaggcgtgtggcccttagcggtgcctcttgaagtcgaagttggtattggcgaggattggttggctgccaaaggataatga

SEQ ID NO: 402 - protein, 841 aa, synthetic construct
  REGION 1..841: note = Variant of DNA polymerase I from Thermus sp. strain 2.9
MHHHHHHGGSGMLPLFEPKGRVLLVDGHHLAYRNFFALKGLTTSRGEPVQGVYGFAKSLLKALKEDGDVVIVVFDAKAPSFRHEAYEAYKAGRAPTPEDFPRQLALMKELVDLLGLERLEVPGFEADDVLATLAKKAEREGYEVQILTADRDLFQLLSPRISVLHPEGHRITPEWLWEKYGLRPEQWVDFRALAGDPSDNIPGVKGIGEKTALKLLKEWGSLENLLKNLDQVKPASVREKILAHLEDLKLSRELSRVRTDLPLEVDFRGRREPDWEGLKAFLERLEFGSLLHEFGLLESPLPAEEAPWPPPEGAFLGYRLSRPEPMWAELLALAASAQGRVYRAEDPHGALRGLKEVRGLLAKDLAVVALREGLDLPPTDDPMLLAYLLDPSNTTPEGVARRYGGEWTEDAGERALLAERLHANLLGRLQGEERLLWLYEEVEKPLSRVLAHMEATGVKLDVAYLEALSLEVAAEMRHLEEEVFRLAGHSFNLNSRDQLERVLFDELGLPPIGKTEKTGKRSTSAAVLEALREVHPIVDKILQYRELAKLKGTYIDRLPALVHPKTGRLHTRFNQTATATGRLSSSDPNLQNIPVRTPLGQKIRKAFVAEEGWRLVALDYSQIELRVLAHLSGDENLIRVFQEGRDIHTQTASWMFGLSAEAIDPLMRRAAKTINFGVLYGMSAHRLSQELGIPYEEAAAFIQRYFQSYPKVKAWIEKTLEEGRTRGYVETLFGRRRYVPDLNARVKSVREAAERMAFNMPVQGTAADLMKLAMVRLFPQLREVGARMLLQVHDELLLEAPKERAEEVAALAKEVMEGVWPLAVPLEVEVGIGEDWLAAKG

SEQ ID NO: 403 - DNA, 2529 bp, synthetic construct
  misc_feature 1..2529: note = Variant of DNA polymerase I from Thermus sp. strain 2.9
  source 1..2529: mol_type = other DNA
atgcaccatcatcatcatcatggcggtagcggcatgttaccgttgttcgaacctaaaggtcgcgtgcttctggttgatggccatcatctcgcgtatcgtaacttctttgccctgaaaggattaaccaccagccgtggcgagccggtacagggtgtctacggctttgcaaagtcgctcctgaaagctctgaaagaagacggtgatgtggtgattgttgtctttgatgcgaaagcgccaagttttcgccacgaagcgtacgaagcttacaaagccgggcgtgctccaacgccggaagactttcctcgccaattggcgcttatgaaggaattagtggatttgcttggcctcgaacgcttggaagttcccggtttcgaggcagacgacgtattagcgactctcgcaaagaaagccgaacgtgagggctatgaagtccagatcttgacagcagatcgcgatcttttccagcttttatctccgcgcatttccgtgttacacccggaagggcatcgtatcaccccggaatggctctgggagaaatatggtttgcgtcccgaacaatgggtggattttcgcgccttagcgggcgatccgagcgacaatattccgggagttaaaggtatcggcgagaagacggcgctcaagctccttaaagaatgggggtcgttggagaacttgcttaagaatttagatcaggtcaaaccagcttcagtgcgtgagaagattcttgcacacctcgaagacctcaaattaagccgcgaattgtcccgtgtacgcaccgatttgccgctcgaagttgatttccgtggccgccgcgaacctgactgggagggtcttaaagcgtttttagagcgtcttgaatttggttcgctcttgcatgaattcggccttttagaaagcccgttaccagccgaagaagcaccttggccaccgcccgaaggcgcgtttttaggttaccgtttgagtcgcccggaaccgatgtgggccgaattattggctcttgcagcgtctgcccagggacgtgtgtatcgcgcggaagaccctcatggtgcgctccgtggcctcaaagaagtccgtggactcattgccaaagacttagctgttgttgcattgcgcgaaggtcttgatttacctccgactgatgatccaatgcttcttgcgtacctcttggacccgtcaaacacgacgcccgaaggcgtagcccgtcgttacggcggcgagtggaccgaagatgcaggtgagcgcgcgttattggccgaacgtttgcacgccaatttattaggacgtttgcaaggcgaggaacgtctcctctggctttacgaagaagtggagaaaccattgagtcgcgtgctcgcgcatatggaagctaccggtgtcaaattagacgtggcgtatttggaggcactcagccttgaagttgctgccgaaatgcgccgcttggaggaagaagtattccgtttagcaggccactcctttaaccttaattctcgcgatcagttagaacgtgtgttgttcgatgaacttggtctccctcctatcggcaagacagagaagaccggtaaacgtagcacttcagcggcggttttagaagctcttcgcgaagtccatcccattgtggacaagatcttgcagtaccgcgaactcgcgaaattgaaaggcacctatattgaccctcttccggcattagtccacccgaaaacgggacgcctccatacccgcttcaaccaaacagccacggcgaccggtcgtttgtcctcctctgatccaaaccttcagaatattccagtacgtaccccattgggccagaagatccgcaaagcgtttgtagctgaggagggttggcgtttagtggccctcgattatagccaaattgaattacgtgtccttgcccatctttctggcgatgagaacctcatccgcgtgtttcaggaaggccgcgacattcacactcaaacggcaagctggatgtttggattatcagctgaagcgatcgatcctttgatgcgtcgtgcagcgaagaccatcaatttcggtgttctctacggtatgagtgcccatcgtttgtcgcaggaattaggcattccctatgaagaagctgcggcgttcattcagcgctactttcaaagctatcccaaagttaaagcatggatcgagaagactctcgaagaaggccgcacacgtggttacgtagagaccttatttggacgtcgccgctatgttcccgatttaaacgctcgcgtgaaatctgtccgtgaagccgccgaacgcatggcgttcaacatgcctgtacagggcacggcagctgacctcatgaaacttgcaatggtgcgcctttttccacaattgcgtgaagttggtgcccgcatgctcttgcaggtccacgatgaactcttgttagaagcgccaaaagagcgtgcggaagaggtggcagccctcgcgaaagaggttatggaaggcgtgtggcccttagcggtgcctcttgaagtcgaagttggtattggcgaggattggttggctgccaaaggataatga

SEQ ID NO: 404 - protein, 841 aa, synthetic construct
  REGION 1..841: note = Variant of DNA polymerase I from Thermus sp. strain 2.9
MHHHHHHGGSGMLPLFEPKGRVLLVDGHHLAYRNFFALKGLTTSRGEPVQGVYGFAKSLLKALKEDGDVVIVVFDAKAPSFRHEAYEAYKAGRAPTPEDFPRQLALMKELVDLLGLERLEVPGFEADDVLATLAKKAEREGYEVQILTADRDLFQLLSPRISVLHPEGHRITPEWLWEKYGLRPEQWVDFRALAGDPSDNIPGVKGIGEKTALKLLKEWGSLENLLKNLDQVKPASVREKILAHLEDLKLSRELSRVRTDLPLEVDFRGRREPDWEGLKAFLERLEFGSLLHEFGLLESPLPAEEAPWPPPEGAFLGYRLSRPEPMWAELLALAASAQGRVYRAEDPHGALRGLKEVRGLIAKDLAVVALREGLDLPPTDDPMLLAYLLDPSNTTPEGVARRYGGEWTEDAGERALLAERLHANLLGRLQGEERLLWLYEEVEKPLSRVLAHMEATGVKLDVAYLEALSLEVAAEMRRLEEEVFRLAGHSFNLNSRDQLERVLFDELGLPPIGKTEKTGKRSTSAAVLEALREVHPIVDKILQYRELAKLKGTYIDPLPALVHPKTGRLHTRFNQTATATGRLSSSDPNLQNIPVRTPLGQKIRKAFVAEEGWRLVALDYSQIELRVLAHLSGDENLIRVFQEGRDIHTQTASWMFGLSAEAIDPLMRRAAKTINFGVLYGMSAHRLSQELGIPYEEAAAFIQRYFQSYPKVKAWIEKTLEEGRTRGYVETLFGRRRYVPDLNARVKSVREAAERMAFNMPVQGTAADLMKLAMVRLFPQLREVGARMLLQVHDELLLEAPKERAEEVAALAKEVMEGVWPLAVPLEVEVGIGEDWLAAKG

SEQ ID NO: 405 - DNA, 2529 bp, synthetic construct
  misc_feature 1..2529: note = Variant of DNA polymerase I from Thermus sp. strain 2.9
  source 1..2529: mol_type = other DNA
atgcaccatcatcatcatcatggcggtagcggcatgttaccgttgttcgaacctaaaggtcgcgtgcttctggttgatggccatcatctcgcgtatcgtaacttctttgccctgaaaggattaaccaccagccgtggcgagccggtacagggtgtctacggctttgcaaagtcgctcctgaaagctctgaaagaagacggtgatgtggtgattgttgtctttgatgcgaaagcgccaagttttcgccacgaagcgtacgaagcttacaaagccgggcgtgctccaacgccggaagactttcctcgccaattggcgcttatgaaggaattagtggatttgcttggcctcgaacgcttggaagttcccggtttcgaggcagacgacgtattagcgactctcgcaaagaaagccgaacgtgagggctatgaagtccagatcttgacagcagatcgcgatcttttccagcttttatctccgcgcgtctcggtgttacacccggaagggcatctgatcaccccggaatggctctgggagaaatatggtttgcgtcccgaacaatgggtggattttcgcgccttagcaggcgatccgagcgacaatattccgggagttaaaggtatcggcgagaagacggcgctcaagctccttaaagaatgggggtcgttggagaacttgcttaagaatttagatcaggtcaaaccagcttcagtgcgtgagaagattcttgcacacctcgaagacctcaaattaagcctggaattgtcccgtgtacgcaccgatttgccgctcgaagttgatttccgtggccgccgcgaacctgactgggagggtcttaaagcgtttttagagcgtcttgaatttggttcgctcttgcatgaattcggccttttagaaagcccgttaccagccgaagaagcaccttggccaccgcccgaaggcgcgtttttaggttaccgtttgagtcgcccggaaccgatgtgggccgaattattggctcttgcagcgtctgcccagggacgtgtgtatcgcgcggaagaccctcatggtgcgctcaaaggcctcaaagaagtccgtggactccttgccaaagacttagctgttgttgcattgcgcgaaggtcttgatttacctccgactgatgatccaatgcttcttgcgtacctcttggacccgtcaaacacgacgcccgaaggcgtagcccgtcgttacggcggcgagtggaccgaagatgcagccgagcgcgcgttattggccgaacgtttgcacgccaatttattaggacgtttgcaaggcgaggaaaagctcctctggctttacgaagaagtggagaaaccattgagtcgcgtgctcgcgcatatggaagctaccggtgtcaaattagacgtggcgtatttggaggcactcagccttgaagttgctgccgaaatgcgccgcttggaggaagaagtattccgtttagcaggccactcctttaaccttaattctcgcgatcagttagaacgtgtgttgttcgatgaacttggtctccctcctatcggcaagacagagaagaccggtaaacgtagcacttcagcggcggttttagaagctcttcgcgaagtccatcccattgtggacaagatcttgcagtaccgcgaactcgcgaaattgaaaggcacctatattgaccctcttccggcattagtccacccgaaaacgggacgcctccatacccgcttcaaccaaacagccacggcgaccggtcgtttgtcctcctctgatccaaaccttcagaatattccagtacgtaccccattgggccagaagatccgcaaagcgtttgtagctgaggagggttggcgtttagtggccctcgattatagccaaattgaattacgtgtccttgcccatctttctggcgatgagaacctcatccgcgtgtttcaggaaggccgtgacattcacactcaaacggcaagctggatgtttggattatcggcggaagcgatcgatcctttgatgcgtcgtgcagcgaagaccattaatttcggtgttctctacggtatgagtgcccatcgtttgtcgcaggaattaggcattccctatgaagaagctgtggcgttcattcagcgctactttcaaagctatcccaaagttaaagcatggatcgagaagactctcgaagaaggccgcacacgtggttacgtagagaccttatttggacgtcgccgctatgttcccgatttaaacgctcgcgtgaaatctgtccgtgaagccgccgaacgcatggcgttcaacatgcctgtacagggcacggcagctgacctcatgaaacttgcaatggtgcgcctttttccacaattgcgtgaagttggtgcccgcatgctcttgcaggtccacgatgaactcttgttagaagcgccaaaagagcgtgcggaagaggtggcagccctcgcgaaagaggttatggaaggcgtgtggcccttagcggtgcctcttgaagtcgaagttggtattggcgaggattggttggctgccaaaggataatga

SEQ ID NO: 406 - protein, 841 aa, synthetic construct
  REGION 1..841: note = Variant of DNA polymerase I from Thermus sp. strain 2.9
MHHHHHHGGSGMLPLFEPKGRVLLVDGHHLAYRNFFALKGLTTSRGEPVQGVYGFAKSLLKALKEDGDVVIVVFDAKAPSFRHEAYEAYKAGRAPTPEDFPRQLALMKELVDLLGLERLEVPGFEADDVLATLAKKAEREGYEVQILTADRDLFQLLSPRVSVLHPEGHLITPEWLWEKYGLRPEQWVDFRALAGDPSDNIPGVKGIGEKTALKLLKEWGSLENLLKNLDQVKPASVREKILAHLEDLKLSLELSRVRTDLPLEVDFRGRREPDWEGLKAFLERLEFGSLLHEFGLLESPLPAEEAPWPPPEGAFLGYRLSRPEPMWAELLALAASAQGRVYRAEDPHGALKGLKEVRGLLAKDLAVVALREGLDLPPTDDPMLLAYLLDPSNTTPEGVARRYGGEWTEDAAERALLAERLHANLLGRLQGEEKLLWLYEEVEKPLSRVLAHMEATGVKLDVAYLEALSLEVAAEMRRLEEEVFRLAGHSFNLNSRDQLERVLFDELGLPPIGKTEKTGKRSTSAAVLEALREVHPIVDKILQYRELAKLKGTYIDPLPALVHPKTGRLHTRFNQTATATGRLSSSDPNLQNIPVRTPLGQKIRKAFVAEEGWRLVALDYSQIELRVLAHLSGDENLIRVFQEGRDIHTQTASWMFGLSAEAIDPLMRRAAKTINFGVLYGMSAHRLSQELGIPYEEAVAFIQRYFQSYPKVKAWIEKTLEEGRTRGYVETLFGRRRYVPDLNARVKSVREAAERMAFNMPVQGTAADLMKLAMVRLFPQLREVGARMLLQVHDELLLEAPKERAEEVAALAKEVMEGVWPLAVPLEVEVGIGEDWLAAKG

SEQ ID NO: 407 - DNA, 2529 bp, synthetic construct
  misc_feature 1..2529: note = Variant of DNA polymerase I from Thermus sp. strain 2.9
  source 1..2529: mol_type = other DNA
atgcaccatcatcatcatcatggcggtagcggcatgttaccgttgttcgaacctaaaggtcgcgtgcttctggttgatggccatcatctcgcgtatcgtaacttctttgccctgaaaggattaaccaccagccgtggcgagccggtacagggtgtctacggctttgcaaagtcgctcctgaaagctctgaaagaagacggtgatgtggtgattgttgtctttgatgcgaaagcgccaagttttcgccacgaagcgtacgaagcttacaaagccgggcgtgctccaacgccggaagactttcctcgccaattggcgcttatgaaggaattagtggatttgcttggcctcgaacgcttggaagttcccggtttcgaggcagacgacgtattagcgactctcgcaaagaaagccgaacgtgagggctatgaagtccagatcttgacagcagatcgcgatcttttccagcttttatctccgcgcatttccgtgttacacccggaagggcatcgtatcaccccggaatggctctgggagaaatatggtttgcgtcccgaacaatgggtggattttcgcgccttagcaggcgatccgagcgacaatattccgggagttaaaggtatcggcgagaagacggcgctcaagctccttaaagaatgggggtcgttggagaacttgcttaagaatttagatcaggtcaaaccagcttcagtgcgtgagaagattcttgcacacctcgaagacctcaaattaagccgcgaattgtcccgtgtacgcaccgatttgccgctcgaagttgatttccgtggccgccgcgaacctgactgggagggtcttaaagcgtttttagagcgtcttgaatttggttcgctcttgcatgaattcggccttttagaaagcccgttaccagccgaagaagcaccttggccaccgcccgaaggcgcgtttttaggttaccgtttgagtcgcccggaaccgatgtgggccgaattattggctcttgcagcgtctgcccagggacgtgtgtatcgcgcggaagaccctcatggtgcgctccgtggcctcaaagaagtccgtggactccttgccaaagacttagctgttgttgcattgcgcgaaggtcttgatttacctccgactgatgatccaatgcttcttgcgtacctcttggacccgtcaaacacgacgcccgaaggcgtagcccgtcgttacggcggcgagtggaccgaagatgcaggtgagcgcgcgttattggccgaacgtttgcacgccaatttattaggacgtttgcaaggcgaggaacgtctcctctggctttacgaagaagtggagaaaccattgagtcgcgtgctcgcgcatatggaagctaccggtgtcaaattagacgtggcgtatttggaggcactcagccttgaagttgctgccgaaatgcgccgcttggaggaagaagtattccgtttagcaggccactcctttaaccttaattctcgcgatcagttagaacgtgtgttgttcgatgaacttggtctccctcctatcggcaagacagagaagaccggtaaacgtagcacttcagcggcggttttagaagctcttcgcgaagtccatcccattgtggacaagatcttgcagtaccgcgaactcgcgaaattgaaaggcacctatattgaccctcttccggcattagtccacccgaaaacgggacgcctccatacccgcttcaaccaaacagccacggcgaccggtcgtttgtcctcctctgatccaaaccttcagaatattccagtacgtaccccattgggccagaagatccgcaaagcgtttgtagctgaggagggttggcgtttagtggccctcgattatagccaaattgaattacgtgtccttgcccatctttctggcgatgagaacctcatccgcgtgtttcaggaaggcaaagacattcacactcaaacggcaagctggatgtttggattatcagctgaagcgatcgatcctttgatgcgtcgtgcagcgaagaccgttaatttcggtgttctctacggtatgagtgcccatcgtttgtcgcaggaattaggcattccctatgaagaagctgtggcgttcattcagcgctactttcaaagctatcccaaagttaaagcatggatcgagaagactctcgaagaaggccgcacacgtggttacgtagagaccttatttggacgtcgccgctatgttcccgatttaaacgctcgcgtgaaatctgtccgtgaagccgccgaacgcatggcgttcaacatgcctgtacagggcacggcagctgacctcatgaaacttgcaatggtgcgcctttttccacaattgcgtgaagttggtgcccgcatgctcttgcaggtccacgatgaactcttgttagaagcgccaaaagagcgtgcggaagaggtggcagccctcgcgaaagaggttatggaaggcgtgtggcccttagcggtgcctcttgaagtcgaagttggtattggcgaggattggttggctgccaaaggataatga

SEQ ID NO: 408 - protein, 841 aa, synthetic construct
  REGION 1..841: note = Variant of DNA polymerase I from Thermus sp. strain 2.9
MHHHHHHGGSGMLPLFEPKGRVLLVDGHHLAYRNFFALKGLTTSRGEPVQGVYGFAKSLLKALKEDGDVVIVVFDAKAPSFRHEAYEAYKAGRAPTPEDFPRQLALMKELVDLLGLERLEVPGFEADDVLATLAKKAEREGYEVQILTADRDLFQLLSPRISVLHPEGHRITPEWLWEKYGLRPEQWVDFRALAGDPSDNIPGVKGIGEKTALKLLKEWGSLENLLKNLDQVKPASVREKILAHLEDLKLSRELSRVRTDLPLEVDFRGRREPDWEGLKAFLERLEFGSLLHEFGLLESPLPAEEAPWPPPEGAFLGYRLSRPEPMWAELLALAASAQGRVYRAEDPHGALRGLKEVRGLLAKDLAVVALREGLDLPPTDDPMLLAYLLDPSNTTPEGVARRYGGEWTEDAGERALLAERLHANLLGRLQGEERLLWLYEEVEKPLSRVLAHMEATGVKLDVAYLEALSLEVAAEMRRLEEEVFRLAGHSFNLNSRDQLERVLFDELGLPPIGKTEKTGKRSTSAAVLEALREVHPIVDKILQYRELAKLKGTYIDPLPALVHPKTGRLHTRFNQTATATGRLSSSDPNLQNIPVRTPLGQKIRKAFVAEEGWRLVALDYSQIELRVLAHLSGDENLIRVFQEGKDIHTQTASWMFGLSAEAIDPLMRRAAKTVNFGVLYGMSAHRLSQELGIPYEEAVAFIQRYFQSYPKVKAWIEKTLEEGRTRGYVETLFGRRRYVPDLNARVKSVREAAERMAFNMPVQGTAADLMKLAMVRLFPQLREVGARMLLQVHDELLLEAPKERAEEVAALAKEVMEGVWPLAVPLEVEVGIGEDWLAAKG

SEQ ID NO: 409 - DNA, 2529 bp, synthetic construct
  misc_feature 1..2529: note = Variant of DNA polymerase I from Thermus sp. strain 2.9
  source 1..2529: mol_type = other DNA
atgcaccatcatcatcatcatggcggtagcggcatgttaccgttgttcgaacctaaaggtcgcgtgcttctggttgatggccatcatctcgcgtatcgtaacttctttgccctgaaaggattaaccaccagccgtggcgagccggtacagggtgtctacggctttgcaaagtcgctcctgaaagctctgaaagaagacggtgatgtggtgattgttgtctttgatgcgaaagcgccaagttttcgccacgaagcgtacgaagcttacaaagccgggcgtgctccaacgccggaagactttcctcgccaattggcgcttatgaaggaattagtggatttgcttggcctcgaacgcttggaagttcccggtttcgaggcagacgacgtattagcgactctcgcaaagaaagccgaacgtgagggctatgaagtccagatcttgacagcagatcgcgatcttttccagcttttatctccgcgcgtctcggtgttacacccggaagggcatctgatcaccccggaatggctctgggagaaatatggtttgcgtcccgaacaatgggtggattttcgcgccttagcgggcgatccgagcgacaatattccgggagttaaaggtatcggcgagaagacggcgctcaagctccttaaagaatgggggtcgttggagaacttgcttaagaatttagatcaggtcaaaccagagtcagtgcgtgagaagattcttgcacacctcgaagacctccgtttaagcctggaattgtcccgtgtacgcaccgatttgccgctcgaagttgatttccgtggccgccgcgaacctgactgggagggtcttaaagcgtttttagagcgtcttgaatttggttcgctcttgcatgaattcggccttttagaaagcccgttaccagccgaagaagcaccttggccaccgcccgaaggcgcgtttttaggttaccgtttgagtcgcccggaaccgatgtgggccgaattattggctcttgcagcgtctgcccagggacgtgtgtatcgcgcggaagaccctcatggtgcgctccgtggcctcaaagaagtccgtggactccttgccaaagacttagctgttgttgcattgcgcgaaggtcttgatttacctccgactgatgatccaatgcttcttgcgtacctcttggacccgtcaaacacgacgcccgaaggcgtagcccgtcgttacggcggcgagtggaccgaagatgcaggtgagcgcgcgttattggccgaacgtttgcacgccaatttattaggacgtttgcaaggcgaggaaaagctcctctggctttacgaagaagtggagaaaccattgagtcgcgtgctcgcgcatatggaagctaccggtgtcaaattagacgtggcgtatttggaggcactcagccttgaagttgctgccgaaatgcgccgcttggaggaagaagtattccgtttagcaggccactcctttaaccttaattctcgcgatcagttagaacgtgtgttgttcgatgaacttggtctccctcctatcggcaagacagagaagaccggtaaacgtagcacttcagcggcggttttagaagctcttcgcgaagtccatcccattgtggacaagatcttgcagtaccgcgaactcgcgaaattgaaaggcacctatattgaccctcttccggcattagtccacccgaaaacgggacgcctccatacccgcttcaaccaaacagccacggcgaccggtcgtttgtcctcctctgatccaaaccttcagaatattccagtacgtaccccattgggccagaagatccgcaaagcgtttgtagctgaggagggttggcgtttagtggccctcgattatagccaaattgaattacgtgtccttgcccatctttctggcgatgagaacctcatccgcgtgtttcaggaaggccgtgacattcacactcaaacggcaagctggatgtttggattatcagctgaagcgatcgatcctttgatgcgtcgtgcagcgaagaccattaatttcggtgttctctacggtatgagtgcccatcgtttgtcgcaggaattaggcattccctatgaagaagctgcggcgttcattcagcgctactttcaaagctatcccaaagttaaagcatggatcgagaagactctcgaagaaggccgcacacgtggttacgtagagaccttatttggacgtcgccgctatgttcccgatttaaacgctcgcgtgaaatctgtccgtgaagccgccgaacgcatggcgttcaacatgcctgtacagggcacggcagctgacctcatgaaacttgcaatggtgcgcctttttccacaattgcgtgaagttggtgcccgcatgctcttgcaggtccacgatgaactcttgttagaagcgccaaaagagcgtgcggaagaggtggcagccctcgcgaaagaggttatggaaggcgtgtggcccttagcggtgcctcttgaagtcgaagttggtattggcgaggattggttggctgccaaaggataatga

SEQ ID NO: 410 - protein, 841 aa, synthetic construct
  REGION 1..841: note = Variant of DNA polymerase I from Thermus sp. strain 2.9
MHHHHHHGGSGMLPLFEPKGRVLLVDGHHLAYRNFFALKGLTTSRGEPVQGVYGFAKSLLKALKEDGDVVIVVFDAKAPSFRHEAYEAYKAGRAPTPEDFPRQLALMKELVDLLGLERLEVPGFEADDVLATLAKKAEREGYEVQILTADRDLFQLLSPRVSVLHPEGHLITPEWLWEKYGLRPEQWVDFRALAGDPSDNIPGVKGIGEKTALKLLKEWGSLENLLKNLDQVKPESVREKILAHLEDLRLSLELSRVRTDLPLEVDFRGRREPDWEGLKAFLERLEFGSLLHEFGLLESPLPAEEAPWPPPEGAFLGYRLSRPEPMWAELLALAASAQGRVYRAEDPHGALRGLKEVRGLLAKDLAVVALREGLDLPPTDDPMLLAYLLDPSNTTPEGVARRYGGEWTEDAGERALLAERLHANLLGRLQGEEKLLWLYEEVEKPLSRVLAHMEATGVKLDVAYLEALSLEVAAEMRRLEEEVFRLAGHSFNLNSRDQLERVLFDELGLPPIGKTEKTGKRSTSAAVLEALREVHPIVDKILQYRELAKLKGTYIDPLPALVHPKTGRLHTRFNQTATATGRLSSSDPNLQNIPVRTPLGQKIRKAFVAEEGWRLVALDYSQIELRVLAHLSGDENLIRVFQEGRDIHTQTASWMFGLSAEAIDPLMRRAAKTINFGVLYGMSAHRLSQELGIPYEEAAAFIQRYFQSYPKVKAWIEKTLEEGRTRGYVETLFGRRRYVPDLNARVKSVREAAERMAFNMPVQGTAADLMKLAMVRLFPQLREVGARMLLQVHDELLLEAPKERAEEVAALAKEVMEGVWPLAVPLEVEVGIGEDWLAAKG

SEQ ID NO: 411 - DNA, 2529 bp, synthetic construct
  misc_feature 1..2529: note = Variant of DNA polymerase I from Thermus sp. strain 2.9
  source 1..2529: mol_type = other DNA
atgcaccatcatcatcatcatggcggtagcggcatgttaccgttgttcgaacctaaaggtcgcgtgcttctggttgatggccatcatctcgcgtatcgtaacttctttgccctgaaaggattaaccaccagccgtggcgagccggtacagggtgtctacggctttgcaaagtcgctcctgaaagctctgaaagaagacggtgatgtggtgattgttgtctttgatgcgaaagcgccaagttttcgccacgaagcgtacgaagcttacaaagccgggcgtgctccaacgccggaagactttcctcgccaattggcgcttatgaaggaattagtggatttgcttggcctcgaacgcttggaagttcccggtttcgaggcagacgacgtattagcgactctcgcaaagaaagccgaacgtgagggctatgaagtccagatcttgacagcagatcgcgatcttttccagcttttatctccgcgcatttccgtgttacacccggaagggcatcgtatcaccccggaatggctctgggagaaatatggtttgcgtcccgaacaatgggtggattttcgcgccttagcgggcgatccgagcgacaatattccgggagttaaaggtatcggcgagaagacggcgctcaagctccttaaagaatgggggtcgttggagaacttgcttaagaatttagatcaggtcaaaccagcttcagtgcgtgagaagattcttgcacacctcgaagacctcaaattaagccgcgaattgtcccgtgtacgcaccgatttgccgctcgaagttgatttccgtggccgccgcgaacctgactgggagggtcttaaagcgtttttagagcgtcttgaatttggttcgctcttgcatgaattcggccttttagaaagcccgttaccagccgaagaagcaccttggccaccgcccgaaggcgcgtttttaggttaccgtttgagtcgcccggaaccgatgtgggccgaattattggctcttgcagcgtctgcccagggacgtgtgtatcgcgcggaagaccctcatggtgcgctccgtggcctcaaagaagtccgtggactccttgccaaagacttagctgttgttgcattgcgcgaaggtcttgatttacctccgactgatgatccaatgcttcttgcgtacctcttggacccgtcaaacacgacgcccgaacgcgtagcccgtcgttacggcggcgagtggaccgaagatgcaggtgagcgcgcgttattggccgaacgtttgcacgccaatttattaggacgtttgcaaggcgaggaacgtctcctctggctttacgaagaagtggagaaaccattgagtcgcgtgctcgcgcatatggaagctaccggtgtcaaattagacgtggcgtatttggaggcactcagccttgaagccgctgccgaaatgcgccgcttggaggaagaagtattccgtttagcaggccactcctttaaccttaattctcgcgatcagttagaacgtgtgttgttcgatgaacttggtctccctcctatcggcaagacagagaagaccggtaaacgtagcacttcagcggcggttttagaagctcttcgcgaagtccatcccattgtggacaagatcttgcagtaccgcgaactcgcgaaattgaaaggcacctatattgaccctcttccggcattagtccacccgaaaacgggacgcctccatacccgcttcaaccaaacagccacggcgaccggtcgtttgtcctcctctgatccaaaccttcagaatattccagtacgtaccccattgggccagaagatccgcaaagcgtttgtagctgaggagggttggcgtttagtggccctcgattatagccaaattgaattacgtgtccttgcccatctttctggcgatgagaacctcatccgcgtgtttcaggaaggccgcgacattcacactcaaacggcaagctggatgtttggattatcagctgaagcgatcgatcctttgatgcgtcgtgcagcgaagaccatcaatttcggtgttctctacggtatgagtgcccatcgtttgtcgcaggaattaggcattccctatgaagaagctgcggcgttcattcagcgctactttcaaagctatcccaaagttaaagcatggatcgagaagactctcgaagaaggccgcacacgtggttacgtagagaccttatttggacgtcgccgctatgttcccgatttaaacgctcgcgtgaaatctgtccgtgaagccgccgaacgcatggcgtttaacatgcctgtacagggcacggcagctgacctcatgaaacttgcaatggtgcgcctttttccacaattgcgtgaagttggtgcccgcatgctcttgcaggtccacgatgaactcttgttagaagcgccaaaagagcgtgcggaagaggtggcagccctcgcgaaagaggttatggaaggcgtgtggcccttagcggtgcctcttgaagtcgaagttggtattggcgaggattggttggctgccaaaggataatga

SEQ ID NO: 412 - protein, 841 aa, synthetic construct
  REGION 1..841: note = Variant of DNA polymerase I from Thermus sp. strain 2.9
MHHHHHHGGSGMLPLFEPKGRVLLVDGHHLAYRNFFALKGLTTSRGEPVQGVYGFAKSLLKALKEDGDVVIVVFDAKAPSFRHEAYEAYKAGRAPTPEDFPRQLALMKELVDLLGLERLEVPGFEADDVLATLAKKAEREGYEVQILTADRDLFQLLSPRISVLHPEGHRITPEWLWEKYGLRPEQWVDFRALAGDPSDNIPGVKGIGEKTALKLLKEWGSLENLLKNLDQVKPASVREKILAHLEDLKLSRELSRVRTDLPLEVDFRGRREPDWEGLKAFLERLEFGSLLHEFGLLESPLPAEEAPWPPPEGAFLGYRLSRPEPMWAELLALAASAQGRVYRAEDPHGALRGLKEVRGLLAKDLAVVALREGLDLPPTDDPMLLAYLLDPSNTTPERVARRYGGEWTEDAGERALLAERLHANLLGRLQGEERLLWLYEEVEKPLSRVLAHMEATGVKLDVAYLEALSLEAAAEMRRLEEEVFRLAGHSFNLNSRDQLERVLFDELGLPPIGKTEKTGKRSTSAAVLEALREVHPIVDKILQYRELAKLKGTYIDPLPALVHPKTGRLHTRFNQTATATGRLSSSDPNLQNIPVRTPLGQKIRKAFVAEEGWRLVALDYSQIELRVLAHLSGDENLIRVFQEGRDIHTQTASWMFGLSAEAIDPLMRRAAKTINFGVLYGMSAHRLSQELGIPYEEAAAFIQRYFQSYPKVKAWIEKTLEEGRTRGYVETLFGRRRYVPDLNARVKSVREAAERMAFNMPVQGTAADLMKLAMVRLFPQLREVGARMLLQVHDELLLEAPKERAEEVAALAKEVMEGVWPLAVPLEVEVGIGEDWLAAKG

SEQ ID NO: 413 - DNA, 2529 bp, synthetic construct
  misc_feature 1..2529: note = Variant of DNA polymerase I from Thermus sp. strain 2.9
  source 1..2529: mol_type = other DNA
atgcaccatcatcatcatcatggcggtagcggcatgttaccgttgttcgaacctaaaggtcgcgtgcttctggttgatggccatcatctcgcgtatcgtaacttctttgccctgaaaggattaaccaccagccgtggcgagccggtacagggtgtctacggctttgcaaagtcgctcctgaaagctctgaaagaagacggtgatgtggtgattgttgtctttgatgcgaaagcgccaagttttcgccacgaagcgtacgaagcttacaaagccgggcgtgctccaacgccggaagactttcctcgccaattggcgcttatgaaggaattagtggatttgcttggcctcgaacgcttggaagttcccggtttcgaggcagacgacgtattagcgactctcgcaaagaaagccgaacgtgagggctatgaagtccagatcttgacagcagatcgcgatcttttccagcttttatctccgcgcatttccgtgttacacccggaagggcatctgatcaccccggaatggctctgggagaaatatggtttgcgtcccgaacaatgggtggattttcgcgccttagcgggcgatccgagcgacaatattccgggagttaaaggtatcggcgagaagacggcgctcaagctccttaaagaatgggggtcgttggagaacttgcttaagaatttagatcaggtcaaaccagcttcagtgcgtgagaagattcttgcacacctcgaagacctccgtttaagcctggaattgtcccgtgtacgcaccgatttgccgctcgaagttgatttccgtcgccgccgcgaacctgactgggagggtcttaaagcgtttttagagcgtcttgaatttggttcgctcttgcatgaattcggccttttagaaagcccgttaccagccgaagaagcaccttggccaccgcccgaaggcgcgtttttaggttaccgtttgagtcgcccggaaccgatgtgggccgaattattggctcttgcagcgtctgcccagggacgtgtgtatcgcgcggaagaccctcatggtgcgctccgcggcctcaaagaagtccgtggactccttgccaaagacttagctgttgttgcattgcgcgaaggtcttgatttacctccgactgatgatccaatgcttcttgcgtacctcttggacccgtcaaacacgacgcccgaaggcgtagcccgtcgttacggcggcgagtggaccgaagatgcaggcgagcgcgcgttattggccgaacgtttgcaccagaatttattaggacgtttgcaaggcgaggaacgtctcctctggctttacgaagaagtggagaaaccattgagtcgcgtgctcgcgcatatggaagctaccggtgtcaaattagacgtggcgtatttggaggcactcagccttgaagttgctgccgaaatgcgccgcttggaggaagaagtattccgtttagcaggccactcctttaaccttaattctcgcgatcagttagaacgtgtgttgttcgatgaacttggtctccctcctatcggcaagacagagaagaccggtaaacgtagcacttcagcggcggttttagaagctcttcgcgaagtccatcccattgtggacaagatcttgcagtaccgcgaactcgcgaaattgaaaggcacctatattgaccctcttccggcattagtccacccgaaaacgggacgcctccatacccgcttcaaccaaacagccacggcgaccggtcgtttgtcctcctctgatccaaaccttcagaatattccagtacgtaccccattgggccagaagatccgcaaagcgtttgtagctgaggagggttggcgtttagtggccctcgattatagccaaattgaattacgtgtccttgcccatctttctggcgatgagaacctcatccgcgtgtttcaggaaggccgcgacattcacactcaaacggcaagctggatgtttggattaccggcggaagcgatcgatcctttgatgcgtcgtgcagcgaagaccatcaatttcggtgttctctacggtatgagtgcccatcgtttgtcgcaggaattaggcattccctatgaagaagctgcggcgttcattcagcgctactttcaaagctatcccaaagttaaagcatggatcgagaagactctcgaagaaggccgcacacgtggttacgtagagaccttatttggacgtcgccgctatgttcccgatttaaacgctcgcgtgaaatctgtccgtgaagccgccgaacgcatggcgttcaacatgcctgtacagggcacggcagctgacctcatgaaacttgcaatggtgcgcctttttccacaattgcgtgaagttggtgcccgcatgctcttgcaggtccacgatgaactcttgttagaagcgccaaaagagcgtgcggaagaggtggcagccctcgcgaaagaggttatggaaggcgtgtggcccttagcggtgcctcttgaagtcgaagttggtattggcgaggattggttggctgccaaaggataatga

SEQ ID NO: 414 - protein, 841 aa, synthetic construct
  REGION 1..841: note = Variant of DNA polymerase I from Thermus sp. strain 2.9
MHHHHHHGGSGMLPLFEPKGRVLLVDGHHLAYRNFFALKGLTTSRGEPVQGVYGFAKSLLKALKEDGDVVIVVFDAKAPSFRHEAYEAYKAGRAPTPEDFPRQLALMKELVDLLGLERLEVPGFEADDVLATLAKKAEREGYEVQILTADRDLFQLLSPRISVLHPEGHLITPEWLWEKYGLRPEQWVDFRALAGDPSDNIPGVKGIGEKTALKLLKEWGSLENLLKNLDQVKPASVREKILAHLEDLRLSLELSRVRTDLPLEVDFRRRREPDWEGLKAFLERLEFGSLLHEFGLLESPLPAEEAPWPPPEGAFLGYRLSRPEPMWAELLALAASAQGRVYRAEDPHGALRGLKEVRGLLAKDLAVVALREGLDLPPTDDPMLLAYLLDPSNTTPEGVARRYGGEWTEDAGERALLAERLHQNLLGRLQGEERLLWLYEEVEKPLSRVLAHMEATGVKLDVAYLEALSLEVAAEMRRLEEEVFRLAGHSFNLNSRDQLERVLFDELGLPPIGKTEKTGKRSTSAAVLEALREVHPIVDKILQYRELAKLKGTYIDPLPALVHPKTGRLHTRFNQTATATGRLSSSDPNLQNIPVRTPLGQKIRKAFVAEEGWRLVALDYSQIELRVLAHLSGDENLIRVFQEGRDIHTQTASWMFGLPAEAIDPLMRRAAKTINFGVLYGMSAHRLSQELGIPYEEAAAFIQRYFQSYPKVKAWIEKTLEEGRTRGYVETLFGRRRYVPDLNARVKSVREAAERMAFNMPVQGTAADLMKLAMVRLFPQLREVGARMLLQVHDELLLEAPKERAEEVAALAKEVMEGVWPLAVPLEVEVGIGEDWLAAKG

SEQ ID NO: 415 - DNA, 2529 bp, synthetic construct
  misc_feature 1..2529: note = Variant of DNA polymerase I from Thermus sp. strain 2.9
  source 1..2529: mol_type = other DNA
atgcaccatcatcatcatcatggcggtagcggcatgttaccgttgttcgaacctaaaggtcgcgtgcttctggttgatggccatcatctcgcgtatcgtaacttctttgccctgaaaggattaaccaccagccgtggcgagccggtacagggtgtctacggctttgcaaagtcgctcctgaaagctctgaaagaagacggtgatgtggtgattgttgtctttgatgcgaaagcgccaagttttcgccacgaagcgtacgaagcttacaaagccgggcgtgctccaacgccggaagactttcctcgccaattggcgcttatgaaggaattagtggatttgcttggcctcgaacgcttggaagttcccggtttcgaggcagacgacgtattagcgactctcgcaaagaaagccgaacgtgagggctatgaagtccagatcttgacagcagatcgcgatcttttccagcttttatctccgcgcatttccgtgttacacccggaagggcatcgtatcaccccggaatggctctgggagaaatatggtttgcgtcccgaacaatgggtggattttcgcgccttagcgggcgatccgagcgacaatattccgggagttaaaggtatcggcgagaagacggcgctcaagctccttaaagaatgggggtcgttggagaacttgcttaagaatttagatcaggtcaaaccagcttcagtgcgtgagaagattcttgcacacctcgaagacctcaaattaagccgcgaattggtccgtgtacgcaccgatttgccgctcgaagttgatttccgtggccgccgcgaacctgactgggagggtcttaaagcgtttttagagcgtcttgaactgggttcgctcttgcatgaattcggccttttagaaagcccgttaccagccgaagaagcaccttggccaccgcccgaaggcgcgtttttaggttaccgtttgagtcgcccggaaccgatgtgggccgaattattggctcttgcagcgtctgcccagggacgtgtgtatcgcgcggaagaccctcatggtgcgctccgtggcctcaaagaagtccgtggactccttgccaaagacttagctgttgttgcattgcgcgaaggtcttgatttacctccgactgatgatccaatgcttcttgcgtacctcttggacccgtcaaacacgacgcccgaaggcgtagcccgtcgttacggcggcgagtggaccgaagatgcaggtgagcgcgcgttattggccgaacgtttgcacgccaatttattaggacgtttgcaaggcgaggaacgtctcctctggctttacgaagaagtggagaaaccattgagtcgcgtgctcgcgcatatggaagctaccggtgtcaaattagacgtggcgtatttggaggcactcagccttgaagttgctgccgaaatgcgccgcttggaggaagaagtattccgtttagcaggccactcctttaaccttaattctcgcgatcagttagaacgtgtgttgttcgatgaacttggtctccctcctatcggcaagacagagaagaccggtaaacgtagcacttcagcggcggttttagaagctcttcgcgaagtccatcccattgtggacaagatcttgcagtaccgcgaactcgcgaaattgaaaggcacctatattgaccctcttccggcattagtccacccgaaaacgggacgcctccatacccgcttcaaccaaacagccacggcgaccggtcgtttgtcctcctctgatccaaaccttcagaatattccagtacgtaccccattgggccagaagatccgcaaagcgtttgtagctgaggagggttggcgtttagtggccctcgattatagccaaattgaattacgtgtccttgcccatctttctggcgatgagaacctcatccgcgtgtttcaggaaggccgcgacattcacactcaaacggcaagctggatgtttggattatcagctgaagcgatcgatcctttgatgcgtcgtgcagcgaagaccatcaatttcggtgttctctacggtatgagtgcccatcgtttgtcgcaggaattaggcattccctatgaagaagctgcggcgttcattcagcgctactttcaaagctatcccaaagttaaagcatggatcgagaagactctcgaagaaggccgcacacgtggttacgtagagaccttatttggacgtcgccgctatgttcccgatttaaacgctcgcgtgaaatctgtccgtgaagccgccgaacgcatggcgtttaacatgcctgtacagggcacggcagctgacctcatgaaacttgcaatggtgcgcctttttccacaattgcgtgaagttggtgcccgcatgctcttgcaggtccacgatgaactcttgttagaagcgccaaaagagcgtgcggaagaggtggcagccctcgcgaaagaggttatggaaggcgtgtggcccttagcggtgcctcttgaagtcgaagttggtattggcgaggattggttggctgccaaaggataatga

SEQ ID NO: 416 - protein, 841 aa, synthetic construct
  REGION 1..841: note = Variant of DNA polymerase I from Thermus sp. strain 2.9
MHHHHHHGGSGMLPLFEPKGRVLLVDGHHLAYRNFFALKGLTTSRGEPVQGVYGFAKSLLKALKEDGDVVIVVFDAKAPSFRHEAYEAYKAGRAPTPEDFPRQLALMKELVDLLGLERLEVPGFEADDVLATLAKKAEREGYEVQILTADRDLFQLLSPRISVLHPEGHRITPEWLWEKYGLRPEQWVDFRALAGDPSDNIPGVKGIGEKTALKLLKEWGSLENLLKNLDQVKPASVREKILAHLEDLKLSRELVRVRTDLPLEVDFRGRREPDWEGLKAFLERLELGSLLHEFGLLESPLPAEEAPWPPPEGAFLGYRLSRPEPMWAELLALAASAQGRVYRAEDPHGALRGLKEVRGLLAKDLAVVALREGLDLPPTDDPMLLAYLLDPSNTTPEGVARRYGGEWTEDAGERALLAERLHANLLGRLQGEERLLWLYEEVEKPLSRVLAHMEATGVKLDVAYLEALSLEVAAEMRRLEEEVFRLAGHSFNLNSRDQLERVLFDELGLPPIGKTEKTGKRSTSAAVLEALREVHPIVDKILQYRELAKLKGTYIDPLPALVHPKTGRLHTRFNQTATATGRLSSSDPNLQNIPVRTPLGQKIRKAFVAEEGWRLVALDYSQIELRVLAHLSGDENLIRVFQEGRDIHTQTASWMFGLSAEAIDPLMRRAAKTINFGVLYGMSAHRLSQELGIPYEEAAAFIQRYFQSYPKVKAWIEKTLEEGRTRGYVETLFGRRRYVPDLNARVKSVREAAERMAFNMPVQGTAADLMKLAMVRLFPQLREVGARMLLQVHDELLLEAPKERAEEVAALAKEVMEGVWPLAVPLEVEVGIGEDWLAAKG

SEQ ID NO: 417 - DNA, 2529 bp, synthetic construct
  misc_feature 1..2529: note = Variant of DNA polymerase I from Thermus sp. strain 2.9
  source 1..2529: mol_type = other DNA
atgcaccatcatcatcatcatggcggtagcggcatgttaccgttgttcgaacctaaaggtcgcgtgcttctggttgatggccatcatctcgcgtatcgtaacttctttgccctgaaaggattaaccaccagccgtggcgagccggtacagggtgtctacggctttgcaaagtcgctcctgaaagctctgaaagaagacggtgatgtggtgattgttgtctttgatgcgaaagcgccaagttttcgccacgaagcgtacgaagcttacaaagccgggcgtgctccaacgccggaagactttcctcgccaattggcgcttatgaaggaattagtggatttgcttggcctcgaacgcttggaagttcccggtttcgaggcagacgacgtattagcgactctcgcaaagaaagccgaacgtgagggctatgaagtccagatcttgacagcagatcgcgatcttttccagcttttatctccgcgcatttccgtgttacacccggaagggcatcgcatcaccccggaatggctctgggagaaatatggtttgcgtcccgaacaatgggtggattttcgcgccttagcaggcgatccgagcgacaatattccgggagttaaaggtatcggcgagaagacggcgctcaagctccttaaagaatgggggtcgttggagaacttgcttaagaatttagatcaggtcaaaccagagtcagtgcgtgagaagattcttgcacacctcgaagacctcaaattaagcctggaattgtcccgtgtacgcaccgatttgccgctcgaagttgatttccgtcgccgccgcgaacctgactgggagggtcttaaagcgtttttagagcgtcttgaatttggttcgctcttgcatgaattcggccttttagaaagcccgttaccagccgaagaagcaccttggccaccgcccgaaggcgcgtttttaggttaccgtttgagtcgcccggaaccgatgtgggccgaattattggctcttgcagcgtctgcccagggacgtgtgtatcgcgcggaagaccctcatggtgcgctcaaaggcctcaaagaagtccgtggactccttgccaaagacttagctgttgttgcattgcgcgaaggtcttgatttacctccgactgatgatccaatgcttcttgcgtacctcttggacccgtcaaacacgacgcccgaaggcgtagcccgtcgttacggcggcgagtggaccgaagatgcaggcgagcgcgcgttattggccgaacgtttgcacgccaatttattaggacgtttgcaaggcgaggaaaagctcctctggctttacgaagaagtggagaaaccattgagtcgcgtgctcgcgcatatggaagctaccggtgtcaaattagacgtggcgtatttggaggcactcagccttgaagttgctgccgaaatgcgccgcttggaggaagaagtattccgtttagcaggccactcctttaaccttaattctcgcgatcagttagaacgtgtgttgttcgatgaacttggtctccctcctatcggcaagacagagaagaccggtaaacgtagcacttcagcggcggttttagaagctcttcgcgaagtccatcccattgtggacaagatcttgcagtaccgcgaactcgcgaaattgaaaggcacctatattgaccctcttccggcattagtccacccgaaaacgggacgcctccatacccgcttcaaccaaacagccacggcgaccggtcgtttgtcctcctctgatccaaaccttcagaatattccagtacgtaccccattgggccagaagatccgccgcgcgtttgtagctgaggagggttggcgtttagtggccctcgattatagccaaattgaattacgtgtccttgcccatctttctggcgatgagaacctcatccgcgtgtttcaggaaggccgtgacattcacactcaaacggcaagctggatgtttggattatcagctgaagcgatcgatcctttgatgcgtcgtgcagcgaagaccgttaatttcggtgttctctacggtatgagtgcccatcgtttgtcgcaggaattaggcattccctatgaagaagctgtggcgttcattcagcgctactttcaaagctatcccaaagttaaagcatggatcgagaagactctcgaagaaggccgcacacgtggttacgtagagaccttatttggacgtcgccgctatgttcccgatttaaacgctcgcgtgaaatctgtccgtgaagccgccgaacgcatggcgttcaacatgcctgtacagggcacggcagctgacctcatgaaacttgcaatggtgcgcctttttccacaattgcgtgaagttggtgcccgcatgctcttgcaggtccacgatgaactcttgttagaagcgccaaaagagcgtgcggaagaggtggcagccctcgcgaaagaggttatggaaggcgtgtggcccttagcggtgcctcttgaagtcgaagttggtattggcgaggattggttggctgccaaaggataatga

SEQ ID NO: 418 - protein, 841 aa, synthetic construct
  REGION 1..841: note = Variant of DNA polymerase I from Thermus sp. strain 2.9
MHHHHHHGGSGMLPLFEPKGRVLLVDGHHLAYRNFFALKGLTTSRGEPVQGVYGFAKSLLKALKEDGDVVIVVFDAKAPSFRHEAYEAYKAGRAPTPEDFPRQLALMKELVDLLGLERLEVPGFEADDVLATLAKKAEREGYEVQILTADRDLFQLLSPRISVLHPEGHRITPEWLWEKYGLRPEQWVDFRALAGDPSDNIPGVKGIGEKTALKLLKEWGSLENLLKNLDQVKPESVREKILAHLEDLKLSLELSRVRTDLPLEVDFRRRREPDWEGLKAFLERLEFGSLLHEFGLLESPLPAEEAPWPPPEGAFLGYRLSRPEPMWAELLALAASAQGRVYRAEDPHGALKGLKEVRGLLAKDLAVVALREGLDLPPTDDPMLLAYLLDPSNTTPEGVARRYGGEWTEDAGERALLAERLHANLLGRLQGEEKLLWLYEEVEKPLSRVLAHMEATGVKLDVAYLEALSLEVAAEMRRLEEEVFRLAGHSFNLNSRDQLERVLFDELGLPPIGKTEKTGKRSTSAAVLEALREVHPIVDKILQYRELAKLKGTYIDPLPALVHPKTGRLHTRFNQTATATGRLSSSDPNLQNIPVRTPLGQKIRRAFVAEEGWRLVALDYSQIELRVLAHLSGDENLIRVFQEGRDIHTQTASWMFGLSAEAIDPLMRRAAKTVNFGVLYGMSAHRLSQELGIPYEEAVAFIQRYFQSYPKVKAWIEKTLEEGRTRGYVETLFGRRRYVPDLNARVKSVREAAERMAFNMPVQGTAADLMKLAMVRLFPQLREVGARMLLQVHDELLLEAPKERAEEVAALAKEVMEGVWPLAVPLEVEVGIGEDWLAAKG

SEQ ID NO: 419 - DNA, 2529 bp, synthetic construct
  misc_feature 1..2529: note = Variant of DNA polymerase I from Thermus sp. strain 2.9
  source 1..2529: mol_type = other DNA
atgcaccatcatcatcatcatggcggtagcggcatgttaccgttgttcgaacctaaaggtcgcgtgcttctggttgatggccatcatctcgcgtatcgtaacttctttgccctgaaaggattaaccaccagccgtggcgagccggtacagggtgtctacggctttgcaaagtcgctcctgaaagctctgaaagaagacggtgatgtggtgattgttgtctttgatgcgaaagcgccaagttttcgccacgaagcgtacgaagcttacaaagccgggcgtgctccaacgccggaagactttcctcgccaattggcgcttatgaaggaattagtggatttgcttggcctcgaacgcttggaagttcccggtttcgaggcagacgacgtattagcgactctcgcaaagaaagccgaacgtgagggctatgaagtccagatcttgacagcagatcgcgatcttttccagcttttatctccgcgcatttccgtgttacacccggaagggcatcgtatcaccccggaatggctctgggagaaatatggtttgcgtcccgaacaatgggtggattttcgcgccttagcgggcgatccgagcgacaatattccgggagttaaaggtatcggcgagaagacggcgctcaagctccttaaagaatgggggtcgttggagaacttgcttaagaatttagatcaggtcaaaccagcttcagtgcgtgagaagattcttgcacacctcgaagacctcaaattaagccgcgaattgtcccgtgtacgcaccgatttgccgctcgaagttgatttccgtggccgccgcgaacctgactgggagggtcttaaagcgtttttagagcgtcttgaatttggttcgctcttgcatgaattcggccttttagaaagcccgttaccagccgaagaagcaccttggccaccgcccgaaggcgcgtttttaggttaccgtttgagtcgcccggaaccgatgtgggccgaattattggctcttgcagcgtctgcccagggacgtgtgtatcgcgcggaagaccctcatggtgcgctccgtggcctcaaagaagtccgtggatttcttgccaaagacttagctgttgttgcattgcgcgaaggtcttgatttacctccgactgatgatccaatgcttcttgcgtacctcttggacccgtcaaacacgacgcccgaaggcgtagcccgtcgttacggcggcgagtggaccgaagatgcaggtgagcgcgcgttattggccgaacgtttgcacgccaatttattaggacgtttgcaaggcgaggaacgtctcctctggctttacgaagaagtggagaaaccattgagtcgcgtgctcgcgcatatggaagctaccggtgtcaaattagacgtggcgtatttggaggcactcagccttgaagttgctgccgaaatgcgccgcttggaggaagaagtattccgtttagcaggccactcctttaaccttaattctcgcgatcagttagaacgtgtgttgttcgatgaacttggtctccctcctatcggcaagacagagaagaccggtaaacgtagcacttcagcggcggttttagaagctcttcgcgaagtccatcccattgtggacaagatcttgcagtaccgcgaactcgcgaaattgaaaggcacctatattgaccctcttccggcattagtccacccgaaaacgggacgcctccatacccgcttcaaccaaacagccacggcgaccggtcgtttgtcctcctctgatccaaaccttcagaatattccagtacgtaccccattgggccagaagatccgcaaagcgtttgtagctgaggagggttggcgtttagtggccctcgattatagccaaattgaattacgtgtccttgcccatctttctggcgatgagaacctcatccgcgtgtttcaggaaggccgcgacattcacactcaaacggcaagctggatgtttggattatcagctgaagcgatcgatcctttgatgcgtcgtgcagcgaagaccatcaatttcggtgttctctacggtatgagtgcccatcgtttgtcgcaggaattaggcattccctatgaagaagctgcggcgttcattcagcgctactttcaaagctatcccaaagttaaagcatggatcgagaagactctcgaagaaggccgcacacgtggttacgtagagaccttatttggacgtcgccgctatgttcccgatttaaacgctcgcgtgaaatctgtccgtgaagccgccgaacgcatggcgttcaacatgcctgtacagggcacggcagctgacctcatgaaacttgcaatggtgcgcctttttccacaattgcgtgaagttggtgcccgcatgctcttgcaggtccacgatgaactcttgttagaagcgccaaaagagcgtgcggaagaggtggcagccctcgcgaaagaggttatggaaggcgtgtggcccttagcggtgcctcttgaagtcgaagttggtattggcgaggattggttggctgccaaaggataatga

SEQ ID NO: 420 - protein, 841 aa, synthetic construct
  REGION 1..841: note = Variant of DNA polymerase I from Thermus sp. strain 2.9
MHHHHHHGGSGMLPLFEPKGRVLLVDGHHLAYRNFFALKGLTTSRGEPVQGVYGFAKSLLKALKEDGDVVIVVFDAKAPSFRHEAYEAYKAGRAPTPEDFPRQLALMKELVDLLGLERLEVPGFEADDVLATLAKKAEREGYEVQILTADRDLFQLLSPRISVLHPEGHRITPEWLWEKYGLRPEQWVDFRALAGDPSDNIPGVKGIGEKTALKLLKEWGSLENLLKNLDQVKPASVREKILAHLEDLKLSRELSRVRTDLPLEVDFRGRREPDWEGLKAFLERLEFGSLLHEFGLLESPLPAEEAPWPPPEGAFLGYRLSRPEPMWAELLALAASAQGRVYRAEDPHGALRGLKEVRGFLAKDLAVVALREGLDLPPTDDPMLLAYLLDPSNTTPEGVARRYGGEWTEDAGERALLAERLHANLLGRLQGEERLLWLYEEVEKPLSRVLAHMEATGVKLDVAYLEALSLEVAAEMRRLEEEVFRLAGHSFNLNSRDQLERVLFDELGLPPIGKTEKTGKRSTSAAVLEALREVHPIVDKILQYRELAKLKGTYIDPLPALVHPKTGRLHTRFNQTATATGRLSSSDPNLQNIPVRTPLGQKIRKAFVAEEGWRLVALDYSQIELRVLAHLSGDENLIRVFQEGRDIHTQTASWMFGLSAEAIDPLMRRAAKTINFGVLYGMSAHRLSQELGIPYEEAAAFIQRYFQSYPKVKAWIEKTLEEGRTRGYVETLFGRRRYVPDLNARVKSVREAAERMAFNMPVQGTAADLMKLAMVRLFPQLREVGARMLLQVHDELLLEAPKERAEEVAALAKEVMEGVWPLAVPLEVEVGIGEDWLAAKG

SEQ ID NO: 421 - DNA, 2529 bp, synthetic construct
  misc_feature 1..2529: note = Variant of DNA polymerase I from Thermus sp. strain 2.9
  source 1..2529: mol_type = other DNA
atgcaccatcatcatcatcatggcggtagcggcatgttaccgttgttcgaacctaaaggtcgcgtgcttctggttgatggccatcatctcgcgtatcgtaacttctttgccctgaaaggattaaccaccagccgtggcgagccggtacagggtgtctacggctttgcaaagtcgctcctgaaagctctgaaagaagacggtgatgtggtgattgttgtctttgatgcgaaagcgccaagttttcgccacgaagcgtacgaagcttacaaagccgggcgtgctccaacgccggaagactttcctcgccaattggcgcttatgaaggaattagtggatttgcttggcctcgaacgcttggaagttcccggtttcgaggcagacgacgtattagcgactctcgcaaagaaagccgaacgtgagggctatgaagtccagatcttgacagcagatcgcgatcttttccagcttttatctccgcgcatttccgtgttacacccggaagggcatcgtatcaccccggaatggctctgggagaaatatggtttgcgtcccgaacaatgggtggattttcgcgccttagcgggcgatccgagcgacaatattccgggagttaaaggtatcggcgagaagacggcgctcaagctccttaaagaatgggggtcgttggagaacttgcttaagaatttagatcaggtcaaaccagcttcagtgcgtgagaagattcttgcacacctcgaagacctcaaattaagccgcgaattgtcgcgtgtacgcaccgatttgccgctcgaagttgatttccgtggccgccgcgaacctgactgggagggtcttaaagcgtttttagagcgtcttgaatttggttcgctcttgcatgaattcggccttttagaaagcccgttaccagccgaagaagcaccttggccaccgcccgaaggcgcgtttttaggttaccgtttgagtcgcccggaaccgatgtgggccgaattattggctcttgcagcgtctgcccagggacgtgtgtatcgcgcggaagaccctcatggtgcgctccgtggcctcaaagaagtccgtggactccttgccaaagacttagctgttgttgcattgcgcgaaggtcttgatttacctccgactgatgatccaatgcttcttgcgtacctcttggactcgtcaaacacgacgcccgaaggcgtagcccgtcgttacggcggcgagtggaccgaagatgcaggtgagcgcgcgttattggccgaacgtttgcacgccaatttattaggacgtttgcaaggcgaggaacgtctcctctggctttacgaagaagtggagaaaccattgagtcgcgtgctcgtgcatatggaagctaccggtgtcaaattagacgtggcgtatttggaggcactcagccttgaagccgctgccgaaatgcgccgcttggaggaagaagtattccgtttagcaggccactcctttaaccttaattctcgcgatcagttagaacgtgtgttgttcgatgaacttggtctccctcctatcaccaagacagagaagaccggtaaacgtagcacttcagcggcggttttagaagctcttcgcgaagtccatcccattgtggacaagatcttgcagtaccgcgaactcgcgaaattgaaaggcacctatattgaccgtcttccggcattagtccacccgaaaacgggacgcctccatacccgcttcaaccaaacagccacggcgaccggtcgtttgtcctcctctgatccaaaccttcagaatattccagtacgtaccccattgggccagaaaatccgcaaagcgtttgtagctgaggagggttggcgtttagtggccctcgattatagccaaattgaattacgtgtccttgcccatctttctggcgatgagaacctcatccgcgtgtttcaggaaggccgcgacattcacactcaaacggcaagctggatgtttggactgtcagcggaagcgatcgatcctttgatgcgtcgtgcagcgaagaccatcaatttcggtgttctctacggtatgagtgcccatcgtttgtcgcaggaattaggcattccctatgaagaagctgcggcgttcattcagcgctactttcaaagctatcccaaagttaaagcatggatcgagaagactctcgaagaaggccgcacacgtggttacgtagagaccttatttggacgtcgccgctatgttcccgatttaaatgctcgcgtgaaatctgtccgtgaagccgccgaacgcatggcgttcaacatgcctgtacagggcacggcagctgacctcatgaaacttgcaatggtgcgcctttttccacaattgcgtgaagttggtgcccgcatgctcttgcaggtccacgatgaactcttgttagaagcgccaaaagagcgtgcggaagaggtggcagccctcgcgaaagaggttatggaaggcgtgtggcccttagcggtgcctcttgaagtcgaagttggtattggcgaggattggttggctgccaaaggataatga

SEQ ID NO: 422 - protein, 841 aa, synthetic construct
  REGION 1..841: note = Variant of DNA polymerase I from Thermus sp. strain 2.9
MHHHHHHGGSGMLPLFEPKGRVLLVDGHHLAYRNFFALKGLTTSRGEPVQGVYGFAKSLLKALKEDGDVVIVVFDAKAPSFRHEAYEAYKAGRAPTPEDFPRQLALMKELVDLLGLERLEVPGFEADDVLATLAKKAEREGYEVQILTADRDLFQLLSPRISVLHPEGHRITPEWLWEKYGLRPEQWVDFRALAGDPSDNIPGVKGIGEKTALKLLKEWGSLENLLKNLDQVKPASVREKILAHLEDLKLSRELSRVRTDLPLEVDFRGRREPDWEGLKAFLERLEFGSLLHEFGLLESPLPAEEAPWPPPEGAFLGYRLSRPEPMWAELLALAASAQGRVYRAEDPHGALRGLKEVRGLLAKDLAVVALREGLDLPPTDDPMLLAYLLDSSNTTPEGVARRYGGEWTEDAGERALLAERLHANLLGRLQGEERLLWLYEEVEKPLSRVLVHMEATGVKLDVAYLEALSLEAAAEMRRLEEEVFRLAGHSFNLNSRDQLERVLFDELGLPPITKTEKTGKRSTSAAVLEALREVHPIVDKILQYRELAKLKGTYIDRLPALVHPKTGRLHTRFNQTATATGRLSSSDPNLQNIPVRTPLGQKIRKAFVAEEGWRLVALDYSQIELRVLAHLSGDENLIRVFQEGRDIHTQTASWMFGLSAEAIDPLMRRAAKTINFGVLYGMSAHRLSQELGIPYEEAAAFIQRYFQSYPKVKAWIEKTLEEGRTRGYVETLFGRRRYVPDLNARVKSVREAAERMAFNMPVQGTAADLMKLAMVRLFPQLREVGARMLLQVHDELLLEAPKERAEEVAALAKEVMEGVWPLAVPLEVEVGIGEDWLAAKG

SEQ ID NO: 423 - DNA, 2529 bp, synthetic construct
  misc_feature 1..2529: note = Variant of DNA polymerase I from Thermus sp. strain 2.9
  source 1..2529: mol_type = other DNA
atgcaccatcatcatcatcatggcggtagcggcatgttaccgttgttcgaacctaaaggtcgcgtgcttctggttgatggccatcatctcgcgtatcgtaacttctttgccctgaaaggattaaccaccagccgtggcgagccggtacagggtgtctacggctttgcaaagtcgctcctgaaagctctgaaagaagacggtgatgtggtgattgttgtctttgatgcgaaagcgccaagttttcgccacgaagcgtacgaagcttacaaagccgggcgtgctccaacgccggaagactttcctcgccaattggcgcttatgaaggaattagtggatttgcttggcctcgaacgcttggaagttcccggtttcgaggcagacgacgtattagcgactctcgcaaagaaagccgaacgtgagggctatgaagtccagatcttgacagcagatcgcgatcttttccagcttttatctccgcgcgtctcggtgttacacccggaagggcatcgcatcaccccggaatggctctgggagaaatatggtttgcgtcccgaacaatgggtggattttcgcgccttagcgggcgatccgagcgacaatattccgggagttaaaggtatcggcgagaagacggcgctcaagctccttaaagaatgggggtcgttggagaacttgcttaagaatttagatcaggtcaaaccagcgtcagtgcgtgagaagattcttgcacacctcgaagacctcaaattaagcctggaattgtcccgtgtacgcaccgatttgccgctcgaagttgatttccgtggccgccgcgaacctgactgggagggtcttaaagcgtttttagagcgtcttgaatttggttcgctcttgcatgaattcggccttttagaaagcccgttaccagccgaagaagcaccttggccaccgcccgaaggcgcgtttttaggttacgttttgagtcgcccggaaccgatgtgggccgaattattggctcttgcagcgtctgcccagggacgtgtgtatcgcgcggaagaccctcatggtgcgctcaaaggcctcaaagaagtccgtggactccttgccaaagacttagctgttgttgcattgcgcgaaggtcttgatttacctccgactgatgatccaatgcttcttgcgtacctcttggacccgtcaaacacgacgcccgaaggcgtagcccgtcgttacggcggcgagtggaccgaagatgcagccgagcgcgcgttattggccgaacgtttgcaccagaatttattaggacgtttgcaaggcgaggaacgcctcctctggctttacgaagaagtggagaaaccattgagtcgcgtgctcgcgcatatggaagctaccggtgtcaaattagacgtggcgtatttggaggcactcagccttgaagttgctgccgaaattcgccgcttggaggaagaagtattccgtttagcaggccactcctttaaccttaattctcgcgatcagttagaacgtgtgttgttcgatgaacttggtctccctcctatcggcaagacagagaagaccggtaaacgtagcacttcagcggcggttttagaagctcttcgcgaagtccatcccattgtggacaagatcttgcagtaccgcgaactcgcgaaattgaaaggcacctatattgaccctcttccggcattagtccacccgaaaacgggacgcctccatacccgcttcaaccaaacagccacggcgaccggtcgtttgtcctcctctgatccaaaccttcagaatattccagtacgtaccccattgggccagaagatccgccgcgcgtttgtagctgaggagggttggcgtttagtggccctcgattatagccaaattgaattacgtgtccttgcccatctttctggcgatgagaacctcatccgcgtgtttcaggaaggcaaagacattcacactcaaacggcaagctggatgtttggattatcggcggaagcgatcgatcctttgatgcgtcgtgcagcgaagaccatcaatttcggtgttctctacggtatgagtgcccatcgtttgtcgcaggaattaggcattccctatgaagaagctgcggcgttcattcagcgctactttcaaagctatcccaaagttaaagcatggatcgagaagactctcgaagaaggccgcacacgtggttacgtagagaccttatttggacgtcgccgctatgttcccgatttaaacgctcgcgtgaaatctgtccgtgaagccgccgaacgcatggcgttcaacatgcctgtacagggcacggcagctgacctcatgaaacttgcaatggtgcgcctttttccacaattgcgtgaagttggtgcccgcatgctcttgcaggtccacgatgaactcttgttagaagcgccaaaagagcgtgcggaagaggtggcagccctcgcgaaagaggttatggaaggcgtgtggcccttagcggtgcctcttgaagtcgaagttggtattggcgaggattggttggctgccaaaggataatga

SEQ ID NO: 424 - protein, 841 aa, synthetic construct
  REGION 1..841: note = Variant of DNA polymerase I from Thermus sp. strain 2.9
MHHHHHHGGSGMLPLFEPKGRVLLVDGHHLAYRNFFALKGLTTSRGEPVQGVYGFAKSLLKALKEDGDVVIVVFDAKAPSFRHEAYEAYKAGRAPTPEDFPRQLALMKELVDLLGLERLEVPGFEADDVLATLAKKAEREGYEVQILTADRDLFQLLSPRVSVLHPEGHRITPEWLWEKYGLRPEQWVDFRALAGDPSDNIPGVKGIGEKTALKLLKEWGSLENLLKNLDQVKPASVREKILAHLEDLKLSLELSRVRTDLPLEVDFRGRREPDWEGLKAFLERLEFGSLLHEFGLLESPLPAEEAPWPPPEGAFLGYVLSRPEPMWAELLALAASAQGRVYRAEDPHGALKGLKEVRGLLAKDLAVVALREGLDLPPTDDPMLLAYLLDPSNTTPEGVARRYGGEWTEDAAERALLAERLHQNLLGRLQGEERLLWLYEEVEKPLSRVLAHMEATGVKLDVAYLEALSLEVAAEIRRLEEEVFRLAGHSFNLNSRDQLERVLFDELGLPPIGKTEKTGKRSTSAAVLEALREVHPIVDKILQYRELAKLKGTYIDPLPALVHPKTGRLHTRFNQTATATGRLSSSDPNLQNIPVRTPLGQKIRRAFVAEEGWRLVALDYSQIELRVLAHLSGDENLIRVFQEGKDIHTQTASWMFGLSAEAIDPLMRRAAKTINFGVLYGMSAHRLSQELGIPYEEAAAFIQRYFQSYPKVKAWIEKTLEEGRTRGYVETLFGRRRYVPDLNARVKSVREAAERMAFNMPVQGTAADLMKLAMVRLFPQLREVGARMLLQVHDELLLEAPKERAEEVAALAKEVMEGVWPLAVPLEVEVGIGEDWLAAKG

SEQ ID NO: 425 - DNA, 2529 bp, synthetic construct
  misc_feature 1..2529: note = Variant of DNA polymerase I from Thermus sp. strain 2.9
  source 1..2529: mol_type = other DNA
atgcaccatcatcatcatcatggcggtagcggcatgttaccgttgttcgaacctaaaggtcgcgtgcttctggttgatggccatcatctcgcgtatcgtaacttctttgccctgaaaggattaaccaccagccgtggcgagccggtacagggtgtctacggctttgcaaagtcgctcctgaaagctctgaaagaagacggtgatgtggtgattgttgtctttgatgcgaaagcgccaagttttcgccacgaagcgtacgaagcttacaaagccgggcgtgctccaacgccggaagactttcctcgccaattggcgcttatgaaggaattagtggatttgcttggcctcgaacgcttggaagttcccggtttcgaggcagacgacgtattagcgactctcgcaaagaaagccgaacgtgagggctatgaagtccagatcttgacagcagatcgcgatcttttccagcttttatctccgcgcatttccgtgttacacccggaagggcatcgtatcaccccggaatggctctgggagaaatatggtttgcgtcccgaacaatgggtggattttcgcgccttagcgggcgatccgagcgacaatattccgggagttaaaggtatcggcgagaagacggcgctcaagctccttaaagaatgggggtcgttggagaacttgcttaagaatttagatcaggtcaaaccagcttcagtgcgtgagaagattcttgcacacctcgaagacctcaaattaagccgcgaattgtcgcgtgtacgcaccgatttgccgctcgaagttgatttccgtggccgccgcgaacctgactgggagggtcttaaagcgtttttagagcgtcttgaatttggttcgctcttgcatgaattcggccttttagaaagcccgttaccagccgaagaagcaccttggccaccgcccgaaggcgcgtttttaggttaccgtttgagtcgcccggaaccgatgtgggccgaattattggctcttgcagcgtctgcccagggacgtgtgtatcgcgcggaagaccctcatggtgcgctccgtggcctcaaagaagtccgtggactccttgccaaagacttagctgttgttgcattgcgcgaaggtcttgatttacctccgactgatgatccaatgcttcttgcgtacctcttggactcgtcaaacacgacgcccgaaggcgtagcccgtcgttacggcggcgagtggaccgaagatgcaggtgagcgcgcgttattggccgaacgtttgcacgccaatttattaggacgtttgcaaggcgaggaacgtctcctctggctttacgaagaagtggagaaaccattgagtcgcgtgctcgcgcatatggaagctaccggtgtcaaattagacgtggcgtatttggaggcactcagccttgaagttgctgccgaaatgcgccgcttggaggaagaagtattccgtttagcaggccactcctttaaccttaattctcgcgatcagttagaacgtgtgttgttcgatgaacttggtctccctcctatcggcaagacagagaagaccggtaaacgtagcacttcagcggcggttttagaagctcttcgcgaagtccatcccattgtggacaagatcttgcagtaccgcgaactcgcgaaattgaaaggcacctatattgaccgtcttccggcattagtccacccgaaaacgggacgcctccatacccgcttcaaccaaacagccacggcgaccggtcgtttgtcctcctctgatccaaaccttcagaatattccagtacgtaccccattgggccagaagatccgcaaagcgtttgtagctgaggagggttggcgtttagtggccctcgattatagccaaattgaattacgtgtccttgcccatctttctggcgatgagaacctcatccgcgtgtttcaggaaggccgcgacattcacactcaaacggcaagctggatgtttggattatcagctgaagcgatcgatcctttgatgcgtcgtgcagcgaagaccatcaatttcggtgttctctacggtatgagtgcccatcgtttgtcgcaggaattaggcattccctatgaagaagctgcggcgttcattcagcgctactttcaaagctatcccaaagttaaagcatggatcgagaagactctcgaagaaggccgcacacgtggttacgtagagaccttatttggacgtcgccgctatgttcccgatttaaatgctcgcgtgaaatctgtccgtgaagccgccgaacgcatggcgttcaacatgcctgtacagggcacggcagctgacctcatgaaacttgcaatggtgcgcctttttccacaattgcgtgaagttggtgcccgcatgctcttgcaggtccacgatgaactcttgttagaagcgccaaaagagcgtgcggaagaggtggcagccctcgcgaaagaggttatggaaggcgtgtggcccttagcggtgcctcttgaagtcgaagttggtattggcgaggattggttggctgccaaaggataatga

SEQ ID NO: 426 - protein, 841 aa, synthetic construct
  REGION 1..841: note = Variant of DNA polymerase I from Thermus sp. strain 2.9
MHHHHHHGGSGMLPLFEPKGRVLLVDGHHLAYRNFFALKGLTTSRGEPVQGVYGFAKSLLKALKEDGDVVIVVFDAKAPSFRHEAYEAYKAGRAPTPEDFPRQLALMKELVDLLGLERLEVPGFEADDVLATLAKKAEREGYEVQILTADRDLFQLLSPRISVLHPEGHRITPEWLWEKYGLRPEQWVDFRALAGDPSDNIPGVKGIGEKTALKLLKEWGSLENLLKNLDQVKPASVREKILAHLEDLKLSRELSRVRTDLPLEVDFRGRREPDWEGLKAFLERLEFGSLLHEFGLLESPLPAEEAPWPPPEGAFLGYRLSRPEPMWAELLALAASAQGRVYRAEDPHGALRGLKEVRGLLAKDLAVVALREGLDLPPTDDPMLLAYLLDSSNTTPEGVARRYGGEWTEDAGERALLAERLHANLLGRLQGEERLLWLYEEVEKPLSRVLAHMEATGVKLDVAYLEALSLEVAAEMRRLEEEVFRLAGHSFNLNSRDQLERVLFDELGLPPIGKTEKTGKRSTSAAVLEALREVHPIVDKILQYRELAKLKGTYIDRLPALVHPKTGRLHTRFNQTATATGRLSSSDPNLQNIPVRTPLGQKIRKAFVAEEGWRLVALDYSQIELRVLAHLSGDENLIRVFQEGRDIHTQTASWMFGLSAEAIDPLMRRAAKTINFGVLYGMSAHRLSQELGIPYEEAAAFIQRYFQSYPKVKAWIEKTLEEGRTRGYVETLFGRRRYVPDLNARVKSVREAAERMAFNMPVQGTAADLMKLAMVRLFPQLREVGARMLLQVHDELLLEAPKERAEEVAALAKEVMEGVWPLAVPLEVEVGIGEDWLAAKG

SEQ ID NO: 427 - DNA, 2529 bp, synthetic construct
  misc_feature 1..2529: note = Variant of DNA polymerase I from Thermus sp. strain 2.9
  source 1..2529: mol_type = other DNA
atgcaccatcatcatcatcatggcggtagcggcatgttaccgttgttcgaacctaaaggtcgcgtgcttctggttgatggccatcatctcgcgtatcgtaacttctttgccctgaaaggattaaccaccagccgtggcgagccggtacagggtgtctacggctttgcaaagtcgctcctgaaagctctgaaagaagacggtgatgtggtgattgttgtctttgatgcgaaagcgccaagttttcgccacgaagcgtacgaagcttacaaagccgggcgtgctccaacgccggaagactttcctcgccaattggcgcttatgaaggaattagtggatttgcttggcctcgaacgcttggaagttcccggtttcgaggcagacgacgtattagcgactctcgcaaagaaagccgaacgtgagggctatgaagtccagatcttgacagcagatcgcgatcttttccagcttttatctccgcgcatttccgtgttacacccggaagggcatcgtatcaccccggaatggctctgggagaaatatggtttgcgtcccgaacaatgggtggattttcgcgccttagcgggcgatccgagcgacaatattccgggagttaaaggtatcggcgagaagacggcgctcaagctccttaaagaatgggggtcgttggagaacttgcttaagaatttagatcaggtcaaaccagcttcagtgcgtgagaagattcttgcacacctcgaagacctcaaattaagccgcgaattgtcccgtgtacgcaccgatttgccgctcgaagttgatttccgtggccgccgcgaacctgactgggagggtcttaaagcgtttttagagcgtcttgaatttggttcgctcttgcatgaattcggccttttagaaagcccgttaccagccgaagaagcaccttggccaccgcccgaaggcgcgtttttaggttaccgtttgagtcgcccggaaccgatgtgggccgaattattggctcttgcagcgtctgcccagggacgtgtgtatcgcgcggaagaccctcatggtgcgctccgtggcctcaaagaagtccgtggactccttgccaaagacttagctgttgttgcattgcgcgaaggtcttgatttacctccgactgatgatccaatgcttcttgcgtacctcttggacccgtcaaacacgacgcccgaaggcgtagcccgtcgttacggcggcgagtggaccgaagatgcaggtgagcgcgcgttattggccgaacgtttgcacgccaatttattaggacgtttgcaaggcgaggaacgtctcctctggctttacactgaagtggagaaaccattgagtcgcgtgctcgcgcatatggaagctaccggtgtcaaattagacgtggcgtatttggaggcactcagccttgaagttgctgccgaaatgcgccgcttggaggaagaagtattccgtttagcaggccactcctttaaccttaattctcgcgatcagttagaacgtgtgttgttcgatgaacttggtctccctcctatcggcaagacagagaagaccggtaaacgtagcacttcagcggcggttttagaagctcttcgcgaagtccatcccattgtggacaagatcttgcagtaccgcgaactcgcgaaattgaaaggcacctatattgaccctcttccggcattagtccacccgaaaacgggacgcctccatacccgcttcaaccaaacagccacggcgaccggtcgtttgtcctcctctgatccaaaccttcagaatattccagtacgtaccccattgggccagaagatccgcaaagcgtttgtagctgaggagggttggcgtttagtggccctcgattatagccaaattgaattacgtgtccttgcccatctttctggcgatgagaacctcatccgcgtgtttcaggaaggccgcgacattcacactcaaacggcaagctggatgtttggattatcagctgaagcgatcgatcctttgatgcgtcgtgcagcgaagaccatcaatttcggtgttctctacggtatgagtgcccatcgtttgtcgcaggaattaggcattccctatgaagaagctgcggcgttcattcagcgctactttcaaagctatcccaaagttaaagcatggatcgagaagactctcgaagaaggccgcacacgtggttacgtagagaccttatttggacgtcgccgctatgttcccgatttaaacgctcgcgtgaaatctgtccgtgaagccgccgaacgcatggcgttcaacatgcctgtacagggcacggcagctgacctcatgaaacttgcaatggtgcgcctttttccacaattgcgtgaagttggtgcccgcatgctcttgcaggtccacgatgaactcttgttagaagcgccaaaagagcgtgcggaagaggtggcagccctcgcgaaagaggttatggaaggcgtgtggcccttagcggtgcctcttgaagtcgaagttggtattggcgaggattggttggctgccaaaggataatga

SEQ ID NO: 428 - protein, 841 aa, synthetic construct
  REGION 1..841: note = Variant of DNA polymerase I from Thermus sp. strain 2.9
MHHHHHHGGSGMLPLFEPKGRVLLVDGHHLAYRNFFALKGLTTSRGEPVQGVYGFAKSLLKALKEDGDVVIVVFDAKAPSFRHEAYEAYKAGRAPTPEDFPRQLALMKELVDLLGLERLEVPGFEADDVLATLAKKAEREGYEVQILTADRDLFQLLSPRISVLHPEGHRITPEWLWEKYGLRPEQWVDFRALAGDPSDNIPGVKGIGEKTALKLLKEWGSLENLLKNLDQVKPASVREKILAHLEDLKLSRELSRVRTDLPLEVDFRGRREPDWEGLKAFLERLEFGSLLHEFGLLESPLPAEEAPWPPPEGAFLGYRLSRPEPMWAELLALAASAQGRVYRAEDPHGALRGLKEVRGLLAKDLAVVALREGLDLPPTDDPMLLAYLLDPSNTTPEGVARRYGGEWTEDAGERALLAERLHANLLGRLQGEERLLWLYTEVEKPLSRVLAHMEATGVKLDVAYLEALSLEVAAEMRRLEEEVFRLAGHSFNLNSRDQLERVLFDELGLPPIGKTEKTGKRSTSAAVLEALREVHPIVDKILQYRELAKLKGTYIDPLPALVHPKTGRLHTRFNQTATATGRLSSSDPNLQNIPVRTPLGQKIRKAFVAEEGWRLVALDYSQIELRVLAHLSGDENLIRVFQEGRDIHTQTASWMFGLSAEAIDPLMRRAAKTINFGVLYGMSAHRLSQELGIPYEEAAAFIQRYFQSYPKVKAWIEKTLEEGRTRGYVETLFGRRRYVPDLNARVKSVREAAERMAFNMPVQGTAADLMKLAMVRLFPQLREVGARMLLQVHDELLLEAPKERAEEVAALAKEVMEGVWPLAVPLEVEVGIGEDWLAAKG

SEQ ID NO: 429 - DNA, 2529 bp, synthetic construct
  misc_feature 1..2529: note = Variant of DNA polymerase I from Thermus sp. strain 2.9
  source 1..2529: mol_type = other DNA
atgcaccatcatcatcatcatggcggtagcggcatgttaccgttgttcgaacctaaaggtcgcgtgcttctggttgatggccatcatctcgcgtatcgtaacttctttgccctgaaaggattaaccaccagccgtggcgagccggtacagggtgtctacggctttgcaaagtcgctcctgaaagctctgaaagaagacggtgatgtggtgattgttgtctttgatgcgaaagcgccaagttttcgccacgaagcgtacgaagcttacaaagccgggcgtgctccaacgccggaagactttcctcgccaattggcgcttatgaaggaattagtggatttgcttggcctcgaacgcttggaagttcccggtttcgaggcagacgacgtattagcgactctcgcaaagaaagccgaacgtgagggctatgaagtccagatcttgacagcagatcgcgatcttttccagcttttatctccgcgcatttccgtgttacacccggaagggcatcgtatcaccccggaagcgctctgggagaaatatggtttgcgtcccgaacaatgggtggattttcgcgccttagcgggcgatccgagcgacaatattccgggagttaaaggtatcggcgagaagacggcgctcaagctccttaaagaatgggggtcgttggagaacttgcttaagaatttagatcaggtcaaaccagcttcagtgcgtgagaagattcttgcacacctcgaagacctcaaattaagccgcgaattgtcccgtgtacgcaccgatttgccgctcgaagttgatttccgtggccgccgcgaacctgactgggagggtcttaaagcgtttttagagcgtcttgaatttggttcgctcttgcatgaattcggccttttagaaagcccgttaccagccgaagaagcaccttggccaccgcccgaaggcgcgtttttaggttaccgtttgagtcgcccggaaccgatgtgggccgaattattggctcttgcagcgtctgcccagggacgtgtgtatcgcgcggaagaccctcatggtgcgctccgtggcctcaaagaagtccgtggactccttgccaaagacttagctgttgttgcattgcgcgaaggtcttgatttacctccgactgatgatccaatgcttcttgcgtacctcttggacccgtcaaacacgacgcccgaaggcgtagcccgtcgttacggcggcgagtggaccgaagatgcaggtgagcgcgcgttattggccgaacgtttgcacgccaatttattaggacgtttgcaaggcgaggaacgtctcctctggctttacgaagaagtggagaaaccattgagtcgcgtgctcgcgcatatggaagctaccggtgtcaaattagacgtggcgtatttggaggcactcagccttgaagttgctgccgaaatgcgccgcttggaggaagaagtattccgtttagcaggccactcctttaaccttaattctcgcgatcagttagaacgtgtgttgttcgatgaacttggtctccctcctatcggcaagacagagaagaccggtaaacgtagcacttcagcggcggttttagaagctcttcgcgaagtccatcccattgtggacaagatcttgcagtaccgcgaactcgcgaaattgaaaggcacctatattgaccctcttccggcattagtccacccgaaaacgggacgcctccatacccgcttcaaccaaacagccacggcgaccggtcgtttgtcctcctctgatccaaaccttcagaatattccagtacgtaccccattgggccagaagatccgcaaagcgtttgtagctgaggagggttggcgtttagtggccctcgattatagccaaattgaattacgtgtccttgcccatctttctggcgatgagaacctcatccgcgtgtttcaggaaggccgcgacattcacactcaaacggcaagctggatgtttggattatcagctgaagcgatcgatcctttgatgcgtcgtgcagcgaagaccatcaatttcggtgttctctacggtatgagtgcccatcgtttgtcgcaggaattaggcattccctatgaagaagctgcggcgttcattcagcgctactttcaaagctatcccaaagttaaagcatggatcgagaagactctcgaagaaggccgcacacgtggttacgtagagaccttatttggacgtcgccgctatgttcccgatttaaacgctcgcgtgaaatctgtccgtgaagccgccgaacgcatggcgttcaacatgcctgtacagggcacggcagctgacctcatgaaacttgcaatggtgcgcctttttccacaattgcgtgaagttggtgcccgcatgctcttgcaggtccacgatgaactcttgttagaagcgccaaaagagcgtgcggaagaggtggcagccctcgcgaaagaggttatggaaggcgtgtggcccttagcggtgcctcttgaagtcgaagttggtattggcgaggattggttggctgccaaaggataatga

SEQ ID NO: 430 - protein, 841 aa, synthetic construct
  REGION 1..841: note = Variant of DNA polymerase I from Thermus sp. strain 2.9
MHHHHHHGGSGMLPLFEPKGRVLLVDGHHLAYRNFFALKGLTTSRGEPVQGVYGFAKSLLKALKEDGDVVIVVFDAKAPSFRHEAYEAYKAGRAPTPEDFPRQLALMKELVDLLGLERLEVPGFEADDVLATLAKKAEREGYEVQILTADRDLFQLLSPRISVLHPEGHRITPEALWEKYGLRPEQWVDFRALAGDPSDNIPGVKGIGEKTALKLLKEWGSLENLLKNLDQVKPASVREKILAHLEDLKLSRELSRVRTDLPLEVDFRGRREPDWEGLKAFLERLEFGSLLHEFGLLESPLPAEEAPWPPPEGAFLGYRLSRPEPMWAELLALAASAQGRVYRAEDPHGALRGLKEVRGLLAKDLAVVALREGLDLPPTDDPMLLAYLLDPSNTTPEGVARRYGGEWTEDAGERALLAERLHANLLGRLQGEERLLWLYEEVEKPLSRVLAHMEATGVKLDVAYLEALSLEVAAEMRRLEEEVFRLAGHSFNLNSRDQLERVLFDELGLPPIGKTEKTGKRSTSAAVLEALREVHPIVDKILQYRELAKLKGTYIDPLPALVHPKTGRLHTRFNQTATATGRLSSSDPNLQNIPVRTPLGQKIRKAFVAEEGWRLVALDYSQIELRVLAHLSGDENLIRVFQEGRDIHTQTASWMFGLSAEAIDPLMRRAAKTINFGVLYGMSAHRLSQELGIPYEEAAAFIQRYFQSYPKVKAWIEKTLEEGRTRGYVETLFGRRRYVPDLNARVKSVREAAERMAFNMPVQGTAADLMKLAMVRLFPQLREVGARMLLQVHDELLLEAPKERAEEVAALAKEVMEGVWPLAVPLEVEVGIGEDWLAAKG

SEQ ID NO: 431 - DNA, 2529 bp, synthetic construct
  misc_feature 1..2529: note = Variant of DNA polymerase I from Thermus sp. strain 2.9
  source 1..2529: mol_type = other DNA
atgcaccatcatcatcatcatggcggtagcggcatgttaccgttgttcgaacctaaaggtcgcgtgcttctggttgatggccatcatctcgcgtatcgtaacttctttgccctgaaaggattaaccaccagccgtggcgagccggtacagggtgtctacggctttgcaaagtcgctcctgaaagctctgaaagaagacggtgatgtggtgattgttgtctttgatgcgaaagcgccaagttttcgccacgaagcgtacgaagcttacaaagccgggcgtgctccaacgccggaagactttcctcgccaattggcgcttatgaaggaattagtggatttgcttggcctcgaacgcttggaagttcccggtttcgaggcagacgacgtattagcgactctcgcaaagaaagccgaacgtgagggctatgaagtccatatcttgacagcagatcgcgatcttttccagcttttatctccgcgcatttccgtgttacacccggaagggcatcgtatcaccccggaatggctctgggagaaatatggtttgcgtcccgaacaatgggtggattttcgcgccttagcgggcgatccgagcgacaatattccgggagttaaaggtatcggcgagaagacggcgctcaagctccttaaagaatgggggtcgttggagaacttgcttaagaatttagatcaggtcaaaccagcttcagtgcgtgagaagattcttgcacacctcgaagacctcaaattaagccgcgaattgtcccgtgtacgcaccgatttgccgctcgaagttgatttccgtggccgccgcgaacctgactgggagggtcttaaagcgtttttagagcgtcttgaatttggttcgctcttgcatgaattcggccttttagaaagcccgttaccagccgaagaagcaccttggccaccgcccgaaggcgcgtttttaggttaccgtttgagtcgcccggaaccgatgtgggccgaattattggctcttgcagcgtctgcccagggacgtgtgtatcgcgcggaagaccctcatggtgcgctccgtggcctcaaagaagtccgtggactccttgccaaagacttagctgttgttgcattgcgcgaaggtcttgatttacctccgactgatgatccaatgcttcttgcgtacctcttggactcgtcaaacacgacgcccgaaggcgtagcccgtcgttacggcggcgagtggaccgaagatgcaggtgagcgcgcgttattggccgaacgtttgcacgccaatttattaggacgtttgcaaggcgaggaacgtctcctctggctttacgaagaagtggagaaaccattgagtcgcgtgctcgcgcatatggaagctaccggtgtcaaattagacgtggcgtatttggaggcactcagccttgaagtcgctgccgaaatgcgccgcttggaggaagaagtattccgtttagcaggccactcctttaaccttaattctcgcgatcagttagaacgtgtgttgttcgatgaacttggtctccctcctatcggcaagacagagaagaccggtaaacgtagcacttcagcggcggttttagaagctcttcgcgaagtccatcccattgtggacaagatcttgcagtaccgcgaactcgcgaaattgaaaggcacctatattgaccgtcttccggcattagtccacccgaaaacgggacgcctccatacccgcttcaaccaaacagccacggcgaccggtcgtttgtcctcctctgatccaaaccttcagaatattccagtacgtaccccattgggccagaaaatccgcaaagcgtttgtagctgaggagggttggcgtttagtggccctcgattatagccaaattgaattacgtgtccttgcccatctttctggcgatgagaacctcatccgcgtgtttcaggaaggccgcgacattcacactcaaacggcaagctggatgtttggattatcagctgaagcgatcgatcctttgatgcgtcgtgcagcgaagaccatcaatttcggtgttctctacggtatgagtgcccatcgtttgtcgcaggaattaggcattccctatgaagaagctgcggcgttcattcagcgctactttcaaagctatcccaaagttaaagcatggatcgagaagactctcgaagaaggccgcacacgtggttacgtagagaccttatttggacgtcgccgctatgttcccgatttaaacgctcgcgtgaaatctgtccgtgaagccgccgaacgcatggcgtttaacatgcctgtacagggcacggcagctgacctcatgaaacttgcaatggtgcgcctttttccacaattgcgtgaagttggtgcccgcatgctcttgcaggtccacgatgaactcttgttagaagcgccaaaagagcgtgcggaagaggtggcagccctcgcgaaagaggttatggaaggcgtgtggcccttagcggtgcctcttgaagtcgaagttggtattggcgaggattggttggctgccaaaggataatga

SEQ ID NO: 432 - protein, 841 aa, synthetic construct
  REGION 1..841: note = Variant of DNA polymerase I from Thermus sp. strain 2.9
MHHHHHHGGSGMLPLFEPKGRVLLVDGHHLAYRNFFALKGLTTSRGEPVQGVYGFAKSLLKALKEDGDVVIVVFDAKAPSFRHEAYEAYKAGRAPTPEDFPRQLALMKELVDLLGLERLEVPGFEADDVLATLAKKAEREGYEVHILTADRDLFQLLSPRISVLHPEGHRITPEWLWEKYGLRPEQWVDFRALAGDPSDNIPGVKGIGEKTALKLLKEWGSLENLLKNLDQVKPASVREKILAHLEDLKLSRELSRVRTDLPLEVDFRGRREPDWEGLKAFLERLEFGSLLHEFGLLESPLPAEEAPWPPPEGAFLGYRLSRPEPMWAELLALAASAQGRVYRAEDPHGALRGLKEVRGLLAKDLAVVALREGLDLPPTDDPMLLAYLLDSSNTTPEGVARRYGGEWTEDAGERALLAERLHANLLGRLQGEERLLWLYEEVEKPLSRVLAHMEATGVKLDVAYLEALSLEVAAEMRRLEEEVFRLAGHSFNLNSRDQLERVLFDELGLPPIGKTEKTGKRSTSAAVLEALREVHPIVDKILQYRELAKLKGTYIDRLPALVHPKTGRLHTRFNQTATATGRLSSSDPNLQNIPVRTPLGQKIRKAFVAEEGWRLVALDYSQIELRVLAHLSGDENLIRVFQEGRDIHTQTASWMFGLSAEAIDPLMRRAAKTINFGVLYGMSAHRLSQELGIPYEEAAAFIQRYFQSYPKVKAWIEKTLEEGRTRGYVETLFGRRRYVPDLNARVKSVREAAERMAFNMPVQGTAADLMKLAMVRLFPQLREVGARMLLQVHDELLLEAPKERAEEVAALAKEVMEGVWPLAVPLEVEVGIGEDWLAAKG

SEQ ID NO: 433 - DNA, 2529 bp, synthetic construct
  misc_feature 1..2529: note = Variant of DNA polymerase I from Thermus sp. strain 2.9
  source 1..2529: mol_type = other DNA
atgcaccatcatcatcatcatggcggtagcggcatgttaccgttgttcgaacctaaaggtcgcgtgcttctggttgatggccatcatctcgcgtatcgtaacttctttgccctgaaaggattaaccaccagccgtggcgagccggtacagggtgtctacggctttgcaaagtcgctcctgaaagctctgaaagaagacggtgatgtggtgattgttgtctttgatgcgaaagcgccaagttttcgccacgaagcgtacgaagcttacaaagccgggcgtgctccaacgccggaagactttcctcgccaattggcgcttatgaaggaattagtggatttgcttggcctcgaacgcttggaagttcccggtttcgaggcagacgacgtattagcgactctcgcaaagaaagccgaacgtgagggctatgaagtccagatcttgacagcagatcgcgatcttttccagcttttatctccgcgcatttccgtgttacacccggaagggcatcgtatcaccccggaatggctctttgagaaatatggtttgcgtcccgaacaatgggtggattttcgcgccttagcgggcgatccgagcgacaatattccgggagttaaaggtatcggcgagaagacggcgctcaagctccttaaagaatgggggtcgttggagaacttgcttaagaatttagatcaggtcaaaccagcttcagtgcgtgagaagattcttgcacacctcgaagacctcaaattaagccgcgaattgtcccgtgtacgcaccgatttgccgctcgaagttgatttccgtggccgccgcgaacctgactgggagggtcttaaagcgtttttagagcgtcttgaatttggttcgctcttgcatgaattcggccttttagaaagcccgttaccagccgaagaagcaccttggccaccgcccgaaggcgcgtttttaggttaccgtttgagtcgcccggaaccgatgtgggccgaattattggctcttgcagcgtctgcccagggacgtgtgtatcgcgcggaagaccctcatggtgcgctccgtggcctcaaagaagtccgtggactccttgccaaagacttagctgttgttgcattgcgcgaaggtcttgatttacctccgactgatgatccaatgcttcttgcgtacctcttggacccgtcaaacacgacgcccgaaggcgtagcccgtcgttacggcggcgagtggaccgaagatgcaggtgagcgcgcgttattggccgaacgtttgcacgccaatttattaggacgtttgcaaggcgaggaacgtctcctctggctttacgaagaagtggagaaaccattgagtcgcgtgctcgcgcatatggaagctaccggtgtcaaattagacgtggcgtatttggaggcactcagccttgaagttgctgccgaaatgcgccgcttggaggaagaagtattccgtttagcaggccactcctttaaccttaattctcgcgatcagttagaacgtgtgttgttcgatgaacttggtctccctcctatcggcaagacagagaagaccggtaaacgtagcacttcagcggcggttttagaagctcttcgcgaagtccatcccattgtggacaagatcttgcagtaccgcgaactcgcgaaattgaaaggcacctatattgaccctcttccggcattagtccacccgaaaacgggacgcctccatacccgcttcaaccaaacagccacggcgaccggtcgtttgtcctcctctgatccaaaccttcagaatattccagtacgtaccccattgggccagaagatccgcaaagcgtttgtagctgaggagggttggcgtttagtggccctcgattatagccaaattgaattacgtgtccttgcccatctttctggcgatgagaacctcatccgcgtgtttcaggaaggccgcgacattcacactcaaacggcaagctggatgtttggattatcagctgaagcgatcgatcctttgatgcgtcgtgcagcgaagaccatcaatttcggtgttctctacggtatgagtgcccatcgtttgtcgcaggaattaggcattccctatgaagaagctgcggcgttcattcagcgctactttcaaagctatcccaaagttaaagcatggatcgagaagactctcgaagaaggccgcacacgtggttacgtagagaccttatttggacgtcgccgctatgttcccgatttaaacgctcgcgtgaaatctgtccgtgaagccgccgaacgcatggcgttcaacatgcctgtacagggcacggcagctgacctcatgaaacttgcaatggtgcgcctttttccacaattgcgtgaagttggtgcccgcatgctcttgcaggtccacgatgaactcttgttagaagcgccaaaagagcgtgcggaagaggtggcagccctcgcgaaagaggttatggaaggcgtgtggcccttagcggtgcctcttgaagtcgaagttggtattggcgaggattggttggctgccaaaggataatga

SEQ ID NO: 434 - protein, 841 aa, synthetic construct
  REGION 1..841: note = Variant of DNA polymerase I from Thermus sp. strain 2.9
MHHHHHHGGSGMLPLFEPKGRVLLVDGHHLAYRNFFALKGLTTSRGEPVQGVYGFAKSLLKALKEDGDVVIVVFDAKAPSFRHEAYEAYKAGRAPTPEDFPRQLALMKELVDLLGLERLEVPGFEADDVLATLAKKAEREGYEVQILTADRDLFQLLSPRISVLHPEGHRITPEWLFEKYGLRPEQWVDFRALAGDPSDNIPGVKGIGEKTALKLLKEWGSLENLLKNLDQVKPASVREKILAHLEDLKLSRELSRVRTDLPLEVDFRGRREPDWEGLKAFLERLEFGSLLHEFGLLESPLPAEEAPWPPPEGAFLGYRLSRPEPMWAELLALAASAQGRVYRAEDPHGALRGLKEVRGLLAKDLAVVALREGLDLPPTDDPMLLAYLLDPSNTTPEGVARRYGGEWTEDAGERALLAERLHANLLGRLQGEERLLWLYEEVEKPLSRVLAHMEATGVKLDVAYLEALSLEVAAEMRRLEEEVFRLAGHSFNLNSRDQLERVLFDELGLPPIGKTEKTGKRSTSAAVLEALREVHPIVDKILQYRELAKLKGTYIDPLPALVHPKTGRLHTRFNQTATATGRLSSSDPNLQNIPVRTPLGQKIRKAFVAEEGWRLVALDYSQIELRVLAHLSGDENLIRVFQEGRDIHTQTASWMFGLSAEAIDPLMRRAAKTINFGVLYGMSAHRLSQELGIPYEEAAAFIQRYFQSYPKVKAWIEKTLEEGRTRGYVETLFGRRRYVPDLNARVKSVREAAERMAFNMPVQGTAADLMKLAMVRLFPQLREVGARMLLQVHDELLLEAPKERAEEVAALAKEVMEGVWPLAVPLEVEVGIGEDWLAAKG

SEQ ID NO: 435 - DNA, 2529 bp, synthetic construct
  misc_feature 1..2529: note = Variant of DNA polymerase I from Thermus sp. strain 2.9
  source 1..2529: mol_type = other DNA
atgcaccatcatcatcatcatggcggtagcggcatgttaccgttgttcgaacataaaggtcgcgtgcttctggttgatggccatcatctcgcgtatcgtaacttctttgccctgaaaggattaaccaccagccgtggcgagccggtacagggtgtctacggctttgcaaagtcgctcctgaaagctctgaaagaagacggtgatgtggtgattgttgtctttgatgcgaaagcgccaagttttcgccacgaagcgtacgaagcttacaaagccgggcgtgctccaacgccggaagactttcctcgccaattggcgcttatgaaggaattagtggatttgcttggcctcgaacgcttggaagttcccggtttcgaggcagacgacgtattagcgactctcgcaaagaaagccgaacgtgagggctatgaagtccatatcttgacagcagatcgcgatcttttccagcttttatctccgcgcatttccgtgttacacccggaagggcatcgtatcaccccggaatggctctgggagaaatatggtttgcgtcccgaacaatgggtggattttcgcgccttagcgggcgatccgagcgacaatattccgggagttaaaggtatcggcgagaagacggcgctcaagctccttaaagaatgggggtcgttggagaacttgcttaagaatttagatcaggtcaaaccagcttcagtgcgtgagaagattcttgcacacctcgaagacctcaaattaagccgcgaattggtccgtgtacgcaccgatttgccgctcgaagttgatttccgtggccgccgcgaacctgactgggagggtcttaaagcgtttttagagcgtcttgaatttggttcgctcttgcatgaattcggccttttagaaagcccgttaccagccgaagaagcaccttggccaccgcccgaaggcgcgtttttaggttaccgtttgagtcgcccggaaccgatgtgggccgaattattggctcttgcagcgtctgcccagggacgtgtgtatcgcgcggaagaccctcatggtgcgctccgtggcctcaaagaagtccgtggactccttgccaaagacttagctgttgttgcattgcgcgaaggtcttgatttacctccgactgatgatccaatgcttcttgcgtacctcttggacccgtcaaacacgacgcccgaaggcgtagcccgtcgttacggcggcgagtggaccgaagatgcaggtgagcgcgcgttattggccgaacgtttgcacgccaatttattaggacgtttgcaaggcgaggaacgtctcctctggctttacgaagaagtggagaaaccattgagtcgcgtgctcgcgcatatggaagctaccggtgtcaaattagacgtggcgtatttggaggcactcagccttgaagtcgctgccgaaatgcgccgcttggaggaagaagtattccgtttagcaggccactcctttaaccttaattctcgcgatcagttagaacgtgtgttgttcgatgaacttggtctccctcctatcggcaagacagagaagaccggtaaacgtagcacttcagcggcggttttagaagctcttcgcgaagtccatcccattgtggacaagatcttgcagtaccgcgaactcgcgaaattgaaaggcacctatattgaccctcttccggcattagtccacccgaaaacgggacgcctccatacccgcttcaaccaaacagccacggcgaccggtcgtttgtcctcctctgatccaaaccttcagaatattccagtacgtaccccattgggccagaagatccgcaaagcgtttgtagctgaggagggttggcgtttagtggccctcgattatagccaaattgaattacgtgtccttgcccatctttctggcgatgagaacctcatccgcgtgtttcaggaaggccgcgacattcacactcaaacggcaagctggatgtttggattatcagctgaagcgatcgatcctttgatgcgtcgtgcagcgaagaccatcaatttcggtgttctctacggtatgagtgcccatcgtttgtcgcaggaattaggcattccctatgaagaagctgcggcgttcattcagcgctactttcaaagctatcccaaagttaaagcatggatcgagaagactctcgaagaaggccgcacacgtggttacgtagagaccttatttggacgtcgccgctatgttcccgatttaaacgctcgcgtgaaatctgtccgtgaagccgccgaacgcatggcgttcaacatgcctgtacagggcacggcagctgacctcatgaaacttgcaatggtgcgcctttttccacaattgcgtgaagttggtgcccgcatgctcttgcaggtccacgatgaactcttgttagaagcgccaaaagagcgtgcggaagaggtggcagccctcgcgaaagaggttatggaaggcgtgtggcccttagcggtgcctcttgaagtcgaagttggtattggcgaggattggttggctgccaaaggataatga

SEQ ID NO: 436 - protein, 841 aa, synthetic construct
  REGION 1..841: note = Variant of DNA polymerase I from Thermus sp. strain 2.9
MHHHHHHGGSGMLPLFEHKGRVLLVDGHHLAYRNFFALKGLTTSRGEPVQGVYGFAKSLLKALKEDGDVVIVVFDAKAPSFRHEAYEAYKAGRAPTPEDFPRQLALMKELVDLLGLERLEVPGFEADDVLATLAKKAEREGYEVHILTADRDLFQLLSPRISVLHPEGHRITPEWLWEKYGLRPEQWVDFRALAGDPSDNIPGVKGIGEKTALKLLKEWGSLENLLKNLDQVKPASVREKILAHLEDLKLSRELVRVRTDLPLEVDFRGRREPDWEGLKAFLERLEFGSLLHEFGLLESPLPAEEAPWPPPEGAFLGYRLSRPEPMWAELLALAASAQGRVYRAEDPHGALRGLKEVRGLLAKDLAVVALREGLDLPPTDDPMLLAYLLDPSNTTPEGVARRYGGEWTEDAGERALLAERLHANLLGRLQGEERLLWLYEEVEKPLSRVLAHMEATGVKLDVAYLEALSLEVAAEMRRLEEEVFRLAGHSFNLNSRDQLERVLFDELGLPPIGKTEKTGKRSTSAAVLEALREVHPIVDKILQYRELAKLKGTYIDPLPALVHPKTGRLHTRFNQTATATGRLSSSDPNLQNIPVRTPLGQKIRKAFVAEEGWRLVALDYSQIELRVLAHLSGDENLIRVFQEGRDIHTQTASWMFGLSAEAIDPLMRRAAKTINFGVLYGMSAHRLSQELGIPYEEAAAFIQRYFQSYPKVKAWIEKTLEEGRTRGYVETLFGRRRYVPDLNARVKSVREAAERMAFNMPVQGTAADLMKLAMVRLFPQLREVGARMLLQVHDELLLEAPKERAEEVAALAKEVMEGVWPLAVPLEVEVGIGEDWLAAKG

SEQ ID NO: 437 - DNA, 2529 bp, synthetic construct
  misc_feature 1..2529: note = Variant of DNA polymerase I from Thermus sp. strain 2.9
  source 1..2529: mol_type = other DNA
atgcaccatcatcatcatcatggcggtagcggcatgttaccgttgttcgaacctaaaggtcgcgtgcttctggttgatggccatcatctcgcgtatcgtaacttctttgccctgaaaggattaaccaccagccgtggcgagccggtacagggtgtctacggctttgcaaagtcgctcctgaaagctctgaaagaagacggtgatgtggtgattgttgtctttgatgcgaaagcgccaagttttcgccacgaagcgtacgaagcttacaaagccgggcgtgctccaacgccggaagactttcctcgccaattggcgcttatgaaggaattagtggatttgcttggcctcgaacgcttggaagttcccggtttcgaggcagacgacgtattagcgactctcgcaaagaaagccgaacgtgagggctatgaagtccagatcttgacagcagatcgcgatcttttccagcttttatctccgcgcatttccgtgttacacccggaagggcatcgtatcaccccggaatggctctgggagaaatatggtttgcgtcccgaacaatgggtggattttcgcgccttagcgggcgatccgagcgacaatattccgggagttaaaggtatcggcgagaagacggcgctcaagctccttaaagaatgggggtcgttggagaacttgcttaagaatttagatcaggtcaaaccagcttcagtgcgtgagaagattcttgcacacctcgaagacctcaaattaagccgcgaattgtcccgtgtacgcaccgatttgccgctcgaagttgatttccgtggccgccgcgaacctgactgggagggtcttaaagcgtttttagagcgtcttgaatttggttcgctcttgcatgaattcggccttttagaaagcccgttaccagccgaagaagcaccttggccaccgcccgaaggcgcgtttttaggttaccgtttgagtcgcccggaaccgatgtgggccgaattattggctcttgcagcgtctgcccagggacgtgtgtatcgcgcggaagaccctcatggtttcctccgtggcctcaaagaagtccgtggactccttgccaaagacttagctgttgttgcattgcgcgaaggtcttgatttacctccgactgatgatccaatgcttcttgcgtacctcttggacccgtcaaacacgacgcccgaaggcgtagcccgtcgttacggcggcgagtggaccgaagatgcaggtgagcgcgcgttattggccgaacgtttgcacgccaatttattaggacgtttgcaaggcgaggaacgtctcctctggctttacgaagaagtggagaaaccattgagtcgcgtgctcgcgcatatggaagctaccggtgtcaaattagacgtggcgtatttggaggcactcagccttgaagttgctgccgaaatgcgccgcttggaggaagaagtattccgtttagcaggccactcctttaaccttaattctcgcgatcagttagaacgtgtgttgttcgatgaacttggtctccctcctatcggcaagacagagaagaccggtaaacgtagcacttcagcggcggttttagaagctcttcgcgaagtccatcccattgtggacaagatcttgcagtaccgcgaactcgcgaaattgaaaggcacctatattgaccctcttccggcattagtccacccgaaaacgggacgcctccatacccgcttcaaccaaacagccacggcgaccggtcgtttgtcctcctctgatccaaaccttcagaatattccagtacgtaccccattgggccagaagatccgcaaagcgtttgtagctgaggagggttggcgtttagtggccctcgattatagccaaattgaattacgtgtccttgcccatctttctggcgatgagaacctcatccgcgtgtttcaggaaggccgcgacattcacactcaaacggcaagctggatgtttggattatcagctgaagcgatcgatcctttgatgcgtcgtgcagcgaagaccatcaatttcggtgttctctacggtatgagtgcccatcgtttgtcgcaggaattaggcattccctatgaagaagctgcggcgttcattcagcgctactttcaaagctatcccaaagttaaagcatggatcgagaagactctcgaagaaggccgcacacgtggttacgtagagaccttatttggacgtcgccgctatgttcccgatttaaacgctcgcgtgaaatctgtccgtgaagccgccgaacgcatggcgttcaacatgcctgtacagggcacggcagctgacctcatgaaacttgcaatggtgcgcctttttccacaattgcgtgaagttggtgcccgcatgctcttgcaggtccacgatgaactcttgttagaagcgccaaaagagcgtgcggaagaggtggcagccctcgcgaaagaggttatggaaggcgtgtggcccttagcggtgcctcttgaagtcgaagttggtattggcgaggattggttggctgccaaaggataatga

SEQ ID NO: 438 - protein, 841 aa, synthetic construct
  REGION 1..841: note = Variant of DNA polymerase I from Thermus sp. strain 2.9
MHHHHHHGGSGMLPLFEPKGRVLLVDGHHLAYRNFFALKGLTTSRGEPVQGVYGFAKSLLKALKEDGDVVIVVFDAKAPSFRHEAYEAYKAGRAPTPEDFPRQLALMKELVDLLGLERLEVPGFEADDVLATLAKKAEREGYEVQILTADRDLFQLLSPRISVLHPEGHRITPEWLWEKYGLRPEQWVDFRALAGDPSDNIPGVKGIGEKTALKLLKEWGSLENLLKNLDQVKPASVREKILAHLEDLKLSRELSRVRTDLPLEVDFRGRREPDWEGLKAFLERLEFGSLLHEFGLLESPLPAEEAPWPPPEGAFLGYRLSRPEPMWAELLALAASAQGRVYRAEDPHGFLRGLKEVRGLLAKDLAVVALREGLDLPPTDDPMLLAYLLDPSNTTPEGVARRYGGEWTEDAGERALLAERLHANLLGRLQGEERLLWLYEEVEKPLSRVLAHMEATGVKLDVAYLEALSLEVAAEMRRLEEEVFRLAGHSFNLNSRDQLERVLFDELGLPPIGKTEKTGKRSTSAAVLEALREVHPIVDKILQYRELAKLKGTYIDPLPALVHPKTGRLHTRFNQTATATGRLSSSDPNLQNIPVRTPLGQKIRKAFVAEEGWRLVALDYSQIELRVLAHLSGDENLIRVFQEGRDIHTQTASWMFGLSAEAIDPLMRRAAKTINFGVLYGMSAHRLSQELGIPYEEAAAFIQRYFQSYPKVKAWIEKTLEEGRTRGYVETLFGRRRYVPDLNARVKSVREAAERMAFNMPVQGTAADLMKLAMVRLFPQLREVGARMLLQVHDELLLEAPKERAEEVAALAKEVMEGVWPLAVPLEVEVGIGEDWLAAKG

SEQ ID NO: 439 - DNA, 2529 bp, synthetic construct
  misc_feature 1..2529: note = Variant of DNA polymerase I from Thermus sp. strain 2.9
  source 1..2529: mol_type = other DNA
atgcaccatcatcatcatcatggcggtagcggcatgttaccgttgttcgaacctaaaggtcgcgtgcttctggttgatggccatcatctcgcgtatcgtaacttctttgccctgaaaggattaaccaccagccgtggcgagccggtacagggtgtctacggctttgcaaagtcgctcctgaaagctctgaaagaagacggtgatgtggtgattgttgtctttgatgcgaaagcgccaagttttcgccacgaagcgtacgaagcttacaaagccgggcgtgctccaacgccggaagactttcctcgccaattggcgcttatgaaggaattagtggatttgcttggcctcgaacgcttggaagttcccggtttcgaggcagacgacgtattagcgactctcgcaaagaaagccgaacgtgagggctatgaagtccagatcttgacagcagatcgcgatcttttccagcttttatctccgcgcatttccgtgttacacccggaagggcatcgtatcaccccggaatggctctgggagaaatatggtttgcgtcccgaacaatgggtggattttcgcgccttagcgggcgatccgagcgacaatattccgggagttaaaggtatcggcgagaagacggcgctcaagctccttaaagaatgggggtcgttggagaacttgcttaagaatttagatcaggtcaaaccagcttcagtgcgtgagaagattcttgcacacctcgaagacctcaaattaagccgcgaattgtcccgtgtacgcaccgatttgccgctcgaagttgatttccgtggccgccgcgaacctgactgggagggtcttaaagcgtttttagagcgtcttgaatttggttcgctcttgcatgaattcggccttttagaaagcccgttaccagccgaagaagcaccttggccaccgcccgaaggcgcgtttttaggttaccgtttgagtcgcccggaaccgatgtgggccgaattattggctcttgcagcgtctgcccagggacgtgtgtatcgcgcggaagaccctcatggtgcgctccgtggcctcaaagaagtccgtggactccttgccaaagacttagctgttgttgcattgcgcgaaggtcttgatttacctccgactgatgatccaatgcttcttgcgtacctcttggacccgtcaaacacgacgcccgaaggcgtagcccgtcgttacggcggcgagtggaccgaagatgcaggtgagcgcgcgttattggccgaacgtttgcacgccaatttagttggacgtttgcaaggcgaggaacgtctcctctggctttacgaagaagtggagaaaccattgagtcgcgtgctcgcgcatatggaagctaccggtgtcaaattagacgtggcgtatttggaggcactcagccttgaagttgctgccgaaatgcgccgcttggaggaagaagtattccgtttagcaggccactcctttaaccttaattctcgcgatcagttagaacgtgtgttgttcgatgaacttggtctccctcctatcggcaagacagagaagaccggtaaacgtagcacttcagcggcggttttagaagctcttcgcgaagtccatcccattgtggacaagatcttgcagtaccgcgaactcgcgaaattgaaaggcacctatattgaccctcttccggcattagtccacccgaaaacgggacgcctccatacccgcttcaaccaaacagccacggcgaccggtcgtttgtcctcctctgatccaaaccttcagaatattccagtacgtaccccattgggccagaagatccgcaaagcgtttgtagctgaggagggttggcgtttagtggccctcgattatagccaaattgaattacgtgtccttgcccatctttctggcgatgagaacctcatccgcgtgtttcaggaaggccgcgacattcacactcaaacggcaagctggatgtttggattatcagctgaagcgatcgatcctttgatgcgtcgtgcagcgaagaccatcaatttcggtgttctctacggtatgagtgcccatcgtttgtcgcaggaattaggcattccctatgaagaagctgcggcgttcattcagcgctactttcaaagctatcccaaagttaaagcatggatcgagaagactctcgaagaaggccgcacacgtggttacgtagagaccttatttggacgtcgccgctatgttcccgatttaaacgctcgcgtgaaatctgtccgtgaagccgccgaacgcatggcgttcaacatgcctgtacagggcacggcagctgacctcatgaaacttgcaatggtgcgcctttttccacaattgcgtgaagttggtgcccgcatgctcttgcaggtccacgatgaactcttgttagaagcgccaaaagagcgtgcggaagaggtggcagccctcgcgaaagaggttatggaaggcgtgtggcccttagcggtgcctcttgaagtcgaagttggtattggcgaggattggttggctgccaaaggataatga

SEQ ID NO: 440 - protein, 841 aa, synthetic construct
  REGION 1..841: note = Variant of DNA polymerase I from Thermus sp. strain 2.9
MHHHHHHGGSGMLPLFEPKGRVLLVDGHHLAYRNFFALKGLTTSRGEPVQGVYGFAKSLLKALKEDGDVVIVVFDAKAPSFRHEAYEAYKAGRAPTPEDFPRQLALMKELVDLLGLERLEVPGFEADDVLATLAKKAEREGYEVQILTADRDLFQLLSPRISVLHPEGHRITPEWLWEKYGLRPEQWVDFRALAGDPSDNIPGVKGIGEKTALKLLKEWGSLENLLKNLDQVKPASVREKILAHLEDLKLSRELSRVRTDLPLEVDFRGRREPDWEGLKAFLERLEFGSLLHEFGLLESPLPAEEAPWPPPEGAFLGYRLSRPEPMWAELLALAASAQGRVYRAEDPHGALRGLKEVRGLLAKDLAVVALREGLDLPPTDDPMLLAYLLDPSNTTPEGVARRYGGEWTEDAGERALLAERLHANLVGRLQGEERLLWLYEEVEKPLSRVLAHMEATGVKLDVAYLEALSLEVAAEMRRLEEEVFRLAGHSFNLNSRDQLERVLFDELGLPPIGKTEKTGKRSTSAAVLEALREVHPIVDKILQYRELAKLKGTYIDPLPALVHPKTGRLHTRFNQTATATGRLSSSDPNLQNIPVRTPLGQKIRKAFVAEEGWRLVALDYSQIELRVLAHLSGDENLIRVFQEGRDIHTQTASWMFGLSAEAIDPLMRRAAKTINFGVLYGMSAHRLSQELGIPYEEAAAFIQRYFQSYPKVKAWIEKTLEEGRTRGYVETLFGRRRYVPDLNARVKSVREAAERMAFNMPVQGTAADLMKLAMVRLFPQLREVGARMLLQVHDELLLEAPKERAEEVAALAKEVMEGVWPLAVPLEVEVGIGEDWLAAKG

SEQ ID NO: 441 - DNA, 2529 bp, synthetic construct
  misc_feature 1..2529: note = Variant of DNA polymerase I from Thermus sp. strain 2.9
  source 1..2529: mol_type = other DNA
atgcaccatcatcatcatcatggcggtagcggcatgttaccgttgttcgaacctaaaggtcgcgtgcttctggttgatggccatcatctcgcgtatcgtaacttctttgccctgaaaggattaaccaccagccgtggcgagccggtacagggtgtctacggctttgcaaagtcgctcctgaaagctctgaaagaagacggtgatgtggtgattgttgtctttgatgcgaaagcgccaagttttcgccacgaagcgtacgaagcttacaaagccgggcgtgctccaacgccggaagactttcctcgccaattggcgcttatgaaggaattagtggatttgcttggcctcgaacgcttggaagttcccggtttcgaggcagacgacgtattagcgactctcgcaaagaaagccgaacgtgagggctatgaagtccagatcttgacagcagatcgcgatcttttccagcttttatctccgcgcatttccgtgttacacccggaagggcatcgtatcaccccggaatggctctgggagaaatatggtttgcgtcccgaacaatgggtggattttcgcgccttagcgggcgatccgagcgacaatattccgggagttaaaggtatcggcgagaagacggcgctcaagctccttaaagaatgggggtcgttggagaacttgcttaagaatttagatcaggtcaaaccagcttcagtgcgtgagaagattcttgcacacctcgaagacctcaaattaagccgcgaattgtcccgtgtacgcaccgatttgccgctcgaagttgatttccgtggccgccgcgaacctgactgggagggtcttaaagcgtttttagagcgtcttgaatttggttcgctcttgcatgaattcggccttttagaaagcccgttaccagccgaagaagcaccttggccaccgcccgaaggcgcgtttttaggttaccgtttgagtcgcccggaaccgatgtgggccgaattattggctcttgcagcgtctgcccagggacgtgtgtatcgcgcggaagaccctcatggtgcgctccgtggcctcaaaaacgtccgtggactccttgccaaagacttagctgttgttgcattgcgcgaaggtcttgatttacctccgactgatgatccaatgcttcttgcgtacctcttggacccgtcaaacacgacgcccgaaggcgtagcccgtcgttacggcggcgagtggaccgaagatgcaggtgagcgcgcgttattggccgaacgtttgcacgccaatttattaggacgtttgcaaggcgaggaacgtctcctctggctttacgaagaagtggagaaaccattgagtcgcgtgctcgcgcatatggaagctaccggtgtcaaattagacgtggcgtatttggaggcactcagccttgaagttgctgccgaaatgcgccgcttggaggaagaagtattccgtttagcaggccactcctttaaccttaattctcgcgatcagttagaacgtgtgttgttcgatgaacttggtctccctcctatcggcaagacagagaagaccggtaaacgtagcacttcagcggcggttttagaagctcttcgcgaagtccatcccattgtggacaagatcttgcagtaccgcgaactcgcgaaattgaaaggcacctatattgaccctcttccggcattagtccacccgaaaacgggacgcctccatacccgcttcaaccaaacagccacggcgaccggtcgtttgtcctcctctgatccaaaccttcagaatattccagtacgtaccccattgggccagaagatccgcaaagcgtttgtagctgaggagggttggcgtttagtggccctcgattatagccaaattgaattacgtgtccttgcccatctttctggcgatgagaacctcatccgcgtgtttcaggaaggccgcgacattcacactcaaacggcaagctggatgtttggattatcagctgaagcgatcgatcctttgatgcgtcgtgcagcgaagaccatcaatttcggtgttctctacggtatgagtgcccatcgtttgtcgcaggaattaggcattccctatgaagaagctgcggcgttcattcagcgctactttcaaagctatcccaaagttaaagcatggatcgagaagactctcgaagaaggccgcacacgtggttacgtagagaccttatttggacgtcgccgctatgttcccgatttaaacgctcgcgtgaaatctgtccgtgaagccgccgaacgcatggcgttcaacatgcctgtacagggcacggcagctgacctcatgaaacttgcaatggtgcgcctttttccacaattgcgtgaagttggtgcccgcatgctcttgcaggtccacgatgaactcttgttagaagcgccaaaagagcgtgcggaagaggtggcagccctcgcgaaagaggttatggaaggcgtgtggcccttagcggtgcctcttgaagtcgaagttggtattggcgaggattggttggctgccaaaggataatga

SEQ ID NO: 442 - protein, 841 aa, synthetic construct
  REGION 1..841: note = Variant of DNA polymerase I from Thermus sp. strain 2.9
MHHHHHHGGSGMLPLFEPKGRVLLVDGHHLAYRNFFALKGLTTSRGEPVQGVYGFAKSLLKALKEDGDVVIVVFDAKAPSFRHEAYEAYKAGRAPTPEDFPRQLALMKELVDLLGLERLEVPGFEADDVLATLAKKAEREGYEVQILTADRDLFQLLSPRISVLHPEGHRITPEWLWEKYGLRPEQWVDFRALAGDPSDNIPGVKGIGEKTALKLLKEWGSLENLLKNLDQVKPASVREKILAHLEDLKLSRELSRVRTDLPLEVDFRGRREPDWEGLKAFLERLEFGSLLHEFGLLESPLPAEEAPWPPPEGAFLGYRLSRPEPMWAELLALAASAQGRVYRAEDPHGALRGLKNVRGLLAKDLAVVALREGLDLPPTDDPMLLAYLLDPSNTTPEGVARRYGGEWTEDAGERALLAERLHANLLGRLQGEERLLWLYEEVEKPLSRVLAHMEATGVKLDVAYLEALSLEVAAEMRRLEEEVFRLAGHSFNLNSRDQLERVLFDELGLPPIGKTEKTGKRSTSAAVLEALREVHPIVDKILQYRELAKLKGTYIDPLPALVHPKTGRLHTRFNQTATATGRLSSSDPNLQNIPVRTPLGQKIRKAFVAEEGWRLVALDYSQIELRVLAHLSGDENLIRVFQEGRDIHTQTASWMFGLSAEAIDPLMRRAAKTINFGVLYGMSAHRLSQELGIPYEEAAAFIQRYFQSYPKVKAWIEKTLEEGRTRGYVETLFGRRRYVPDLNARVKSVREAAERMAFNMPVQGTAADLMKLAMVRLFPQLREVGARMLLQVHDELLLEAPKERAEEVAALAKEVMEGVWPLAVPLEVEVGIGEDWLAAKG

SEQ ID NO: 443 - DNA, 2529 bp, synthetic construct
  misc_feature 1..2529: note = Variant of DNA polymerase I from Thermus sp. strain 2.9
  source 1..2529: mol_type = other DNA
atgcaccatcatcatcatcatggcggtagcggcatgttaccgttgttcgaacctaaaggtcgcgtgcttctggttgatggccatcatctcgcgtatcgtaacttctttgccctgaaaggattaaccaccagccgtggcgagccggtacagggtgtctacggctttgcaaagtcgctcctgaaagctctgaaagaagacggtgatgtggtgattgttgtctttgatgcgaaagcgccaagttttcgccacgaagcgtacgaagcttacaaagccgggcgtgctccaacgccggaagactttcctcgccaattggcgcttatgaaggaattagtggatttgcttggcctcgaacgcttggaagttcccggtttcgaggcagacgacgtattagcgactctcgcaaagaaagccgaacgtgagggctatgaagtccagatcttgacagcagatcgcgatcttttccagcttttatctccgcgcattctggtgttacacccggaagggcatcgtatcaccccggaatggctctgggagaaatatggtttgcgtcccgaacaatgggtggattttcgcgccttagcgggcgatccgagcgacaatattccgggagttaaaggtatcggcgagaagacggcgctcaagctccttaaagaatgggggtcgttggagaacttgcttaagaatttagatcaggtcaaaccagcttcagtgcgtgagaagattcttgcacacctcgaagacctcaaattaagccgcgaattgtcccgtgtacgcaccgatttgccgctcgaagttgatttccgtggccgccgcgaacctgactgggagggtcttaaagcgtttttagagcgtcttgaatttggttcgctcttgcatgaattcggccttttagaaagcccgttaccagccgaagaagcaccttggccaccgcccgaaggcgcgtttttaggttaccgtttgagtcgcccggaaccgatgtgggccgaattattggctcttgcagcgtctgcccagggacgtgtgtatcgcgcggaagaccctcatggtgcgctccgtggcctcaaagaagtccgtggactccttgccaaagacttagctgttgttgcattgcgcgaaggtcttgatttacctccgactgatgatccaatgcttcttgcgtacctcttggacccgtcaaacacgacgcccgaaggcgtagcccgtcgttacggcggcgagtggaccgaagatgcaggtgagcgcgcgttattggccgaacgtttgcacgccaatttattaggacgtttgcaaggcgaggaacgtctcctctggctttacgaagaagtggagaaaccattgagtcgcgtgctcgcgcatatggaagctaccggtgtcaaattagacgtggcgtatttggaggcactcagccttgaagttgctgccgaaatgcgccgcttggaggaagaagtattccgtttagcaggccactcctttaaccttaattctcgcgatcagttagaacgtgtgttgttcgatgaacttggtctccctcctatcggcaagacagagaagaccggtaaacgtagcacttcagcggcggttttagaagctcttcgcgaagtccatcccattgtggacaagatcttgcagtaccgcgaactcgcgaaattgaaaggcacctatattgaccctcttccggcattagtccacccgaaaacgggacgcctccatacccgcttcaaccaaacagccacggcgaccggtcgtttgtcctcctctgatccaaaccttcagaatattccagtacgtaccccattgggccagaagatccgcaaagcgtttgtagctgaggagggttggcgtttagtggccctcgattatagccaaattgaattacgtgtccttgcccatctttctggcgatgagaacctcatccgcgtgtttcaggaaggccgcgacattcacactcaaacggcaagctggatgtttggattatcagctgaagcgatcgatcctttgatgcgtcgtgcagcgaagaccatcaatttcggtgttctctacggtatgagtgcccatcgtttgtcgcaggaattaggcattccctatgaagaagctgcggcgttcattcagcgctactttcaaagctatcccaaagttaaagcatggatcgagaagactctcgaagaaggccgcacacgtggttacgtagagaccttatttggacgtcgccgctatgttcccgatttaaacgctcgcgtgaaatctgtccgtgaagccgccgaacgcatggcgttcaacatgcctgtacagggcacggcagctgacctcatgaaacttgcaatggtgcgcctttttccacaattgcgtgaagttggtgcccgcatgctcttgcaggtccacgatgaactcttgttagaagcgccaaaagagcgtgcggaagaggtggcagccctcgcgaaagaggttatggaaggcgtgtggcccttagcggtgcctcttgaagtcgaagttggtattggcgaggattggttggctgccaaaggataatga

SEQ ID NO: 444 - protein, 841 aa, synthetic construct
  REGION 1..841: note = Variant of DNA polymerase I from Thermus sp. strain 2.9
MHHHHHHGGSGMLPLFEPKGRVLLVDGHHLAYRNFFALKGLTTSRGEPVQGVYGFAKSLLKALKEDGDVVIVVFDAKAPSFRHEAYEAYKAGRAPTPEDFPRQLALMKELVDLLGLERLEVPGFEADDVLATLAKKAEREGYEVQILTADRDLFQLLSPRILVLHPEGHRITPEWLWEKYGLRPEQWVDFRALAGDPSDNIPGVKGIGEKTALKLLKEWGSLENLLKNLDQVKPASVREKILAHLEDLKLSRELSRVRTDLPLEVDFRGRREPDWEGLKAFLERLEFGSLLHEFGLLESPLPAEEAPWPPPEGAFLGYRLSRPEPMWAELLALAASAQGRVYRAEDPHGALRGLKEVRGLLAKDLAVVALREGLDLPPTDDPMLLAYLLDPSNTTPEGVARRYGGEWTEDAGERALLAERLHANLLGRLQGEERLLWLYEEVEKPLSRVLAHMEATGVKLDVAYLEALSLEVAAEMRRLEEEVFRLAGHSFNLNSRDQLERVLFDELGLPPIGKTEKTGKRSTSAAVLEALREVHPIVDKILQYRELAKLKGTYIDPLPALVHPKTGRLHTRFNQTATATGRLSSSDPNLQNIPVRTPLGQKIRKAFVAEEGWRLVALDYSQIELRVLAHLSGDENLIRVFQEGRDIHTQTASWMFGLSAEAIDPLMRRAAKTINFGVLYGMSAHRLSQELGIPYEEAAAFIQRYFQSYPKVKAWIEKTLEEGRTRGYVETLFGRRRYVPDLNARVKSVREAAERMAFNMPVQGTAADLMKLAMVRLFPQLREVGARMLLQVHDELLLEAPKERAEEVAALAKEVMEGVWPLAVPLEVEVGIGEDWLAAKG

SEQ ID NO: 445 - DNA, 2529 bp, synthetic construct
  misc_feature 1..2529: note = Variant of DNA polymerase I from Thermus sp. strain 2.9
  source 1..2529: mol_type = other DNA
atgcaccatcatcatcatcatggcggtagcggcatgttaccgttgttcgaacctaaaggtcgcgtgcttctggttgatggccatcatctcgcgtatcgtaacttctttgccctgaaaggattaaccaccagccgtggcgagccggtacagggtgtctacggctttgcaaagtcgctcctgaaagctctgaaagaagacggtgatgtggtgattgttgtctttgatgcgaaagcgccaagttttcgccacgaagcgtacgaagcttacaaagccgggcgtgctccaacgccggaagactttcctcgccaattggcgcttatgaaggaattagtggatttgcttggcctcgaacgcttggaagttcccggtttcgaggcagacgacgtattagcgactctcgcaaagaaagccgaacgtgagggctatgaagtccagatcttgacagcagatcgcgatcttttccagcttttatctccgcgcatttccgtgttacacccggaagggcatcgtatcaccccggaatggctctgggagaaatatggtttgcgtcccgaacaatgggtggattttcgcgccttagcgggcgatccgagcgacaatattccgggagttaaaggtatcggcgagaagacggcgctcaagctccttaaagaatgggggtcgttggagaacttgcttaagaatttagatcaggtcaaaccagcttcagtgcgtgagaagattcttgcacacctcgaagacctcaaattaagccgcgacttgtcccgtgtacgcaccgatttgccgctcgaagttgatttccgtggccgccgcgaacctgactgggagggtcttaaagcgtttttagagcgtcttgaatttggttcgctcttgcatgaattcggccttttagaaagcccgttaccagccgaagaagcaccttggccaccgcccgaaggcgcgtttttaggttaccgtttgagtcgcccggaaccgatgtgggccgaattattggctcttgcagcgtctgcccagggacgtgtgtatcgcgcggaagaccctcatggtgcgctccgtggcctcaaagaagtccgtggactccttgccaaagacttagctgttgttgcattgcgcgaaggtcttgatttacctccgactgatgatccaatgcttcttgcgtacctcttggacccgtcaaacacgacgcccgaaggcgtagcccgtcgttacggcggcgagtggaccgaagatgcaggtgagcgcgcgttattggccgaacgtttgcacgccaatttattaggacgtttgcaaggcgaggaacgtctcctctggctttacgaagaagtggagaaaccattgagtcgcgtgctcgcgcatatggaagctaccggtgtcaaattagacgtggcgtatttggaggcactcagccttgaagttgctgccgaaatgcgccgcttggaggaagaagtattccgtttagcaggccactcctttaaccttaattctcgcgatcagttagaacgtgtgttgttcgatgaacttggtctccctcctatcggcaagacagagaagaccggtaaacgtagcacttcagcggcggttttagaagctcttcgcgaagtccatcccattgtggacaagatcttgcagtaccgcgaactcgcgaaattgaaaggcacctatattgaccctcttccggcattagtccacccgaaaacgggacgcctccatacccgcttcaaccaaacagccacggcgaccggtcgtttgtcctcctctgatccaaaccttcagaatattccagtacgtaccccattgggccagaagatccgcaaagcgtttgtagctgaggagggttggcgtttagtggccctcgattatagccaaattgaattacgtgtccttgcccatctttctggcgatgagaacctcatccgcgtgtttcaggaaggccgcgacattcacactcaaacggcaagctggatgtttggattatcagctgaagcgatcgatcctttgatgcgtcgtgcagcgaagaccatcaatttcggtgttctctacggtatgagtgcccatcgtttgtcgcaggaattaggcattccctatgaagaagctgcggcgttcattcagcgctactttcaaagctatcccaaagttaaagcatggatcgagaagactctcgaagaaggccgcacacgtggttacgtagagaccttatttggacgtcgccgctatgttcccgatttaaacgctcgcgtgaaatctgtccgtgaagccgccgaacgcatggcgttcaacatgcctgtacagggcacggcagctgacctcatgaaacttgcaatggtgcgcctttttccacaattgcgtgaagttggtgcccgcatgctcttgcaggtccacgatgaactcttgttagaagcgccaaaagagcgtgcggaagaggtggcagccctcgcgaaagaggttatggaaggcgtgtggcccttagcggtgcctcttgaagtcgaagttggtattggcgaggattggttggctgccaaaggataatga

SEQ ID NO: 446 - protein, 841 aa, synthetic construct
  REGION 1..841: note = Variant of DNA polymerase I from Thermus sp. strain 2.9
MHHHHHHGGSGMLPLFEPKGRVLLVDGHHLAYRNFFALKGLTTSRGEPVQGVYGFAKSLLKALKEDGDVVIVVFDAKAPSFRHEAYEAYKAGRAPTPEDFPRQLALMKELVDLLGLERLEVPGFEADDVLATLAKKAEREGYEVQILTADRDLFQLLSPRISVLHPEGHRITPEWLWEKYGLRPEQWVDFRALAGDPSDNIPGVKGIGEKTALKLLKEWGSLENLLKNLDQVKPASVREKILAHLEDLKLSRDLSRVRTDLPLEVDFRGRREPDWEGLKAFLERLEFGSLLHEFGLLESPLPAEEAPWPPPEGAFLGYRLSRPEPMWAELLALAASAQGRVYRAEDPHGALRGLKEVRGLLAKDLAVVALREGLDLPPTDDPMLLAYLLDPSNTTPEGVARRYGGEWTEDAGERALLAERLHANLLGRLQGEERLLWLYEEVEKPLSRVLAHMEATGVKLDVAYLEALSLEVAAEMRRLEEEVFRLAGHSFNLNSRDQLERVLFDELGLPPIGKTEKTGKRSTSAAVLEALREVHPIVDKILQYRELAKLKGTYIDPLPALVHPKTGRLHTRFNQTATATGRLSSSDPNLQNIPVRTPLGQKIRKAFVAEEGWRLVALDYSQIELRVLAHLSGDENLIRVFQEGRDIHTQTASWMFGLSAEAIDPLMRRAAKTINFGVLYGMSAHRLSQELGIPYEEAAAFIQRYFQSYPKVKAWIEKTLEEGRTRGYVETLFGRRRYVPDLNARVKSVREAAERMAFNMPVQGTAADLMKLAMVRLFPQLREVGARMLLQVHDELLLEAPKERAEEVAALAKEVMEGVWPLAVPLEVEVGIGEDWLAAKG

SEQ ID NO: 447 - DNA, 2529 bp, synthetic construct
  misc_feature 1..2529: note = Variant of DNA polymerase I from Thermus sp. strain 2.9
  source 1..2529: mol_type = other DNA
atgcaccatcatcatcatcatggcggtagcggcatgttaccgttgttcgaacctaaaggtcgcgtgcttctggttgatggccatcatctcgcgtatcgtaacttctttgccctgaaaggattaaccaccagccgtggcgagccggtacagggtgtctacggctttgcaaagtcgctcctgaaagctctgaaagaagacggtgatgtggtgattgttgtctttgatgcgaaagcgccaagttttcgccacgaagcgtacgaagcttacaaagccgggcgtgctccaacgccggaagactttcctcgccaattggcgcttatgaaggaattagtggatttgcttggcctcgaacgcttggaagttcccggtttcgaggcagacgacgtattagcgactctcgcaaagaaagccgaacgtgagggctatgaagtccagatcttgacagcagatcgcgatcttttccagcttttatctccgcgcatttccgtgttacacccggaagggcatcgcatcaccccggaatggctctgggagaaatatggtttgcgtcccgaacaatgggtggattttcgcgccttagcgggcgatccgagcgacaatattccgggagttaaaggtatcggcgagaagacggcgctcaagctccttaaagaatgggggtcgttggagaacttgcttaagaatttagatcaggtcaaaccagcgtcagtgcgtgagaagattcttgcacacctcgaagacctccgtttaagcctggaattgtcccgtgtacgcaccgatttgccgctcgaagttgatttccgtggccgccgcgaacctgactgggagggtcttaaagcgtttttagagcgtcttgaatttggttcgctcttgcatgaattcggccttttagaaagcccgttaccagccgaagaagcaccttggccaccgcccgaaggcgcgtttttaggttacgttttgagtcgcccggaaccgatgtgggccgaattattggctcttgcagcgtctgcccagggacgtgtgtatcgcgcggaagaccctcatggtgcgctcaaaggcctcaaagaagtccgtggactccttgccaaagacttagctgttgttgcattgcgcgaaggtcttgatttacctccgactgatgatccaatgcttcttgcgtacctcttggacccgtcaaacacgacgcccgaaggcgtagcccgtcgttacggcggcgagtggaccgaagatgcaggcgagcgcgcgttattggccgaacgtttgcacgccaatttattaggacgtttgcaaggcgaggaacgtctcctctggctttacgaagaagtggagaaaccattgagtcgcgtgctcgcgcatatggaagctaccggtgtcaaattagacgtggcgtatttggaggcactcagccttgaagttgctgccgaaatgcgccgcttggaggaagaagtattccgtttagcaggccactcctttaaccttaattctcgcgatcagttagaacgtgtgttgttcgatgaacttggtctccctcctatcggcaagacagagaagaccggtaaacgtagcacttcagcggcggttttagaagctcttcgcgaagtccatcccattgtggacaagatcttgcagtaccgcgaactcgcgaaattgaaaggcacctatattgaccctcttccggcattagtccacccgaaaacgggacgcctccatacccgcttcaaccaaacagccacggcgaccggtcgtttgtcctcctctgatccaaaccttcagaatattccagtacgtaccccattgggccagaagatccgcaaagcgtttgtagctgaggagggttggcgtttagtggccctcgattatagccaaattgaattacgtgtccttgcccatctttctggcgatgagaacctcatccgcgtgtttcaggaaggcaaagacattcacactcaaacggcaagctggatgtttggattatcggcggaagcgatcgatcctttgatgcgtcgtgcagcgaagaccatcaatttcggtgttctctacggtatgagtgcccatcgtttgtcgcaggaattaggcattccctatgaagaagctgcggcgttcattcagcgctactttcaaagctatcccaaagttaaagcatggatcgagaagactctcgaagaaggccgcacacgtggttacgtagagaccttatttggacgtcgccgctatgttcccgatttaaacgctcgcgtgaaatctgtccgtgaagccgccgaacgcatggcgttcaacatgcctgtacagggcacggcagctgacctcatgaaacttgcaatggtgcgcctttttccacaattgcgtgaagttggtgcccgcatgctcttgcaggtccacgatgaactcttgttagaagcgccaaaagagcgtgcggaagaggtggcagccctcgcgaaagaggttatggaaggcgtgtggcccttagcggtgcctcttgaagtcgaagttggtattggcgaggattggttggctgccaaaggataatga

SEQ ID NO: 448 - protein, 841 aa, synthetic construct
  REGION 1..841: note = Variant of DNA polymerase I from Thermus sp. strain 2.9
MHHHHHHGGSGMLPLFEPKGRVLLVDGHHLAYRNFFALKGLTTSRGEPVQGVYGFAKSLLKALKEDGDVVIVVFDAKAPSFRHEAYEAYKAGRAPTPEDFPRQLALMKELVDLLGLERLEVPGFEADDVLATLAKKAEREGYEVQILTADRDLFQLLSPRISVLHPEGHRITPEWLWEKYGLRPEQWVDFRALAGDPSDNIPGVKGIGEKTALKLLKEWGSLENLLKNLDQVKPASVREKILAHLEDLRLSLELSRVRTDLPLEVDFRGRREPDWEGLKAFLERLEFGSLLHEFGLLESPLPAEEAPWPPPEGAFLGYVLSRPEPMWAELLALAASAQGRVYRAEDPHGALKGLKEVRGLLAKDLAVVALREGLDLPPTDDPMLLAYLLDPSNTTPEGVARRYGGEWTEDAGERALLAERLHANLLGRLQGEERLLWLYEEVEKPLSRVLAHMEATGVKLDVAYLEALSLEVAAEMRRLEEEVFRLAGHSFNLNSRDQLERVLFDELGLPPIGKTEKTGKRSTSAAVLEALREVHPIVDKILQYRELAKLKGTYIDPLPALVHPKTGRLHTRFNQTATATGRLSSSDPNLQNIPVRTPLGQKIRKAFVAEEGWRLVALDYSQIELRVLAHLSGDENLIRVFQEGKDIHTQTASWMFGLSAEAIDPLMRRAAKTINFGVLYGMSAHRLSQELGIPYEEAAAFIQRYFQSYPKVKAWIEKTLEEGRTRGYVETLFGRRRYVPDLNARVKSVREAAERMAFNMPVQGTAADLMKLAMVRLFPQLREVGARMLLQVHDELLLEAPKERAEEVAALAKEVMEGVWPLAVPLEVEVGIGEDWLAAKG

SEQ ID NO: 449 - DNA, 2529 bp, synthetic construct
  misc_feature 1..2529: note = Variant of DNA polymerase I from Thermus sp. strain 2.9
  source 1..2529: mol_type = other DNA
atgcaccatcatcatcatcatggcggtagcggcatgttaccgttgttcgaacctaaaggtcgcgtgcttctggttgatggccatcatctcgcgtatcgtaacttctttgccctgaaaggattaaccaccagccgtggcgagccggtacagggtgtctacggctttgcaaagtcgctcctgaaagctctgaaagaagacggtgatgtggtgattgttgtctttgatgcgaaagcgccaagttttcgccacgaagcgtacgaagcttacaaagccgggcgtgctccaacgccggaagactttcctcgccaattggcgcttatgaaggaattagtggatttgcttggcctcgaacgcttggaagttcccggtttcgaggcagacgacgtattagcgactctcgcaaagaaagccgaacgtgagggctatgaagtccagatcttgacagcagatcgcgatcttttccagcttttatctccgcgcatttccgtgttacacccggaagggcatcgtatcaccccggaatggctctgggagaaatatggtttgcgtcccgaacaatgggtggattttcgcgccttagcgggcgatccgagcgacaatattccgggagttaaaggtatcggcgagaagacggcgctcaagctccttaaagaatgggggtcgttggagaacttgcttaagaatttagatcaggtcaaaccagcttcagtgcgtgagaagattcttgcacacctcgaagacctcaaattaagccgcgaattgtcccgtgtacgcaccgatttgccgctcgaagttgatttccgtggccgccgcgaacctgactgggagggtcttaaagcgtttttagagcgtcttgaatttggttcgctcttgcatgaattcggccttttagaaagcccgttaccagccgaagaagcaccttggccaccgcccgaaggcgcgtttttaggttaccgtttgagtcgcccggaaccgatgtgggccgaattattggctcttgcagcgtctgcccagggacgtgtgtatcgcgcggaagaccctcatggtgcgctccgtggcctcaaagaagtccgtggactccttgccaaagacttagctgttgttgcattgcgcgaaggtcttgatttacctccgactgatgatccaatgcttcttgcgtacctcttggacccgtcaaacacgacgaaggaaggcgtagcccgtcgttacggcggcgagtggaccgaagatgcaggtgagcgcgcgttattggccgaacgtttgcacgccaatttattaggacgtttgcaaggcgaggaacgtctcctctggctttacgaagaagtggagaaaccattgagtcgcgtgctcgcgcatatggaagctaccggtgtcaaattagacgtggcgtatttggaggcactcagccttgaagttgctgccgaaatgcgccgcttggaggaagaagtattccgtttagcaggccactcctttaaccttaattctcgcgatcagttagaacgtgtgttgttcgatgaacttggtctccctcctatcggcaagacagagaagaccggtaaacgtagcacttcagcggcggttttagaagctcttcgcgaagtccatcccattgtggacaagatcttgcagtaccgcgaactcgcgaaattgaaaggcacctatattgaccctcttccggcattagtccacccgaaaacgggacgcctccatacccgcttcaaccaaacagccacggcgaccggtcgtttgtcctcctctgatccaaaccttcagaatattccagtacgtaccccattgggccagaagatccgcaaagcgtttgtagctgaggagggttggcgtttagtggccctcgattatagccaaattgaattacgtgtccttgcccatctttctggcgatgagaacctcatccgcgtgtttcaggaaggccgcgacattcacactcaaacggcaagctggatgtttggattatcagctgaagcgatcgatcctttgatgcgtcgtgcagcgaagaccatcaatttcggtgttctctacggtatgagtgcccatcgtttgtcgcaggaattaggcattccctatgaagaagctgcggcgttcattcagcgctactttcaaagctatcccaaagttaaagcatggatcgagaagactctcgaagaaggccgcacacgtggttacgtagagaccttatttggacgtcgccgctatgttcccgatttaaacgctcgcgtgaaatctgtccgtgaagccgccgaacgcatggcgttcaacatgcctgtacagggcacggcagctgacctcatgaaacttgcaatggtgcgcctttttccacaattgcgtgaagttggtgcccgcatgctcttgcaggtccacgatgaactcttgttagaagcgccaaaagagcgtgcggaagaggtggcagccctcgcgaaagaggttatggaaggcgtgtggcccttagcggtgcctcttgaagtcgaagttggtattggcgaggattggttggctgccaaaggataatga

SEQ ID NO: 450 - protein, 841 aa, synthetic construct
  REGION 1..841: note = Variant of DNA polymerase I from Thermus sp. strain 2.9
MHHHHHHGGSGMLPLFEPKGRVLLVDGHHLAYRNFFALKGLTTSRGEPVQGVYGFAKSLLKALKEDGDVVIVVFDAKAPSFRHEAYEAYKAGRAPTPEDFPRQLALMKELVDLLGLERLEVPGFEADDVLATLAKKAEREGYEVQILTADRDLFQLLSPRISVLHPEGHRITPEWLWEKYGLRPEQWVDFRALAGDPSDNIPGVKGIGEKTALKLLKEWGSLENLLKNLDQVKPASVREKILAHLEDLKLSRELSRVRTDLPLEVDFRGRREPDWEGLKAFLERLEFGSLLHEFGLLESPLPAEEAPWPPPEGAFLGYRLSRPEPMWAELLALAASAQGRVYRAEDPHGALRGLKEVRGLLAKDLAVVALREGLDLPPTDDPMLLAYLLDPSNTTKEGVARRYGGEWTEDAGERALLAERLHANLLGRLQGEERLLWLYEEVEKPLSRVLAHMEATGVKLDVAYLEALSLEVAAEMRRLEEEVFRLAGHSFNLNSRDQLERVLFDELGLPPIGKTEKTGKRSTSAAVLEALREVHPIVDKILQYRELAKLKGTYIDPLPALVHPKTGRLHTRFNQTATATGRLSSSDPNLQNIPVRTPLGQKIRKAFVAEEGWRLVALDYSQIELRVLAHLSGDENLIRVFQEGRDIHTQTASWMFGLSAEAIDPLMRRAAKTINFGVLYGMSAHRLSQELGIPYEEAAAFIQRYFQSYPKVKAWIEKTLEEGRTRGYVETLFGRRRYVPDLNARVKSVREAAERMAFNMPVQGTAADLMKLAMVRLFPQLREVGARMLLQVHDELLLEAPKERAEEVAALAKEVMEGVWPLAVPLEVEVGIGEDWLAAKG

SEQ ID NO: 451 - DNA, 2529 bp, synthetic construct
  misc_feature 1..2529: note = Variant of DNA polymerase I from Thermus sp. strain 2.9
  source 1..2529: mol_type = other DNA
atgcaccatcatcatcatcatggcggtagcggcatgttaccgttgttcgaacctaaaggtcgcgtgcttctggttgatggccatcatctcgcgtatcgtaacttctttgccctgaaaggattaaccaccagccgtggcgagccggtacagggtgtctacggctttgcaaagtcgctcctgaaagctctgaaagaagacggtgatgtggtgattgttgtctttgatgcgaaagcgccaagttttcgccacgaagcgtacgaagcttacaaagccgggcgtgctccaacgccggaagactttcctcgccaattggcgcttatgaaggaattagtggatttgcttggcctcgaacgcttggaagttcccggtttcgaggcagacgacgtattagcgactctcgcaaagaaagccgaacgtgagggctatgaagtccagatcttgacagcagatcgcgatcttttccagcttttatctccgcgcatttccgtgttacacccggaagggcatcgtatcaccccggaatggctctgggagaaatatggtttgcgtcccgaacaatgggtggattttcgcgccttagcgggcgatccgagcgacaatattccgggagttaaaggtatcggcgagaagacggcgctcaagctccttaaagaatgggggtcgttggagaacttgcttaagaatttagatcaggtcaaaccagcttcagtgcgtgagaagattcttgcacacctcgaagacctcaaattaagccgcgaattgtcccgtgtacgcaccgatttgccgctcgaagttgatttccgtggccgccgcgaacctgactgggagggtcttaaagcgtttttagagcgtcttgaatttggttcgctcttgcatgaattcggccttttagaaagcccgttaccagccgaagaagcaccttggccaccgcccgaaggcgcgtttttaggttaccgtttgagtcgcccggaaccgatgtgggccgaattattggctcttgcagcgtctgcccagggacgtgtgtatcgcgcggaagaccctcatggtgcgctccgtggcctcaaagaagtccgtggactccttgccaaagacttagctgttgttgcattgcgcgaaggtcttgatttacctccgatcgatgatccaatgcttcttgcgtacctcttggacccgtcaaacacgacgcccgaaggcgtagcccgtcgttacggcggcgagtggaccgaagatgcaggtgagcgcgcgttattggccgaacgtttgcacgccaatttattaggacgtttgcaaggcgaggaacgtctcctctggctttacgaagaagtggagaaaccattgagtcgcgtgctcgcgcatatggaagctaccggtgtcaaattagacgtggcgtatttggaggcactcagccttgaagttgctgccgaaatgcgccgcttggaggaagaagtattccgtttagcaggccactcctttaaccttaattctcgcgatcagttagaacgtgtgttgttcgatgaacttggtctccctcctatcggcaagacagagaagaccggtaaacgtagcacttcagcggcggttttagaagctcttcgcgaagtccatcccattgtggacaagatcttgcagtaccgcgaactcgcgaaattgaaaggcacctatattgaccctcttccggcattagtccacccgaaaacgggacgcctccatacccgcttcaaccaaacagccacggcgaccggtcgtttgtcctcctctgatccaaaccttcagaatattccagtacgtaccccattgggccagaagatccgcaaagcgtttgtagctgaggagggttggcgtttagtggccctcgattatagccaaattgaattacgtgtccttgcccatctttctggcgatgagaacctcatccgcgtgtttcaggaaggccgcgacattcacactcaaacggcaagctggatgtttggattatcagctgaagcgatcgatcctttgatgcgtcgtgcagcgaagaccatcaatttcggtgttctctacggtatgagtgcccatcgtttgtcgcaggaattaggcattccctatgaagaagctgcggcgttcattcagcgctactttcaaagctatcccaaagttaaagcatggatcgagaagactctcgaagaaggccgcacacgtggttacgtagagaccttatttggacgtcgccgctatgttcccgatttaaacgctcgcgtgaaatctgtccgtgaagccgccgaacgcatggcgttcaacatgcctgtacagggcacggcagctgacctcatgaaacttgcaatggtgcgcctttttccacaattgcgtgaagttggtgcccgcatgctcttgcaggtccacgatgaactcttgttagaagcgccaaaagagcgtgcggaagaggtggcagccctcgcgaaagaggttatggaaggcgtgtggcccttagcggtgcctcttgaagtcgaagttggtattggcgaggattggttggctgccaaaggataatga

SEQ ID NO: 452 - protein, 841 aa, synthetic construct
  REGION 1..841: note = Variant of DNA polymerase I from Thermus sp. strain 2.9
MHHHHHHGGSGMLPLFEPKGRVLLVDGHHLAYRNFFALKGLTTSRGEPVQGVYGFAKSLLKALKEDGDVVIVVFDAKAPSFRHEAYEAYKAGRAPTPEDFPRQLALMKELVDLLGLERLEVPGFEADDVLATLAKKAEREGYEVQILTADRDLFQLLSPRISVLHPEGHRITPEWLWEKYGLRPEQWVDFRALAGDPSDNIPGVKGIGEKTALKLLKEWGSLENLLKNLDQVKPASVREKILAHLEDLKLSRELSRVRTDLPLEVDFRGRREPDWEGLKAFLERLEFGSLLHEFGLLESPLPAEEAPWPPPEGAFLGYRLSRPEPMWAELLALAASAQGRVYRAEDPHGALRGLKEVRGLLAKDLAVVALREGLDLPPIDDPMLLAYLLDPSNTTPEGVARRYGGEWTEDAGERALLAERLHANLLGRLQGEERLLWLYEEVEKPLSRVLAHMEATGVKLDVAYLEALSLEVAAEMRRLEEEVFRLAGHSFNLNSRDQLERVLFDELGLPPIGKTEKTGKRSTSAAVLEALREVHPIVDKILQYRELAKLKGTYIDPLPALVHPKTGRLHTRFNQTATATGRLSSSDPNLQNIPVRTPLGQKIRKAFVAEEGWRLVALDYSQIELRVLAHLSGDENLIRVFQEGRDIHTQTASWMFGLSAEAIDPLMRRAAKTINFGVLYGMSAHRLSQELGIPYEEAAAFIQRYFQSYPKVKAWIEKTLEEGRTRGYVETLFGRRRYVPDLNARVKSVREAAERMAFNMPVQGTAADLMKLAMVRLFPQLREVGARMLLQVHDELLLEAPKERAEEVAALAKEVMEGVWPLAVPLEVEVGIGEDWLAAKG

SEQ ID NO: 453 - DNA, 2529 bp, synthetic construct
  misc_feature 1..2529: note = Variant of DNA polymerase I from Thermus sp. strain 2.9
  source 1..2529: mol_type = other DNA
atgcaccatcatcatcatcatggcggtagcggcatgttaccgttgttcgaacctaaaggtcgcgtgcttctggttgatggccatcatctcgcgtatcgtaacttctttgccctgaaaggattaaccaccagccgtggcgagccggtacagggtgtctacggctttgcaaagtcgctcctgaaagctctgaaagaagacggtgatgtggtgattgttgtctttgatgcgaaagcgccaagttttcgccacgaagcgtacgaagcttacaaagccgggcgtgctccaacgccggaagactttcctcgccaattggcgcttatgaaggaattagtggatttgcttggcctcgaacgcttggaagttcccggtttcgaggcagacgacgtattagcgactctcgcaaagaaagccgaacgtgagggctatgaagtccagatcttgacagcagatcgcgatcttttccagcttttatctccgcgcatttccgtgttacacccggaagggcatcgtatcaccccggaatggctctgggagaaatatggtttgcgtcccgaacaatgggtggattttcgcgccttagtaggcgatccgagcgacaatattccgggagttaaaggtatcggcgagaagacggcgctcaagctccttaaagaatgggggtcgttggagaacttgcttaagaatttagatcaggtcaaaccagcttcagtgcgtgagaagattcttgcacacctcgaagacctccgtttaagcctggaattgtcccgtgtacgcaccgatttgccgctcgaagttgatttccgtggccgccgcgaacctgactgggagggtcttaaagcgtttttagagcgtcttgaatttggttcgctcttgcatgaattcggccttttagaaagcccgttaccagccgaagaagcaccttggccaccgcccgaaggcgcgtttttaggttaccgtttgagtcgcccggaaccgatgtgggccgaattattggctcttgcagcgtctgcccagggacgtgtgtatcgcgcggaagaccctcatggtgcgctccgtggcctcaaagaagtccgtggactccttgccaaagacttagctgttgttgcattgcgcgaaggtcttgatttacctccgactgatgatccaatgcttcttgcgtacctcttggacccgtcaaacacgacgcccgaaggcgtagcccgtcgttacggcggcgagtggaccgaagatgcaggcgagcgcgcgttattggccgaacgtttgcacgccaatttattaggacgtttgcaaggcgaggaacgtctcctctggctttacgaagaagtggagaaaccattgagtcgcgtgctcgcgcatatggaagctaccggtgtcaaattagacgtggcgtatttggaggcactcagccttgaagttgctgccgaaatgcgccgcttggaggaagaagtattccgtttagcaggccactcctttaaccttaattctcgcgatcagttagaacgtgtgttgttcgatgaacttggtctccctcctatcggcaagacagagaagaccggtaaacgtagcacttcagcggcggttttagaagctcttcgcgaagtccatcccattgtggacaagatcttgcagtaccgcgaactcgcgaaattgaaaggcacctatattgaccctcttccggcattagtccacccgaaaacgggacgcctccatacccgcttcaaccaaacagccacggcgaccggtcgtttgtcctcctctgatccaaaccttcagaatattccagtacgtaccccattgggccagaagatccgcaaagcgtttgtagctgaggagggttggcgtttagtggccctcgattatagccaaattgaattacgtgtccttgcccatctttctggcgatgagaacctcatccgcgtgtttcaggaaggcaaagacattcacactcaaacggcaagctggatgtttggattatcagctgaagcgatcgatcctttgatgcgtcgtgcagcgaagaccatcaatttcggtgttctctacggtatgagtgcccatcgtttgtcgcaggaattaggcattccctatgaagaagctgtggcgttcattcagcgctactttcaaagctatcccaaagttaaagcatggatcgagaagactctcgaagaaggccgcacacgtggttacgtagagaccttatttggacgtcgccgctatgttcccgatttaaacgctcgcgtgaaatctgtccgtgaagccgccgaacgcatggcgttcaacatgcctgtacagggcacggcagctgacctcatgaaacttgcaatggtgcgcctttttccacaattgcgtgaagttggtgcccgcatgctcttgcaggtccacgatgaactcttgttagaagcgccaaaagagcgtgcggaagaggtggcagccctcgcgaaagaggttatggaaggcgtgtggcccttagcggtgcctcttgaagtcgaagttggtattggcgaggattggttggctgccaaaggataatga

SEQ ID NO: 454 - protein, 841 aa, synthetic construct
  REGION 1..841: note = Variant of DNA polymerase I from Thermus sp. strain 2.9
MHHHHHHGGSGMLPLFEPKGRVLLVDGHHLAYRNFFALKGLTTSRGEPVQGVYGFAKSLLKALKEDGDVVIVVFDAKAPSFRHEAYEAYKAGRAPTPEDFPRQLALMKELVDLLGLERLEVPGFEADDVLATLAKKAEREGYEVQILTADRDLFQLLSPRISVLHPEGHRITPEWLWEKYGLRPEQWVDFRALVGDPSDNIPGVKGIGEKTALKLLKEWGSLENLLKNLDQVKPASVREKILAHLEDLRLSLELSRVRTDLPLEVDFRGRREPDWEGLKAFLERLEFGSLLHEFGLLESPLPAEEAPWPPPEGAFLGYRLSRPEPMWAELLALAASAQGRVYRAEDPHGALRGLKEVRGLLAKDLAVVALREGLDLPPTDDPMLLAYLLDPSNTTPEGVARRYGGEWTEDAGERALLAERLHANLLGRLQGEERLLWLYEEVEKPLSRVLAHMEATGVKLDVAYLEALSLEVAAEMRRLEEEVFRLAGHSFNLNSRDQLERVLFDELGLPPIGKTEKTGKRSTSAAVLEALREVHPIVDKILQYRELAKLKGTYIDPLPALVHPKTGRLHTRFNQTATATGRLSSSDPNLQNIPVRTPLGQKIRKAFVAEEGWRLVALDYSQIELRVLAHLSGDENLIRVFQEGKDIHTQTASWMFGLSAEAIDPLMRRAAKTINFGVLYGMSAHRLSQELGIPYEEAVAFIQRYFQSYPKVKAWIEKTLEEGRTRGYVETLFGRRRYVPDLNARVKSVREAAERMAFNMPVQGTAADLMKLAMVRLFPQLREVGARMLLQVHDELLLEAPKERAEEVAALAKEVMEGVWPLAVPLEVEVGIGEDWLAAKG

SEQ ID NO: 455 - DNA, 2529 bp, synthetic construct
  misc_feature 1..2529: note = Variant of DNA polymerase I from Thermus sp. strain 2.9
  source 1..2529: mol_type = other DNA
atgcaccatcatcatcatcatggcggtagcggcatgttaccgttgttcgaacctaaaggtcgcgtgcttctggttgatggccatcatctcgcgtatcgtaacttctttgccctgaaaggattaaccaccagccgtggcgagccggtacagggtgtctacggctttgcaaagtcgctcctgaaagctctgaaagaagacggtgatgtggtgattgttgtctttgatgcgaaagcgccaagttttcgccacgaagcgtacgaagcttacaaagccgggcgtgctccaacgccggaagactttcctcgccaattggcgcttatgaaggaattagtggatttgcttggcctcgaacgcttggaagttcccggtttcgaggcagacgacgtattagcgactctcgcaaagaaagccgaacgtgagggctatgaagtccagatcttgacagcagatcgcgatcttttccagcttttatctccgcgcatttccgtgttacacccggaagggcatcgtatcaccccggaatggctctgggagaaatatggtttgcgtcccgaacaatgggtggattttcgcgccttagcgggcgatccgagcgacaatattccgggagttaaaggtatcggcgagaagacggcgctcaagctccttaaagaatgggggtcgttggagaacttgcttaagaatttagatcaggtcaaaccagcttcagtgcgtgagaagattcttgcacacctcgaagacctcaaattaagccgcgaattgtcccgtgtacgcaccgatttgccgctcgaagttgatttccgtggccgccgcgaacctgactgggagggtcttaaagcgatgttagagcgtcttgaatttggttcgctcttgcatgaattcggccttttagaaagcccgttaccagccgaagaagcaccttggccaccgcccgaaggcgcgtttttaggttaccgtttgagtcgcccggaaccgatgtgggccgaattattggctcttgcagcgtctgcccagggacgtgtgtatcgcgcggaagaccctcatggtgcgctccgtggcctcaaagaagtccgtggactccttgccaaagacttagctgttgttgcattgcgcgaaggtcttgatttacctccgactgatgatccaatgcttcttgcgtacctcttggacccgtcaaacacgacgcccgaaggcgtagcccgtcgttacggcggcgagtggaccgaagatgcaggtgagcgcgcgttattggccgaacgtttgcacgccaatttattaggacgtttgcaaggcgaggaacgtctcctctggctttacgaagaagtggagaaaccattgagtcgcgtgctcgcgcatatggaagctaccggtgtcaaattagacgtggcgtatttggaggcactcagccttgaagttgctgccgaaatgcgccgcttggaggaagaagtattccgtttagcaggccactcctttaaccttaattctcgcgatcagttagaacgtgtgttgttcgatgaacttggtctccctcctatcggcaagacagagaagaccggtaaacgtagcacttcagcggcggttttagaagctcttcgcgaagtccatcccattgtggacaagatcttgcagtaccgcgaactcgcgaaattgaaaggcacctatattgaccctcttccggcattagtccacccgaaaacgggacgcctccatacccgcttcaaccaaacagccacggcgaccggtcgtttgtcctcctctgatccaaaccttcagaatattccagtacgtaccccattgggccagaagatccgcaaagcgtttgtagctgaggagggttggcgtttagtggccctcgattatagccaaattgaattacgtgtccttgcccatctttctggcgatgagaacctcatccgcgtgtttcaggaaggccgcgacattcacactcaaacggcaagctggatgtttggattatcagctgaagcgatcgatcctttgatgcgtcgtgcagcgaagaccatcaatttcggtgttctctacggtatgagtgcccatcgtttgtcgcaggaattaggcattccctatgaagaagctgcggcgttcattcagcgctactttcaaagctatcccaaagttaaagcatggatcgagaagactctcgaagaaggccgcacacgtggttacgtagagaccttatttggacgtcgccgctatgttcccgatttaaacgctcgcgtgaaatctgtccgtgaagccgccgaacgcatggcgttcaacatgcctgtacagggcacggcagctgacctcatgaaacttgcaatggtgcgcctttttccacaattgcgtgaagttggtgcccgcatgctcttgcaggtccacgatgaactcttgttagaagcgccaaaagagcgtgcggaagaggtggcagccctcgcgaaagaggttatggaaggcgtgtggcccttagcggtgcctcttgaagtcgaagttggtattggcgaggattggttggctgccaaaggataatga

SEQ ID NO: 456 - protein, 841 aa, synthetic construct
  REGION 1..841: note = Variant of DNA polymerase I from Thermus sp. strain 2.9
MHHHHHHGGSGMLPLFEPKGRVLLVDGHHLAYRNFFALKGLTTSRGEPVQGVYGFAKSLLKALKEDGDVVIVVFDAKAPSFRHEAYEAYKAGRAPTPEDFPRQLALMKELVDLLGLERLEVPGFEADDVLATLAKKAEREGYEVQILTADRDLFQLLSPRISVLHPEGHRITPEWLWEKYGLRPEQWVDFRALAGDPSDNIPGVKGIGEKTALKLLKEWGSLENLLKNLDQVKPASVREKILAHLEDLKLSRELSRVRTDLPLEVDFRGRREPDWEGLKAMLERLEFGSLLHEFGLLESPLPAEEAPWPPPEGAFLGYRLSRPEPMWAELLALAASAQGRVYRAEDPHGALRGLKEVRGLLAKDLAVVALREGLDLPPTDDPMLLAYLLDPSNTTPEGVARRYGGEWTEDAGERALLAERLHANLLGRLQGEERLLWLYEEVEKPLSRVLAHMEATGVKLDVAYLEALSLEVAAEMRRLEEEVFRLAGHSFNLNSRDQLERVLFDELGLPPIGKTEKTGKRSTSAAVLEALREVHPIVDKILQYRELAKLKGTYIDPLPALVHPKTGRLHTRFNQTATATGRLSSSDPNLQNIPVRTPLGQKIRKAFVAEEGWRLVALDYSQIELRVLAHLSGDENLIRVFQEGRDIHTQTASWMFGLSAEAIDPLMRRAAKTINFGVLYGMSAHRLSQELGIPYEEAAAFIQRYFQSYPKVKAWIEKTLEEGRTRGYVETLFGRRRYVPDLNARVKSVREAAERMAFNMPVQGTAADLMKLAMVRLFPQLREVGARMLLQVHDELLLEAPKERAEEVAALAKEVMEGVWPLAVPLEVEVGIGEDWLAAKG

SEQ ID NO: 457 - DNA, 2529 bp, synthetic construct
  misc_feature 1..2529: note = Variant of DNA polymerase I from Thermus sp. strain 2.9
  source 1..2529: mol_type = other DNA
atgcaccatcatcatcatcatggcggtagcggcatgttaccgttgttcgaacctaaaggtcgcgtgcttctggttgatggccatcatctcgcgtatcgtaacttctttgccctgaaaggattaaccaccagccgtggcgagccggtacagggtgtctacggctttgcaaagtcgctcctgaaagctctgaaagaagacggtgatgtggtgattgttgtctttgatgcgaaagcgccaagttttcgccacgaagcgtacgaagcttacaaagccgggcgtgctccaacgccggaagactttcctcgccaattggcgcttatgaaggaattagtggatttgcttggcctcgaacgcttggaagttcccggtttcgaggcagacgacgtattagcgactctcgcaaagaaagccgaacgtgagggctatgaagtccagatcttgacagcagatcgcgatcttttccagcttttatctccgcgcatttcggtgttacacccggaagggcatcgtatcaccccggaatggctctgggagaaatatggtttgcgtcccgaacaatgggtggattttcgcgccttagcgggcgatccgagcgacaatattccgggagttaaaggtatcggcgagaagacggcgctcaagctccttaaagaatgggggtcgttggagaacttgcttaagaatttagatcaggtcaaaccagcttcagtgcgtgagaagattcttgcacacctcgaagacctcaaattaagccgcgaattgtcccgtgtacgcaccgatttgccgctcgaagttgatttccgtggccgccgcgaacctgactgggagggtcttaaagcgtttttagagcgtcttgaatttggttcgctcttgcatgaattcggccttttagaaagcccgttaccagccgaagaagcaccttggccaccgcccgaaggcgcgtttttaggttaccgtttgagtcgcccggaaccgatgtgggccgaattattggctcttgcagcgtctgcccagggacgtgtgtatcgcgcggaagaccctcatggtgcgctccgtggcctcaaagaagtccgtggactccttgccaaagacttagctgttgttgcattgcgcgaaggtcttgatttacctccgactgatgatccaatgcttcttgcgtacctcttggacccgtcaaacacgacgcccgaaggcgtagcccgtcgttacggcggcgagtggaccgaagatgcagccgagcgcgcgttattggccgaacgtttgcacgccaatttattaggacgtttgcaaggcgaggaacgtctcctctggctttacgaagaagtggagaaaccattgagtcgcgtgctcgcgcatatggaagctaccggtgtcaaattagacgtggcgtatttggaggcactcagccttgaagttgctgccgaaatgcgccgcttggaggaagaagtattccgtttagcaggccactcctttaaccttaattctcgcgatcagttagaacgtgtgttgttcgatgaacttggtctccctcctatcggcaagacagagaagaccggtaaacgtagcacttcagcggcggttttagaagctcttcgcgaagtccatcccattgtggacaagatcttgcagtaccgcgaactcgcgaaattgaaaggcacctatattgaccctcttccggcattagtccacccgaaaacgggacgcctccatacccgcttcaaccaaacagccacggcgaccggtcgtttgtcctcctctgatccaaaccttcagaatattccagtacgtaccccattgggccagaagatccgcaaagcgtttgtagctgaggagggttggcgtttagtggccctcgattatagccaaattgaattacgtgtccttgcccatctttctggcgatgagaacctcatccgcgtgtttcaggaaggcaaagacattcacactcaaacggcaagctggatgtttggattatcagctgaagcgatcgatcctttgatgcgtcgtgcagcgaagaccatcaatttcggtgttctctacggtatgagtgcccatcgtttgtcgcaggaattaggcattccctatgaagaagctgcggcgttcattcagcgctactttcaaagctatcccaaagttaaagcatggatcgagaagactctcgaagaaggccgcacacgtggttacgtagagaccttatttggacgtcgccgctatgttcccgatttaaacgctcgcgtgaaatctgtccgtgaagccgccgaacgcatggcgttcaacatgcctgtacagggcacggcagctgacctcatgaaacttgcaatggtgcgcctttttccacaattgcgtgaagttggtgcccgcatgctcttgcaggtccacgatgaactcttgttagaagcgccaaaagagcgtgcggaagaggtggcagccctcgcgaaagaggttatggaaggcgtgtggcccttagcggtgcctcttgaagtcgaagttggtattggcgaggattggttggctgccaaaggataatga

SEQ ID NO: 458 - protein, 841 aa, synthetic construct
  REGION 1..841: note = Variant of DNA polymerase I from Thermus sp. strain 2.9
MHHHHHHGGSGMLPLFEPKGRVLLVDGHHLAYRNFFALKGLTTSRGEPVQGVYGFAKSLLKALKEDGDVVIVVFDAKAPSFRHEAYEAYKAGRAPTPEDFPRQLALMKELVDLLGLERLEVPGFEADDVLATLAKKAEREGYEVQILTADRDLFQLLSPRISVLHPEGHRITPEWLWEKYGLRPEQWVDFRALAGDPSDNIPGVKGIGEKTALKLLKEWGSLENLLKNLDQVKPASVREKILAHLEDLKLSRELSRVRTDLPLEVDFRGRREPDWEGLKAFLERLEFGSLLHEFGLLESPLPAEEAPWPPPEGAFLGYRLSRPEPMWAELLALAASAQGRVYRAEDPHGALRGLKEVRGLLAKDLAVVALREGLDLPPTDDPMLLAYLLDPSNTTPEGVARRYGGEWTEDAAERALLAERLHANLLGRLQGEERLLWLYEEVEKPLSRVLAHMEATGVKLDVAYLEALSLEVAAEMRRLEEEVFRLAGHSFNLNSRDQLERVLFDELGLPPIGKTEKTGKRSTSAAVLEALREVHPIVDKILQYRELAKLKGTYIDPLPALVHPKTGRLHTRFNQTATATGRLSSSDPNLQNIPVRTPLGQKIRKAFVAEEGWRLVALDYSQIELRVLAHLSGDENLIRVFQEGKDIHTQTASWMFGLSAEAIDPLMRRAAKTINFGVLYGMSAHRLSQELGIPYEEAAAFIQRYFQSYPKVKAWIEKTLEEGRTRGYVETLFGRRRYVPDLNARVKSVREAAERMAFNMPVQGTAADLMKLAMVRLFPQLREVGARMLLQVHDELLLEAPKERAEEVAALAKEVMEGVWPLAVPLEVEVGIGEDWLAAKG

SEQ ID NO: 459 - DNA, 2529 bp, synthetic construct
  misc_feature 1..2529: note = Variant of DNA polymerase I from Thermus sp. strain 2.9
  source 1..2529: mol_type = other DNA
atgcaccatcatcatcatcatggcggtagcggcatgttaccgttgttcgaacctaaaggtcgcgtgcttctggttgatggccatcatctcgcgtatcgtaacttctttgccctgaaaggattaaccaccagccgtggcgagccggtacagggtgtctacggctttgcaaagtcgctcctgaaagctctgaaagaagacggtgatgtggtgattgttgtctttgatgcgaaagcgccaagttttcgccacgaagcgtacgaagcttacaaagccgggcgtgctccaacgccggaagactttcctcgccaattggcgcttatgaaggaattagtggatttgcttggcctcgaacgcttggaagttcccggtttcgaggcagacgacgtattagcgactctcgcaaagaaagccgaacgtgagggctatgaagtccagatcttgacagcagatcgcgatcttttccagcttttatctccgcgcatttccgtgttacacccggaagggcatcgtatcaccccggaatggctctgggagaaatatggtttgcgtcccgaacaatgggtggattttcgcgccttagcgggcgatccgagcgacaatatttcgggagttaaaggtatcggcgagaagacggcgctcaagctccttaaagaatgggggtcgttggagaacttgcttaagaatttagatcaggtcaaaccagcttcagtgcgtgagaagattcttgcacacctcgaagacctcaaattaagccgcgaattgtcccgtgtacgcaccgatttgccgctcgaagttgatttcaaaggccgccgcgaacctgactgggagggtcttaaagcgtttttagagcgtcttgaatttggttcgctcttgcatgaattcggccttttagaaagcccgttaccagccgaagaagcaccttggccaccgcccgaaggcgcgtttttaggttaccgtttgagtcgcccggaaccgatgtgggccgaattattggctcttgcagcgtctgcccagggacgtgtgtatcgcgcggaagaccctcatggtgcgctccgtggcctcaaagaagtccgtggactccttgccaaagacttagctgttgttgcattgcgcgaaggtcttgatttacctccgactgatgatccaatgcttcttgcgtacctcttggacccgtcaaacacgacgcccgaaggcgtagcccgtcgttacggcggcgagtggaccgaagatgcaggtgagcgcgcgttattggccgaacgtttgcacgccaatttattaggacgtttgcaaggcgaggaacgtctcctctggctttacgaagaagtggagaaaccattgagtcgcgtgctcgcgcatatggaagctaccggtgtcaaattagacgtggcgtatttggaggcactcagccttgaagttgctgccgaaatgcgccgcttggaggaagaagtattccgtttagcaggccactcctttaaccttaattctcgcgatcagttagaacgtgtgttgttcgatgaacttggtctccctcctatcggcaagacagagaagaccggtaaacgtagcacttcagcggcggttttagaagctcttcgcgaagtccatcccattgtggacaagatcttgcagtaccgcgaactcgcgaaattgaaaggcacctatattgaccctcttccggcattagtccacccgaaaacgggacgcctccatacccgcttcaaccaaacagccacggcgaccggtcgtttgtcctcctctgatccaaaccttcagaatattccagtacgtaccccattgggccagaagatccgcaaagcgtttgtagctgaggagggttggcgtttagtggccctcgattatagccaaattgaattacgtgtccttgcccatctttctggcgatgagaacctcatccgcgtgtttcaggaaggccgcgacattcacactcaaacggcaagctggatgtttggattatcagctgaagcgatcgatcctttgatgcgtcgtgcagcgaagaccatcaatttcggtgttctctacggtatgagtgcccatcgtttgtcgcaggaattaggcattccctatgaagaagctgcggcgttcattcagcgctactttcaaagctatcccaaagttaaagcatggatcgagaagactctcgaagaaggccgcacacgtggttacgtagagaccttatttggacgtcgccgctatgttcccgatttaaacgctcgcgtgaaatctgtccgtgaagccgccgaacgcatggcgttcaacatgcctgtacagggcacggcagctgacctcatgaaacttgcaatggtgcgcctttttccacaattgcgtgaagttggtgcccgcatgctcttgcaggtccacgatgaactcttgttagaagcgccaaaagagcgtgcggaagaggtggcagccctcgcgaaagaggttatggaaggcgtgtggcccttagcggtgcctcttgaagtcgaagttggtattggcgaggattggttggctgccaaaggataatga

SEQ ID NO: 460 - protein, 841 aa, synthetic construct
  REGION 1..841: note = Variant of DNA polymerase I from Thermus sp. strain 2.9
MHHHHHHGGSGMLPLFEPKGRVLLVDGHHLAYRNFFALKGLTTSRGEPVQGVYGFAKSLLKALKEDGDVVIVVFDAKAPSFRHEAYEAYKAGRAPTPEDFPRQLALMKELVDLLGLERLEVPGFEADDVLATLAKKAEREGYEVQILTADRDLFQLLSPRISVLHPEGHRITPEWLWEKYGLRPEQWVDFRALAGDPSDNISGVKGIGEKTALKLLKEWGSLENLLKNLDQVKPASVREKILAHLEDLKLSRELSRVRTDLPLEVDFKGRREPDWEGLKAFLERLEFGSLLHEFGLLESPLPAEEAPWPPPEGAFLGYRLSRPEPMWAELLALAASAQGRVYRAEDPHGALRGLKEVRGLLAKDLAVVALREGLDLPPTDDPMLLAYLLDPSNTTPEGVARRYGGEWTEDAGERALLAERLHANLLGRLQGEERLLWLYEEVEKPLSRVLAHMEATGVKLDVAYLEALSLEVAAEMRRLEEEVFRLAGHSFNLNSRDQLERVLFDELGLPPIGKTEKTGKRSTSAAVLEALREVHPIVDKILQYRELAKLKGTYIDPLPALVHPKTGRLHTRFNQTATATGRLSSSDPNLQNIPVRTPLGQKIRKAFVAEEGWRLVALDYSQIELRVLAHLSGDENLIRVFQEGRDIHTQTASWMFGLSAEAIDPLMRRAAKTINFGVLYGMSAHRLSQELGIPYEEAAAFIQRYFQSYPKVKAWIEKTLEEGRTRGYVETLFGRRRYVPDLNARVKSVREAAERMAFNMPVQGTAADLMKLAMVRLFPQLREVGARMLLQVHDELLLEAPKERAEEVAALAKEVMEGVWPLAVPLEVEVGIGEDWLAAKG

SEQ ID NO: 461 - DNA, 2529 bp, synthetic construct
  misc_feature 1..2529: note = Variant of DNA polymerase I from Thermus sp. strain 2.9
  source 1..2529: mol_type = other DNA
atgcaccatcatcatcatcatggcggtagcggcatgttaccgttgttcgaacctaaaggtcgcgtgcttctggttgatggccatcatctcgcgtatcgtaacttctttgccctgaaaggattaaccaccagccgtggcgagccggtacagggtgtctacggctttgcaaagtcgctcctgaaagctctgaaagaagacggtgatgtggtgattgttgtctttgatgcgaaagcgccaagttttcgccacgaagcgtacgaagcttacaaagccgggcgtgctccaacgccggaagactttcctcgccaattggcgcttatgaaggaattagtggatttgcttggcctcgaacgcttggaagttcccggtttcgaggcagacgacgtattagcgactctcgcaaagaaagccgaacgtgagggctatgaagtccagatcttgacagcagatcgcgatcttttccagcttttatctccgcgcatttccgtgttacacccggaagggcatcgcatcaccccggaatggctctgggagaaatatggtttgcgtcccgaacaatgggtggattttcgcgccttagcgggcgatccgagcgacaatattccgggagttaaaggtatcggcgagaagacggcgctcaagctccttaaagaatgggggtcgttggagaacttgcttaagaatttagatcaggtcaaaccagagtcagtgcgtgagaagattcttgcacacctcgaagacctccgtttaagcctggaattgtcccgtgtacgcaccgatttgccgctcgaagttgatttccgtggccgccgcgaacctgactgggagggtcttaaagcgtttttagagcgtcttgaatttggttcgctcttgcatgaattcggccttttagaaagcccgttaccagccgaagaagcaccttggccaccgcccgaaggcgcgtttttaggttaccgtttgagtcgctcggaaccgatgtgggccgaattattggctcttgcagcgtctgcccagggacgtgtgtatcgcgcggaagaccctcatggtgcgctcaaaggcctcaaagaagtccgtggactccttgccaaagacttagctgttgttgcattgcgcgaaggtcttgatttacctccgactgatgatccaatgcttcttgcgtacctcttggacccgtcaaacacgacgcccgaaggcgtagcccgtcgttacggcggcgagtggaccgaagatgcaggcgagcgcgcgttattggccgaacgtttgcacgccaatttattaggacgtttgcaaggcgaggaacgtctcctctggctttacgaagaagtggagaaaccattgagtcgcgtgctcgcgcatatggaagctaccggtgtcaaattagacgtggcgtatttggaggcactcagccttgaagttgctgccgaaattcgccgcttggaggaagaagtattccgtttagcaggccactcctttaaccttaattctcgcgatcagttagaacgtgtgttgttcgatgaacttggtctccctcctatcggcaagacagagaagaccggtaaacgtagcacttcagcggcggttttagaagctcttcgcgaagtccatcccattgtggacaagatcttgcagtaccgcgaactcgcgaaattgaaaggcacctatattgaccctcttccggcattagtccacccgaaaacgggacgcctccatacccgcttcaaccaaacagccacggcgaccggtcgtttgtcctcctctgatccaaaccttcagaatattccagtacgtaccccattgggccagaagatccgcaaagcgtttgtagctgaggagggttggcgtttagtggccctcgattatagccaaattgaattacgtgtccttgcccatctttctggcgatgagaacctcatccgcgtgtttcaggaaggccgtgacattcacactcaaacggcaagctggatgtttggattatcagctgaagcgatcgatcctttgatgcgtcgtgcagcgaagaccatcaatttcggtgttctctacggtatgagtgcccatcgtttgtcgcaggaattaggcattccctatgaagaagctgcggcgttcattcagcgctactttcaaagctatcccaaagttaaagcatggatcgagaagactctcgaagaaggccgcacacgtggttacgtagagaccttatttggacgtcgccgctatgttcccgatttaaacgctcgcgtgaaatctgtccgtgaagccgccgaacgcatggcgttcaacatgcctgtacagggcacggcagctgacctcatgaaacttgcaatggtgcgcctttttccacaattgcgtgaagttggtgcccgcatgctcttgcaggtccacgatgaactcttgttagaagcgccaaaagagcgtgcggaagaggtggcagccctcgcgaaagaggttatggaaggcgtgtggcccttagcggtgcctcttgaagtcgaagttggtattggcgaggattggttggctgccaaaggataatga

SEQ ID NO: 462 - protein, 841 aa, synthetic construct
  REGION 1..841: note = Variant of DNA polymerase I from Thermus sp. strain 2.9
MHHHHHHGGSGMLPLFEPKGRVLLVDGHHLAYRNFFALKGLTTSRGEPVQGVYGFAKSLLKALKEDGDVVIVVFDAKAPSFRHEAYEAYKAGRAPTPEDFPRQLALMKELVDLLGLERLEVPGFEADDVLATLAKKAEREGYEVQILTADRDLFQLLSPRISVLHPEGHRITPEWLWEKYGLRPEQWVDFRALAGDPSDNIPGVKGIGEKTALKLLKEWGSLENLLKNLDQVKPESVREKILAHLEDLRLSLELSRVRTDLPLEVDFRGRREPDWEGLKAFLERLEFGSLLHEFGLLESPLPAEEAPWPPPEGAFLGYRLSRSEPMWAELLALAASAQGRVYRAEDPHGALKGLKEVRGLLAKDLAVVALREGLDLPPTDDPMLLAYLLDPSNTTPEGVARRYGGEWTEDAGERALLAERLHANLLGRLQGEERLLWLYEEVEKPLSRVLAHMEATGVKLDVAYLEALSLEVAAEIRRLEEEVFRLAGHSFNLNSRDQLERVLFDELGLPPIGKTEKTGKRSTSAAVLEALREVHPIVDKILQYRELAKLKGTYIDPLPALVHPKTGRLHTRFNQTATATGRLSSSDPNLQNIPVRTPLGQKIRKAFVAEEGWRLVALDYSQIELRVLAHLSGDENLIRVFQEGRDIHTQTASWMFGLSAEAIDPLMRRAAKTINFGVLYGMSAHRLSQELGIPYEEAAAFIQRYFQSYPKVKAWIEKTLEEGRTRGYVETLFGRRRYVPDLNARVKSVREAAERMAFNMPVQGTAADLMKLAMVRLFPQLREVGARMLLQVHDELLLEAPKERAEEVAALAKEVMEGVWPLAVPLEVEVGIGEDWLAAKG

SEQ ID NO: 463 - DNA, 2529 bp, synthetic construct
  misc_feature 1..2529: note = Variant of DNA polymerase I from Thermus sp. strain 2.9
  source 1..2529: mol_type = other DNA
atgcaccatcatcatcatcatggcggtagcggcatgttaccgttgttcgaacctaaaggtcgcgtgcttctggttgatggccatcatctcgcgtatcgtaacttctttgccctgaaaggattaaccaccagccgtggcgagccggtacagggtgtctacggctttgcaaagtcgctcctgaaagctctgaaagaagacggtgatgtggtgattgttgtctttgatgcgaaagcgccaagttttcgccacgaagcgtacgaagcttacaaagccgggcgtgctccaacgccggaagactttcctcgccaattggcgcttatgaaggaattagtggatttgcttggcctcgaacgcttggaagttcccggtttcgaggcagacgacgtattagcgactctcgcaaagaaagccgaacgtgagggctatgaagtccagatcttgacagcagatcgcgatcttttccagcttttatctccgcgcatctcggtgttacacccggaagggcatcgtatcaccccggaatggctctgggagaaatatggtttgcgtcccgaacaatgggtggattttcgcgccttagtaggcgatccgagcgacaatattccgggagttaaaggtatcggcgagaagacggcgctcaagctccttaaagaatgggggtcgttggagaacttgcttaagaatttagatcaggtcaaaccagcttcagtgcgtgagaagattcttgcacacctcgaagacctcaaattaagccgcgaattgtcccgtgtacgcaccgatttgccgctcgaagttgatttccgtggccgccgcgaacctgactgggagggtcttaaagcgtttttagagcgtcttgaatttggttcgctcttgcatgaattcggccttttagaaagcccgttaccagccgaagaagcaccttggccaccgcccgaaggcgcgtttttaggttaccgtttgagtcgcccggaaccgatgtgggccgaattattggctcttgcagcgtctgcccagggacgtgtgtatcgcgcggaagaccctcatggtgcgctccgtggcctcaaagaagtccgtggactccttgccaaagacttagctgttgttgcattgcgcgaaggtcttgatttacctccgactgatgatccaatgcttcttgcgtacctcttggacccgtcaaacacgacgcccgaaggcgtagcccgtcgttacggcggcgagtggaccgaagatgcaggtgagcgcgcgttattggccgaacgtttgcacgccaatttattaggacgtttgcaaggcgaggaaaagctcctctggctttacgaagaagtggagaaaccattgagtcgcgtgctcgcgcatatggaagctaccggtgtcaaattagacgtggcgtatttggaggcactcagccttgaagttgctgccgaaatgcgccgcttggaggaagaagtattccgtttagcaggccactcctttaaccttaattctcgcgatcagttagaacgtgtgttgttcgatgaacttggtctccctcctatcggcaagacagagaagaccggtaaacgtagcacttcagcggcggttttagaagctcttcgcgaagtccatcccattgtggacaagatcttgcagtaccgcgaactcgcgaaattgaaaggcacctatattgaccctcttccggcattagtccacccgaaaacgggacgcctccatacccgcttcaaccaaacagccacggcgaccggtcgtttgtcctcctctgatccaaaccttcagaatattccagtacgtaccccattgggccagaagatccgcaaagcgtttgtagctgaggagggttggcgtttagtggccctcgattatagccaaattgaattacgtgtccttgcccatctttctggcgatgagaacctcatccgcgtgtttcaggaaggccgcgacattcacactcaaacggcaagctggatgtttggattatcagctgaagcgatcgatcctttgatgcgtcgtgcagcgaagaccattaatttcggtgttctctacggtatgagtgcccatcgtttgtcgcaggaattaggcattccctatgaagaagctgcggcgttcattcagcgctactttcaaagctatcccaaagttaaagcatggatcgagaagactctcgaagaaggccgcacacgtggttacgtagagaccttatttggacgtcgccgctatgttcccgatttaaacgctcgcgtgaaatctgtccgtgaagccgccgaacgcatggcgttcaacatgcctgtacagggcacggcagctgacctcatgaaacttgcaatggtgcgcctttttccacaattgcgtgaagttggtgcccgcatgctcttgcaggtccacgatgaactcttgttagaagcgccaaaagagcgtgcggaagaggtggcagccctcgcgaaagaggttatggaaggcgtgtggcccttagcggtgcctcttgaagtcgaagttggtattggcgaggattggttggctgccaaaggataatga

SEQ ID NO: 464 - protein, 841 aa, synthetic construct
  REGION 1..841: note = Variant of DNA polymerase I from Thermus sp. strain 2.9
MHHHHHHGGSGMLPLFEPKGRVLLVDGHHLAYRNFFALKGLTTSRGEPVQGVYGFAKSLLKALKEDGDVVIVVFDAKAPSFRHEAYEAYKAGRAPTPEDFPRQLALMKELVDLLGLERLEVPGFEADDVLATLAKKAEREGYEVQILTADRDLFQLLSPRISVLHPEGHRITPEWLWEKYGLRPEQWVDFRALVGDPSDNIPGVKGIGEKTALKLLKEWGSLENLLKNLDQVKPASVREKILAHLEDLKLSRELSRVRTDLPLEVDFRGRREPDWEGLKAFLERLEFGSLLHEFGLLESPLPAEEAPWPPPEGAFLGYRLSRPEPMWAELLALAASAQGRVYRAEDPHGALRGLKEVRGLLAKDLAVVALREGLDLPPTDDPMLLAYLLDPSNTTPEGVARRYGGEWTEDAGERALLAERLHANLLGRLQGEEKLLWLYEEVEKPLSRVLAHMEATGVKLDVAYLEALSLEVAAEMRRLEEEVFRLAGHSFNLNSRDQLERVLFDELGLPPIGKTEKTGKRSTSAAVLEALREVHPIVDKILQYRELAKLKGTYIDPLPALVHPKTGRLHTRFNQTATATGRLSSSDPNLQNIPVRTPLGQKIRKAFVAEEGWRLVALDYSQIELRVLAHLSGDENLIRVFQEGRDIHTQTASWMFGLSAEAIDPLMRRAAKTINFGVLYGMSAHRLSQELGIPYEEAAAFIQRYFQSYPKVKAWIEKTLEEGRTRGYVETLFGRRRYVPDLNARVKSVREAAERMAFNMPVQGTAADLMKLAMVRLFPQLREVGARMLLQVHDELLLEAPKERAEEVAALAKEVMEGVWPLAVPLEVEVGIGEDWLAAKG

SEQ ID NO: 465 - DNA, 2529 bp, synthetic construct
  misc_feature 1..2529: note = Variant of DNA polymerase I from Thermus sp. strain 2.9
  source 1..2529: mol_type = other DNA
atgcaccatcatcatcatcatggcggtagcggcatgttaccgttgttcgaacctaaaggtcgcgtgcttctggttgatggccatcatctcgcgtatcgtaacttctttgccctgaaaggattaaccaccagccgtggcgagccggtacagggtgtctacggctttgcaaagtcgctcctgaaagctctgaaagaagacggtgatgtggtgattgttgtctttgatgcgaaagcgccaagttttcgccacgaagcgtacgaagcttacaaagccgggcgtgctccaacgccggaagactttcctcgccaattggcgcttatgaaggaattagtggatttgcttggcctcgaacgcttggaagttcccggtttcgaggcagacgacgtattagcgactctcgcaaagaaagccgaacgtgagggctatgaagtccagatcttgacagcagatcgcgatcttttccagcttttatctccgcgcatttccgtgttacacccggaagggcatcgtatcaccccggaatggctctgggagaaatatggtttgcgtcccgaacaatgggtggattttcgcgccttagcgggcgatccgagcgacaatattccgggagttaaaggtatcggcgagaagacggcgctcaagctccttaaagaatgggggtcgttggagaacttgcttaagaatttagatcaggtcaaaccagcttcagtgcgtgagaagattcttgcacacctcgaagacctcaaattaagccgcgaattggtccgtgtacgcaccgatttgccgctcgaagttgatttccgtggccgccgcgaacctgactgggagggtcttaaagcgtttttagagcgtcttgaactgggttcgctcttgcatgaattcggccttttagaaagcccgttaccagccgaagaagcaccttggccaccgcccgaaggcgcgtttttaggttaccgtttgagtcgcccggaaccgatgtgggccgaattattggctcttgcagcgtctgcccagggacgtgtgtatcgcgcggaagaccctcatggtgcgctccgtggcctcaaagaagtccgtggactccttgccaaagacttagctgttgttgcattgcgcgaaggtcttgatttacctccgactgatgatccaatgcttcttgcgtacctcttggactcgtcaaacacgacgcccgaaggcgtagcccgtcgttacggcggcgagtggaccgaagatgcaggtgagcgcgcgttattggccgaacgtttgcacgccaatttattaggacgtttgcaaggcgaggaacgtctcctctggctttacgaagaagtggagaaaccattgagtcgcgtgctcgcgcatatggaagctaccggtgtcaaattagacgtggcgtatttggaggcactcagccttgaagtcgctgccgaactgcgccgcttggaggaagaagtattccgtttagcaggccactcctttaaccttaattctcgcgatcagttagaacgtgtgttgttcgatgaacttggtctccctcctatcggcaagacagagaagaccggtaaacgtagcacttcagcggcggttttagaagctcttcgcgaagtccatcccattgtggacaagatcttgcagtaccgcgaactcgcgaaattgaaaggcacctatattgaccgtcttccggcattagtccacccgaaaacgggacgcctccatacccgcttcaaccaaacagccacggcgaccggtcgtttgtcctcctctgatccaaaccttcagaatattccagtacgtaccccattgggccagaagatccgcaaagcgtttgtagctgaggagggttggcgtttagtggccctcgattatagccaaattgaattacgtgtccttgcccatctttctggcgatgagaacctcatccgcgtgtttcaggaaggccgcgacattcacactcaaacggcaagctggatgtttggattatcagctgaagcgatcgatcctttgatgcgtcgtgcagcgaagaccatcaatttcggtgttctctacggtatgagtgcccatcgtttgtcgcaggaattaggcattccctatgaagaagctgcggcgttcattcagcgctactttcaaagctatcccaaagttaaagcatggatcgagaagactctcgaagaaggccgcacacgtggttacgtagagaccttatttggacgtcgccgctatgttcccgatttaaatgctcgcgtgaaatctgtccgtgaagccgccgaacgcatggcgttcaacatgcctgtacagggcacggcagctgacctcatgaaacttgcaatggtgcgcctttttccacaattgcgtgaagttggtgcccgcatgctcttgcaggtccacgatgaactcttgttagaagcgccaaaagagcgtgcggaagaggtggcagccctcgcgaaagaggttatggaaggcgtgtggcccttagcggtgcctcttgaagtcgaagttggtattggcgaggattggttggctgccaaaggataatga

SEQ ID NO: 466 - protein, 841 aa, synthetic construct
  REGION 1..841: note = Variant of DNA polymerase I from Thermus sp. strain 2.9
MHHHHHHGGSGMLPLFEPKGRVLLVDGHHLAYRNFFALKGLTTSRGEPVQGVYGFAKSLLKALKEDGDVVIVVFDAKAPSFRHEAYEAYKAGRAPTPEDFPRQLALMKELVDLLGLERLEVPGFEADDVLATLAKKAEREGYEVQILTADRDLFQLLSPRISVLHPEGHRITPEWLWEKYGLRPEQWVDFRALAGDPSDNIPGVKGIGEKTALKLLKEWGSLENLLKNLDQVKPASVREKILAHLEDLKLSRELVRVRTDLPLEVDFRGRREPDWEGLKAFLERLELGSLLHEFGLLESPLPAEEAPWPPPEGAFLGYRLSRPEPMWAELLALAASAQGRVYRAEDPHGALRGLKEVRGLLAKDLAVVALREGLDLPPTDDPMLLAYLLDSSNTTPEGVARRYGGEWTEDAGERALLAERLHANLLGRLQGEERLLWLYEEVEKPLSRVLAHMEATGVKLDVAYLEALSLEVAAELRRLEEEVFRLAGHSFNLNSRDQLERVLFDELGLPPIGKTEKTGKRSTSAAVLEALREVHPIVDKILQYRELAKLKGTYIDRLPALVHPKTGRLHTRFNQTATATGRLSSSDPNLQNIPVRTPLGQKIRKAFVAEEGWRLVALDYSQIELRVLAHLSGDENLIRVFQEGRDIHTQTASWMFGLSAEAIDPLMRRAAKTINFGVLYGMSAHRLSQELGIPYEEAAAFIQRYFQSYPKVKAWIEKTLEEGRTRGYVETLFGRRRYVPDLNARVKSVREAAERMAFNMPVQGTAADLMKLAMVRLFPQLREVGARMLLQVHDELLLEAPKERAEEVAALAKEVMEGVWPLAVPLEVEVGIGEDWLAAKG

SEQ ID NO: 467 - DNA, 2529 bp, synthetic construct
  misc_feature 1..2529: note = Variant of DNA polymerase I from Thermus sp. strain 2.9
  source 1..2529: mol_type = other DNA
atgcaccatcatcatcatcatggcggtagcggcatgttaccgttgttcgaacctaaaggtcgcgtgcttctggttgatggccatcatctcgcgtatcgtaacttctttgccctgaaaggattaaccaccagccgtggcgagccggtacagggtgtctacggctttgcaaagtcgctcctgaaagctctgaaagaagacggtgatgtggtgattgttgtctttgatgcgaaagcgccaagttttcgccacgaagcgtacgaagcttacaaagccgggcgtgctccaacgccggaagactttcctcgccaattggcgcttatgaaggaattagtggatttgcttggcctcgaacgcttggaagttcccggtttcgaggcagacgacgtattagcgactctcgcaaagaaagccgaacgtgagggctatgaagtccatatcttgacagcagatcgcgatcttttccagcttttatctccgcgcatttccgtgttacacccggaagggcatcgtatcaccccggaatggctctgggagaaatatggtttgcgtcccgaacaatgggtggattttcgcgccttagcgggcgatccgagcgacaatattccgggagttaaaggtatcggcgagaagacggcgctcaagctccttaaagaatgggggtcgttggagaacttgcttaagaatttagatcaggtcaaaccagcttcagtgcgtgagaagattcttgcacacctcgaagacctcaaattaagccgcgaattgtcgcgtgtacgcaccgatttgccgctcgaagttgatttccgtggccgccgcgaacctgactgggagggtcttaaagcgtttttagagcgtcttgaactgggttcgctcttgcatgaattcggccttttagaaagcccgttaccagccgaagaagcaccttggccaccgcccgaaggcgcgtttttaggttaccgtttgagtcgcccggaaccgatgtgggccgaattattggctcttgcagcgtctgcccagggacgtgtgtatcgcgcggaagaccctcatggtgcgctccgtggcctcaaagaagtccgtggactccttgccaaagacttagctgttgttgcattgcgcgaaggtcttgatttacctccgactgatgatccaatgcttcttgcgtacctcttggactcgtcaaacacgacgcccgaaggcgtagcccgtcgttacggcggcgagtggaccgaagatgcaggtgagcgcgcgttattggccgaacgtttgcacgccaatttattaggacgtttgcaaggcgaggaacgtctcctctggctttacgaagaagtggagaaaccattgagtcgcgtgctcgcgcatatggaagctaccggtgtcaaattagacgtggcgtatttggaggcactcagccttgaagccgctgccgaaatgcgccgcttggaggaagaagtattccgtttagcaggccactcctttaaccttaattctcgcgatcagttagaacgtgtgttgttcgatgaacttggtctccctcctatcggcaagacagagaagaccggtaaacgtagcacttcagcggcggttttagaagctcttcgcgaagtccatcccattgtggacaagatcttgcagtaccgcgaactcgcgaaattgaaaggcacctatattgaccctcttccggcattagtccacccgaaaacgggacgcctccatacccgcttcaaccaaacagccacggcgaccggtcgtttgtcctcctctgatccaaaccttcagaatattccagtacgtaccccattgggccagcatatccgcaaagcgtttgtagctgaggagggttggcgtttagtggccctcgattatagccaaattgaattacgtgtccttgcccatctttctggcgatgagaacctcatccgcgtgtttcaggaaggccgcgacattcacactcaaacggcaagctggatgtttggagtgtcagcggaagcgatcgatcctttgatgcgtcgtgcagcgaagaccatcaatttcggtgttctctacggtatgagtgcccatcgtttgtcgcaggaattaggcattccctatgaagaagctgcggcgttcattcagcgctactttcaaagctatcccaaagttaaagcatggatcgagaagactctcgaagaaggccgcacacgtggttacgtagagaccttatttggacgtcgccgctatgttcccgatttaaatgctcgcgtgaaatctgtccgtgaagccgccgaacgcatggcgttcaacatgcctgtacagggcacggcagctgacctcatgaaacttgcaatggtgcgcctttttccacaattgcgtgaagttggtgcccgcatgctcttgcaggtccacgatgaactcttgttagaagcgccaaaagagcgtgcggaagaggtggcagccctcgcgaaagaggttatggaaggcgtgtggcccttagcggtgcctcttgaagtcgaagttggtattggcgaggattggttggctgccaaaggataatga

SEQ ID NO: 468 - protein, 841 aa, synthetic construct
  REGION 1..841: note = Variant of DNA polymerase I from Thermus sp. strain 2.9
MHHHHHHGGSGMLPLFEPKGRVLLVDGHHLAYRNFFALKGLTTSRGEPVQGVYGFAKSLLKALKEDGDVVIVVFDAKAPSFRHEAYEAYKAGRAPTPEDFPRQLALMKELVDLLGLERLEVPGFEADDVLATLAKKAEREGYEVHILTADRDLFQLLSPRISVLHPEGHRITPEWLWEKYGLRPEQWVDFRALAGDPSDNIPGVKGIGEKTALKLLKEWGSLENLLKNLDQVKPASVREKILAHLEDLKLSRELSRVRTDLPLEVDFRGRREPDWEGLKAFLERLELGSLLHEFGLLESPLPAEEAPWPPPEGAFLGYRLSRPEPMWAELLALAASAQGRVYRAEDPHGALRGLKEVRGLLAKDLAVVALREGLDLPPTDDPMLLAYLLDSSNTTPEGVARRYGGEWTEDAGERALLAERLHANLLGRLQGEERLLWLYEEVEKPLSRVLAHMEATGVKLDVAYLEALSLEAAAEMRRLEEEVFRLAGHSFNLNSRDQLERVLFDELGLPPIGKTEKTGKRSTSAAVLEALREVHPIVDKILQYRELAKLKGTYIDPLPALVHPKTGRLHTRFNQTATATGRLSSSDPNLQNIPVRTPLGQHIRKAFVAEEGWRLVALDYSQIELRVLAHLSGDENLIRVFQEGRDIHTQTASWMFGVSAEAIDPLMRRAAKTINFGVLYGMSAHRLSQELGIPYEEAAAFIQRYFQSYPKVKAWIEKTLEEGRTRGYVETLFGRRRYVPDLNARVKSVREAAERMAFNMPVQGTAADLMKLAMVRLFPQLREVGARMLLQVHDELLLEAPKERAEEVAALAKEVMEGVWPLAVPLEVEVGIGEDWLAAKG

SEQ ID NO: 469 - DNA, 2529 bp, synthetic construct
  misc_feature 1..2529: note = Variant of DNA polymerase I from Thermus sp. strain 2.9
  source 1..2529: mol_type = other DNA
atgcaccatcatcatcatcatggcggtagcggcatgttaccgttgttcgaacctaaaggtcgcgtgcttctggttgatggccatcatctcgcgtatcgtaacttctttgccctgaaaggattaaccaccagccgtggcgagccggtacagggtgtctacggctttgcaaagtcgctcctgaaagctctgaaagaagacggtgatgtggtgattgttgtctttgatgcgaaagcgccaagttttcgccacgaagcgtacgaagcttacaaagccgggcgtgctccaacgccggaagactttcctcgccaattggcgcttatgaaggaattagtggatttgcttggcctcgaacgcttggaagttcccggtttcgaggcagacgacgtattagcgactctcgcaaagaaagccgaacgtgagggctatgaagtccagatcttgacagcagatcgcgatcttttccagcttttatctccgcgcatttccgtgttacacccggaagggcatctgatcaccccggaatggctctgggagaaatatggtttgcgtcccgaacaatgggtggattttcgcgccttagcgggcgatccgagcgacaatattccgggagttaaaggtatcggcgagaagacggcgctcaagctccttaaagaatgggggtcgttggagaacttgcttaagaatttagatcaggtcaaaccagcttcagtgcgtgagaagattcttgcacacctcgaagacctcaaattaagccgcgaattgtcccgtgtacgcaccgatttgccgctcgaagttgatttccgtcgccgccgcgaacctgactgggagggtcttaaagcgtttttagagcgtcttgaatttggttcgctcttgcatgaattcggccttttagaaagcccgttaccagccgaagaagcaccttggccaccgcccgaaggcgcgtttttaggttaccgtttgagtcgcccggaaccgatgtgggccgaattattggctcttgcagcgtctgcccagggacgtgtgtatcgcgcggaagaccctcatggtgcgctccgtggcctcaaagaagtccgtggactccttgccaaagacttagctgttgttgcattgcgcgaaggtcttgatttacctccgactgatgatccaatgcttcttgcgtacctcttggacccgtcaaacacgacgcccgaaggcgtagcccgtcgttacggcggcgagtggaccgaagatgcaggtgagcgcgcgttattggccgaacgtttgcacgccaatttattaggacgtttgcaaggcgaggaacgtctcctctggctttacgaagaagtggagaaaccattgagtcgcgtgctcgcgcatatggaagctaccggtgtcaaattagacgtggcgtatttggaggcactcagccttgaagttgctgccgaaattcgccgcttggaggaagaagtattccgtttagcaggccactcctttaaccttaattctcgcgatcagttagaacgtgtgttgttcgatgaacttggtctccctcctatcggcaagacagagaagaccggtaaacgtagcacttcagcggcggttttagaagctcttcgcgaagtccatcccattgtggacaagatcttgcagtaccgcgaactcgcgaaattgaaaggcacctatattgaccctcttccggcattagtccacccgaaaacgggacgcctccatacccgcttcaaccaaacagccacggcgaccggtcgtttgtcctcctctgatccaaaccttcagaatattccagtacgtaccccattgggccagaagatccgcaaagcgtttgtagctgaggagggttggcgtttagtggccctcgattatagccaaattgaattacgtgtccttgcccatctttctggcgatgagaacctcatccgcgtgtttcaggaaggcaaagacattcacactcaaacggcaagctggatgtttggattatcagctgaagcgatcgatcctttgatgcgtcgtgcagcgaagaccatcaatttcggtgttctctacggtatgagtgcccatcgtttgtcgcaggaattaggcattccctatgaagaagctgcggcgttcattcagcgctactttcaaagctatcccaaagttaaagcatggatcgagaagactctcgaagaaggccgcacacgtggttacgtagagaccttatttggacgtcgccgctatgttcccgatttaaacgctcgcgtgaaatctgtccgtgaagccgccgaacgcatggcgttcaacatgcctgtacagggcacggcagctgacctcatgaaacttgcaatggtgcgcctttttccacaattgcgtgaagttggtgcccgcatgctcttgcaggtccacgatgaactcttgttagaagcgccaaaagagcgtgcggaagaggtggcagccctcgcgaaagaggttatggaaggcgtgtggcccttagcggtgcctcttgaagtcgaagttggtattggcgaggattggttggctgccaaaggataatga

SEQ ID NO: 470 - protein, 841 aa, synthetic construct
  REGION 1..841: note = Variant of DNA polymerase I from Thermus sp. strain 2.9
MHHHHHHGGSGMLPLFEPKGRVLLVDGHHLAYRNFFALKGLTTSRGEPVQGVYGFAKSLLKALKEDGDVVIVVFDAKAPSFRHEAYEAYKAGRAPTPEDFPRQLALMKELVDLLGLERLEVPGFEADDVLATLAKKAEREGYEVQILTADRDLFQLLSPRISVLHPEGHLITPEWLWEKYGLRPEQWVDFRALAGDPSDNIPGVKGIGEKTALKLLKEWGSLENLLKNLDQVKPASVREKILAHLEDLKLSRELSRVRTDLPLEVDFRRRREPDWEGLKAFLERLEFGSLLHEFGLLESPLPAEEAPWPPPEGAFLGYRLSRPEPMWAELLALAASAQGRVYRAEDPHGALRGLKEVRGLLAKDLAVVALREGLDLPPTDDPMLLAYLLDPSNTTPEGVARRYGGEWTEDAGERALLAERLHANLLGRLQGEERLLWLYEEVEKPLSRVLAHMEATGVKLDVAYLEALSLEVAAEIRRLEEEVFRLAGHSFNLNSRDQLERVLFDELGLPPIGKTEKTGKRSTSAAVLEALREVHPIVDKILQYRELAKLKGTYIDPLPALVHPKTGRLHTRFNQTATATGRLSSSDPNLQNIPVRTPLGQKIRKAFVAEEGWRLVALDYSQIELRVLAHLSGDENLIRVFQEGKDIHTQTASWMFGLSAEAIDPLMRRAAKTINFGVLYGMSAHRLSQELGIPYEEAAAFIQRYFQSYPKVKAWIEKTLEEGRTRGYVETLFGRRRYVPDLNARVKSVREAAERMAFNMPVQGTAADLMKLAMVRLFPQLREVGARMLLQVHDELLLEAPKERAEEVAALAKEVMEGVWPLAVPLEVEVGIGEDWLAAKG

SEQ ID NO: 471 - DNA, 2529 bp, synthetic construct
  misc_feature 1..2529: note = Variant of DNA polymerase I from Thermus sp. strain 2.9
  source 1..2529: mol_type = other DNA
atgcaccatcatcatcatcatggcggtagcggcatgttaccgttgttcgaacctaaaggtcgcgtgcttctggttgatggccatcatctcgcgtatcgtaacttctttgccctgaaaggattaaccaccagccgtggcgagccggtacagggtgtctacggctttgcaaagtcgctcctgaaagctctgaaagaagacggtgatgtggtgattgttgtctttgatgcgaaagcgccaagttttcgccacgaagcgtacgaagcttacaaagccgggcgtgctccaacgccggaagactttcctcgccaattggcgcttatgaaggaattagtggatttgcttggcctcgaacgcttggaagttcccggtttcgaggcagacgacgtattagcgactctcgcaaagaaagccgaacgtgagggctatgaagtccagatcttgacagcagatcgcgatcttttccagcttttatctccgcgcatttccgtgttacacccggaagggcatcgtatcaccccggaatggctctgggagaaatatggtttgcgtcccgaacaatgggtggattttcgcgccttagcgggcgatccgagcgacaatattccgggagttaaaggtatcggcgagaagacggcgctcaagctccttaaagaatgggggtcgttggagaacttgcttaagaatttagatcaggtcaaaccagcttcagtgcgtgagaagattcttgcacacctcgaagacctcaaattaagccgcgaattgtcgcgtgtacgcaccgatttgccgctcgaagttgatttccgtggccgccgcgaacctgactgggagggtcttaaagcgtttttagagcgtcttgaatttggttcgctcttgcatgaattcggccttttagaaagcccgttaccagccgaagaagcaccttggccaccgcccgaaggcgcgtttttaggttaccgtttgagtcgcccggaaccgatgtgggccgaattattggctcttgcagcgtctgcccagggacgtgtgtatcgcgcggaagaccctcatggtgcgctccgtggcctcaaagaagtccgtggactccttgccaaagacttagctgttgttgcattgcgcgaaggtcttgatttacctccgactgatgatccaatgcttcttgcgtacctcttggacccgtcaaacacgacgcccgaaggcgtagcccgtcgttacggcggcgagtggaccgaagatgcaggtgagcgcgcgttattggccgaacgtttgcacgccaatttattaggacgtttgcaaggcgaggaacgtctcctctggctttacgaagaagtggagaaaccattgagtcgcgtgctcgcgcatatggaagctaccggtgtcaaattagacgtggcgtatttggaggcactcagccttgaagccgctgccgaaatgcgccgcttggaggaagaagtattccgtttagcaggccactcctttaaccttaattctcgcgatcagttagaacgtgtgttgttcgatgaacttggtctccctcctatcggtaagacagagaagaccggtaaacgtagcacttcagcggcggttttagaagctcttcgcgaagtccatcccattgtggacaagatcttgcagtaccgcgaactcgcgaaattgaaaggcacctatattgaccctcttccggcattagtccacccgaaaacgggacgcctccatacccgcttcaaccaaacagccacggcgaccggtcgtttgtcctcctctgatccaaaccttcagaatattccagtacgtaccccattgggccagaagatccgcaaagcgtttgtagctgaggagggttggcgtttagtggccctcgattatagccaaattgaattacgtgtccttgcccatctttctggcgatgagaacctcatccgcgtgtttcaggaaggccgcgacattcacactcaaacggcaagctggatgtttggactgtcagcggaagcgatcgatcctttgatgcgtcgtgcagcgaagaccatcaatttcggtgttctctacggtatgagtgcccatcgtttgtcgcaggaattaggcattccctatgaagaagctgcggcgttcattcagcgctactttcaaagctatcccaaagttaaagcatggatcgagaagactctcgaagaaggccgcacacgtggttacgtagagaccttatttggacgtcgccgctatgttcccgatttaaacgctcgcgtgaaatctgtccgtgaagccgccgaacgcatggcgtggaacatgcctgtacagggcacggcagctgacctcatgaaacttgcaatggtgcgcctttttccacaattgcgtgaagttggtgcccgcatgctcttgcaggtccacgatgaactcttgttagaagcgccaaaagagcgtgcggaagaggtggcagccctcgcgaaagaggttatggaaggcgtgtggcccttagcggtgcctcttgaagtcgaagttggtattggcgaggattggttggctgccaaaggataatga

SEQ ID NO: 472 - protein, 841 aa, synthetic construct
  REGION 1..841: note = Variant of DNA polymerase I from Thermus sp. strain 2.9
MHHHHHHGGSGMLPLFEPKGRVLLVDGHHLAYRNFFALKGLTTSRGEPVQGVYGFAKSLLKALKEDGDVVIVVFDAKAPSFRHEAYEAYKAGRAPTPEDFPRQLALMKELVDLLGLERLEVPGFEADDVLATLAKKAEREGYEVQILTADRDLFQLLSPRISVLHPEGHRITPEWLWEKYGLRPEQWVDFRALAGDPSDNIPGVKGIGEKTALKLLKEWGSLENLLKNLDQVKPASVREKILAHLEDLKLSRELSRVRTDLPLEVDFRGRREPDWEGLKAFLERLEFGSLLHEFGLLESPLPAEEAPWPPPEGAFLGYRLSRPEPMWAELLALAASAQGRVYRAEDPHGALRGLKEVRGLLAKDLAVVALREGLDLPPTDDPMLLAYLLDPSNTTPEGVARRYGGEWTEDAGERALLAERLHANLLGRLQGEERLLWLYEEVEKPLSRVLAHMEATGVKLDVAYLEALSLEAAAEMRRLEEEVFRLAGHSFNLNSRDQLERVLFDELGLPPIGKTEKTGKRSTSAAVLEALREVHPIVDKILQYRELAKLKGTYIDPLPALVHPKTGRLHTRFNQTATATGRLSSSDPNLQNIPVRTPLGQKIRKAFVAEEGWRLVALDYSQIELRVLAHLSGDENLIRVFQEGRDIHTQTASWMFGLSAEAIDPLMRRAAKTINFGVLYGMSAHRLSQELGIPYEEAAAFIQRYFQSYPKVKAWIEKTLEEGRTRGYVETLFGRRRYVPDLNARVKSVREAAERMAWNMPVQGTAADLMKLAMVRLFPQLREVGARMLLQVHDELLLEAPKERAEEVAALAKEVMEGVWPLAVPLEVEVGIGEDWLAAKG

SEQ ID NO: 473 - DNA, 2529 bp, synthetic construct
  misc_feature 1..2529: note = Variant of DNA polymerase I from Thermus sp. strain 2.9
  source 1..2529: mol_type = other DNA
atgcaccatcatcatcatcatggcggtagcggcatgttaccgttgttcgaacctaaaggtcgcgtgcttctggttgatggccatcatctcgcgtatcgtaacttctttgccctgaaaggattaaccaccagccgtggcgagccggtacagggtgtctacggctttgcaaagtcgctcctgaaagctctgaaagaagacggtgatgtggtgattgttgtctttgatgcgaaagcgccaagttttcgccacgaagcgtacgaagcttacaaagccgggcgtgctccaacgccggaagactttcctcgccaattggcgcttatgaaggaattagtggatttgcttggcctcgaacgcttggaagttcccggtttcgaggcagacgacgtattagcgactctcgcaaagaaagccgaacgtgagggctatgaagtccagatcttgacagcagatcgcgatcttttccagcttttatctccgcgcatcgcggtgttacacccggaagggcatcgtatcaccccggaatggctctgggagaaatatggtttgcgtcccgaacaatgggtggattttcgcgccttagcgggcgatccgagcgacaatattccgggagttaaaggtatcggcgagaagacggcgctcaagctccttaaagaatgggggtcgttggagaacttgcttaagaatttagatcaggtcaaaccagcttcagtgcgtgagaagattcttgcacacctcgaagacctcaaattaagccgcgaattgtcccgtgtacgcaccgatttgccgctcgaagttgatttccgtcgccgccgcgaacctgactgggagggtcttaaagcgtttttagagcgtcttgaatttggttcgctcttgcatgaattcggccttttagaaagcccgttaccagccgaagaagcaccttggccaccgcccgaaggcgcgtttttaggttaccgtttgagtcgcccggaaccgatgtgggccgaattattggctcttgcagcgtctgcccagggacgtgtgtatcgcgcggaagaccctcatggtgcgctcaaaggcctcaaagaagtccgtggactccttgccaaagacttagctgttgttgcattgcgcgaaggtcttgatttacctccgactgatgatccaatgcttcttgcgtacctcttggacccgtcaaacacgacgcccgaaggcgtagcccgtcgttacggcggcgagtggaccgaagatgcagccgagcgcgcgttattggccgaacgtttgcacgccaatttattaggacgtttgcaaggcgaggaacgtctcctctggctttacgaagaagtggagaaaccattgagtcgcgtgctcgcgcatatggaagctaccggtgtcaaattagacgtggcgtatttggaggcactcagccttgaagttgctgccgaaattcgccgcttggaggaagaagtattccgtttagcaggccactcctttaaccttaattctcgcgatcagttagaacgtgtgttgttcgatgaacttggtctccctcctatcggcaagacagagaagaccggtaaacgtagcacttcagcggcggttttagaagctcttcgcgaagtccatcccattgtggacaagatcttgcagtaccgcgaactcgcgaaattgaaaggcacctatattgaccctcttccggcattagtccacccgaaaacgggacgcctccatacccgcttcaaccaaacagccacggcgaccggtcgtttgtcctcctctgatccaaaccttcagaatattccagtacgtaccccattgggccagaagatccgccgcgcgtttgtagctgaggagggttggcgtttagtggccctcgattatagccaaattgaattacgtgtccttgcccatctttctggcgatgagaacctcatccgcgtgtttcaggaaggccgtgacattcacactcaaacggcaagctggatgtttggattatcagctgaagcgatcgatcctttgatgcgtcgtgcagcgaagaccatcaatttcggtgttctctacggtatgagtgcccatcgtttgtcgcaggaattaggcattccctatgaagaagctgcggcgttcattcagcgctactttcaaagctatcccaaagttaaagcatggatcgagaagactctcgaagaaggccgcacacgtggttacgtagagaccttatttggacgtcgccgctatgttcccgatttaaacgctcgcgtgaaatctgtccgtgaagccgccgaacgcatggcgttcaacatgcctgtacagggcacggcagctgacctcatgaaacttgcaatggtgcgcctttttccacaattgcgtgaagttggtgcccgcatgctcttgcaggtccacgatgaactcttgttagaagcgccaaaagagcgtgcggaagaggtggcagccctcgcgaaagaggttatggaaggcgtgtggcccttagcggtgcctcttgaagtcgaagttggtattggcgaggattggttggctgccaaaggataatga

SEQ ID NO: 474 - protein, 841 aa, synthetic construct
  REGION 1..841: note = Variant of DNA polymerase I from Thermus sp. strain 2.9
MHHHHHHGGSGMLPLFEPKGRVLLVDGHHLAYRNFFALKGLTTSRGEPVQGVYGFAKSLLKALKEDGDVVIVVFDAKAPSFRHEAYEAYKAGRAPTPEDFPRQLALMKELVDLLGLERLEVPGFEADDVLATLAKKAEREGYEVQILTADRDLFQLLSPRIAVLHPEGHRITPEWLWEKYGLRPEQWVDFRALAGDPSDNIPGVKGIGEKTALKLLKEWGSLENLLKNLDQVKPASVREKILAHLEDLKLSRELSRVRTDLPLEVDFRRRREPDWEGLKAFLERLEFGSLLHEFGLLESPLPAEEAPWPPPEGAFLGYRLSRPEPMWAELLALAASAQGRVYRAEDPHGALKGLKEVRGLLAKDLAVVALREGLDLPPTDDPMLLAYLLDPSNTTPEGVARRYGGEWTEDAAERALLAERLHANLLGRLQGEERLLWLYEEVEKPLSRVLAHMEATGVKLDVAYLEALSLEVAAEIRRLEEEVFRLAGHSFNLNSRDQLERVLFDELGLPPIGKTEKTGKRSTSAAVLEALREVHPIVDKILQYRELAKLKGTYIDPLPALVHPKTGRLHTRFNQTATATGRLSSSDPNLQNIPVRTPLGQKIRRAFVAEEGWRLVALDYSQIELRVLAHLSGDENLIRVFQEGRDIHTQTASWMFGLSAEAIDPLMRRAAKTINFGVLYGMSAHRLSQELGIPYEEAAAFIQRYFQSYPKVKAWIEKTLEEGRTRGYVETLFGRRRYVPDLNARVKSVREAAERMAFNMPVQGTAADLMKLAMVRLFPQLREVGARMLLQVHDELLLEAPKERAEEVAALAKEVMEGVWPLAVPLEVEVGIGEDWLAAKG

SEQ ID NO: 475 - DNA, 2529 bp, synthetic construct
  misc_feature 1..2529: note = Variant of DNA polymerase I from Thermus sp. strain 2.9
  source 1..2529: mol_type = other DNA
atgcaccatcatcatcatcatggcggtagcggcatgttaccgttgttcgaacctaaaggtcgcgtgcttctggttgatggccatcatctcgcgtatcgtaacttctttgccctgaaaggattaaccaccagccgtggcgagccggtacagggtgtctacggctttgcaaagtcgctcctgaaagctctgaaagaagacggtgatgtggtgattgttgtctttgatgcgaaagcgccaagttttcgccacgaagcgtacgaagcttacaaagccgggcgtgctccaacgccggaagactttcctcgccaattggcgcttatgaaggaattagtggatttgcttggcctcgaacgcttggaagttcccggtttcgaggcagacgacgtattagcgactctcgcaaagaaagccgaacgtgagggctatgaagtccatatcttgacagcagatcgcgatcttttccagcttttatctccgcgcatttccgtgttacacccggaagggcatcgtatcaccccggaatggctctgggagaaatatggtttgcgtcccgaacaatgggtggattttcgcgccttagcgggcgatccgagcgacaatattccgggagttaaaggtatcggcgagaagacggcgctcaagctccttaaagaatgggggtcgttggagaacttgcttaagaatttagatcaggtcaaaccagcttcagtgcgtgagaagattcttgcacacctcgaagacctcaaattaagccgcgaattggtccgtgtacgcaccgatttgccgctcgaagttgatttccgtggccgccgcgaacctgactgggagggtcttaaagcgtttttagagcgtcttgaatttggttcgctcttgcatgaattcggccttttagaaagcccgttaccagccgaagaagcaccttggccaccgcccgaaggcgcgtttttaggttaccgtttgagtcgcccggaaccgatgtgggccgaattattggctcttgcagcgtctgcccagggacgtgtgtatcgcgcggaagaccctcatggtgcgctccgtggcctcaaagaagtccgtggactccttgccaaagacttagctgttgttgcattgcgcgaaggtcttgatttacctccgactgatgatccaatgcttcttgcgtacctcttggactcgtcaaacacgacgcccgaacgcgtagcccgtcgttacggcggcgagtggaccgaagatgcaggtgagcgcgcgttattggccgaacgtttgcacgccaatttattaggacgtttgcaaggcgaggaacgtctcctctggctttacgaagaagtggagaaaccattgagtcgcgtgctcgcgcatatggaagctaccggtgtcaaattagacgtggcgtatttggaggcactcagccttgaagccgctgccgaactgcgccgcttggaggaagaagtattccgtttagcaggccactcctttaaccttaattctcgcgatcagttagaacgtgtgttgttcgatgaacttggtctccctcctatcaccaagacagagaagaccggtaaacgtagcacttcagcggcggttttagaagctcttcgcgaagtccatcccattgtggacaagatcttgcagtaccgcgaactcgcgaaattgaaaggcacctatattgaccgtcttccggcattagtccacccgaaaacgggacgcctccatacccgcttcaaccaaacagccacggcgaccggtcgtttgtcctcctctgatccaaaccttcagaatattccagtacgtaccccattgggccagcatatccgcaaagcgtttgtagctgaggagggttggcgtttagtggccctcgattatagccaaattgaattacgtgtccttgcccatctttctggcgatgagaacctcatccgcgtgtttcaggaaggccgcgacattcacactcaaacggcaagctggatgtttggactgtcatcggaagcgatcgatcctttgatgcgtcgtgcagcgaagaccatcaatttcggtgttctctacggtatgagtgcccatcgtttgtcgcaggaattaggcattccctatgaagaagctgcggcgttcattcagcgctactttcaaagctatcccaaagttaaagcatggatcgagaagactctcgaagaaggccgcacacgtggttacgtagagaccttatttggacgtcgccgctatgttcccgatttaaatgctcgcgtgaaatctgtccgtgaagccgccgaacgcatggcgttcaacatgcctgtacagggcacggcagctgacctcatgaaacttgcaatggtgcgcctttttccacaattgcgtgaagttggtgcccgcatgctcttgcaggtccacgatgaactcttgttagaagcgccaaaagagcgtgcggaagaggtggcagccctcgcgaaagaggttatggaaggcgtgtggcccttagcggtgcctcttgaagtcgaagttggtattggcgaggattggttggctgccaaaggataatga

SEQ ID NO: 476 - protein, 841 aa, synthetic construct
  REGION 1..841: note = Variant of DNA polymerase I from Thermus sp. strain 2.9
MHHHHHHGGSGMLPLFEPKGRVLLVDGHHLAYRNFFALKGLTTSRGEPVQGVYGFAKSLLKALKEDGDVVIVVFDAKAPSFRHEAYEAYKAGRAPTPEDFPRQLALMKELVDLLGLERLEVPGFEADDVLATLAKKAEREGYEVHILTADRDLFQLLSPRISVLHPEGHRITPEWLWEKYGLRPEQWVDFRALAGDPSDNIPGVKGIGEKTALKLLKEWGSLENLLKNLDQVKPASVREKILAHLEDLKLSRELVRVRTDLPLEVDFRGRREPDWEGLKAFLERLEFGSLLHEFGLLESPLPAEEAPWPPPEGAFLGYRLSRPEPMWAELLALAASAQGRVYRAEDPHGALRGLKEVRGLLAKDLAVVALREGLDLPPTDDPMLLAYLLDSSNTTPERVARRYGGEWTEDAGERALLAERLHANLLGRLQGEERLLWLYEEVEKPLSRVLAHMEATGVKLDVAYLEALSLEAAAELRRLEEEVFRLAGHSFNLNSRDQLERVLFDELGLPPITKTEKTGKRSTSAAVLEALREVHPIVDKILQYRELAKLKGTYIDRLPALVHPKTGRLHTRFNQTATATGRLSSSDPNLQNIPVRTPLGQHIRKAFVAEEGWRLVALDYSQIELRVLAHLSGDENLIRVFQEGRDIHTQTASWMFGLSSEAIDPLMRRAAKTINFGVLYGMSAHRLSQELGIPYEEAAAFIQRYFQSYPKVKAWIEKTLEEGRTRGYVETLFGRRRYVPDLNARVKSVREAAERMAFNMPVQGTAADLMKLAMVRLFPQLREVGARMLLQVHDELLLEAPKERAEEVAALAKEVMEGVWPLAVPLEVEVGIGEDWLAAKG

SEQ ID NO: 477 - DNA, 2529 bp, synthetic construct
  misc_feature 1..2529: note = Variant of DNA polymerase I from Thermus sp. strain 2.9
  source 1..2529: mol_type = other DNA
atgcaccatcatcatcatcatggcggtagcggcatgttaccgttgttcgaacctaaaggtcgcgtgcttctggttgatggccatcatctcgcgtatcgtaacttctttgccctgaaaggattaaccaccagccgtggcgagccggtacagggtgtctacggctttgcaaagtcgctcctgaaagctctgaaagaagacggtgatgtggtgattgttgtctttgatgcgaaagcgccaagttttcgccacgaagcgtacgaagcttacaaagccgggcgtgctccaacgccggaagactttcctcgccaattggcgcttatgaaggaattagtggatttgcttggcctcgaacgcttggaagttcccggtttcgaggcagacgacgtattagcgactctcgcaaagaaagccgaacgtgagggctatgaagtccagatcttgacagcagatcgcgatcttttccagcttttatctccgcgcatttccgtgttacacccggaagggcatcgcatcaccccggaatggctctgggagaaatatggtttgcgtcccgaacaatgggtggattttcgcgccttagcaggcgatccgagcgacaatattccgggagttaaaggtatcggcgagaagacggcgctcaagctccttaaagaatgggggtcgttggagaacttgcttaagaatttagatcaggtcaaaccagagtcagtgcgtgagaagattcttgcacacctcgaagacctccgtttaagcctggaattgtcccgtgtacgcaccgatttgccgctcgaagttgatttccgtggccgccgcgaacctgactgggagggtcttaaagcgtttttagagcgtcttgaatttggttcgctcttgcatgaattcggccttttagaaagcccgttaccagccgaagaagcaccttggccaccgcccgaaggcgcgtttttaggttaccgtttgagtcgcccggaaccgatgtgggccgaattattggctcttgcagcgtctgcccagggacgtgtgtatcgcgcggaagaccctcatggtgcgctccgtggcctcaaagaagtccgtggactccttgccaaagacttagctgttgttgcattgcgcgaaggtcttgatttacctccgactgatgatccaatgcttcttgcgtacctcttggacccgtcaaacacgacgcccgaaggcgtagcccgtcgttacggcggcgagtggaccgaagatgcagccgagcgcgcgttattggccgaacgtttgcacgccaatttattaggacgtttgcaaggcgaggaacgtctcctctggctttacgaagaagtggagaaaccattgagtcgcgtgctcgcgcatatggaagctaccggtgtcaaattagacgtggcgtatttggaggcactcagccttgaagttgctgccgaaatgcgccgcttggaggaagaagtattccgtttagcaggccactcctttaaccttaattctcgcgatcagttagaacgtgtgttgttcgatgaacttggtctccctcctatcggcaagacagagaagaccggtaaacgtagcacttcagcggcggttttagaagctcttcgcgaagtccatcccattgtggacaagatcttgcagtaccgcgaactcgcgaaattgaaaggcacctatattgaccctcttccggcattagtccacccgaaaacgggacgcctccatacccgcttcaaccaaacagccacggcgaccggtcgtttgtcctcctctgatccaaaccttcagaatattccagtacgtaccccattgggccagaagatccgccgcgcgtttgtagctgaggagggttggcgtttagtggccctcgattatagccaaattgaattacgtgtccttgcccatctttctggcgatgagaacctcatccgcgtgtttcaggaaggcaaagacattcacactcaaacggcaagctggatgtttggattatcagctgaagcgatcgatcctttgatgcgtcgtgcagcgaagaccatcaatttcggtgttctctacggtatgagtgcccatcgtttgtcgcaggaattaggcattccctatgaagaagctgtggcgttcattcagcgctactttcaaagctatcccaaagttaaagcatggatcgagaagactctcgaagaaggccgcacacgtggttacgtagagaccttatttggacgtcgccgctatgttcccgatttaaacgctcgcgtgaaatctgtccgtgaagccgccgaacgcatggcgttcaacatgcctgtacagggcacggcagctgacctcatgaaacttgcaatggtgcgcctttttccacaattgcgtgaagttggtgcccgcatgctcttgcaggtccacgatgaactcttgttagaagcgccaaaagagcgtgcggaagaggtggcagccctcgcgaaagaggttatggaaggcgtgtggcccttagcggtgcctcttgaagtcgaagttggtattggcgaggattggttggctgccaaaggataatga

SEQ ID NO: 478 - protein, 841 aa, synthetic construct
  REGION 1..841: note = Variant of DNA polymerase I from Thermus sp. strain 2.9
MHHHHHHGGSGMLPLFEPKGRVLLVDGHHLAYRNFFALKGLTTSRGEPVQGVYGFAKSLLKALKEDGDVVIVVFDAKAPSFRHEAYEAYKAGRAPTPEDFPRQLALMKELVDLLGLERLEVPGFEADDVLATLAKKAEREGYEVQILTADRDLFQLLSPRISVLHPEGHRITPEWLWEKYGLRPEQWVDFRALAGDPSDNIPGVKGIGEKTALKLLKEWGSLENLLKNLDQVKPESVREKILAHLEDLRLSLELSRVRTDLPLEVDFRGRREPDWEGLKAFLERLEFGSLLHEFGLLESPLPAEEAPWPPPEGAFLGYRLSRPEPMWAELLALAASAQGRVYRAEDPHGALRGLKEVRGLLAKDLAVVALREGLDLPPTDDPMLLAYLLDPSNTTPEGVARRYGGEWTEDAAERALLAERLHANLLGRLQGEERLLWLYEEVEKPLSRVLAHMEATGVKLDVAYLEALSLEVAAEMRRLEEEVFRLAGHSFNLNSRDQLERVLFDELGLPPIGKTEKTGKRSTSAAVLEALREVHPIVDKILQYRELAKLKGTYIDPLPALVHPKTGRLHTRFNQTATATGRLSSSDPNLQNIPVRTPLGQKIRRAFVAEEGWRLVALDYSQIELRVLAHLSGDENLIRVFQEGKDIHTQTASWMFGLSAEAIDPLMRRAAKTINFGVLYGMSAHRLSQELGIPYEEAVAFIQRYFQSYPKVKAWIEKTLEEGRTRGYVETLFGRRRYVPDLNARVKSVREAAERMAFNMPVQGTAADLMKLAMVRLFPQLREVGARMLLQVHDELLLEAPKERAEEVAALAKEVMEGVWPLAVPLEVEVGIGEDWLAAKG

SEQ ID NO: 479 - DNA, 2529 bp, synthetic construct
  misc_feature 1..2529: note = Variant of DNA polymerase I from Thermus sp. strain 2.9
  source 1..2529: mol_type = other DNA
atgcaccatcatcatcatcatggcggtagcggcatgttaccgttgttcgaacctaaaggtcgcgtgcttctggttgatggccatcatctcgcgtatcgtaacttctttgccctgaaaggattaaccaccagccgtggcgagccggtacagggtgtctacggctttgcaaagtcgctcctgaaagctctgaaagaagacggtgatgtggtgattgttgtctttgatgcgaaagcgccaagttttcgccacgaagcgtacgaagcttacaaagccgggcgtgctccaacgccggaagactttcctcgccaattggcgcttatgaaggaattagtggatttgcttggcctcgaacgcttggaagttcccggtttcgaggcagacgacgtattagcgactctcgcaaagaaagccgaacgtgagggctatgaagtccagatcttgacagcagatcgcgatcttttccagcttttatctccgcgcatttccgtgttacacccggaagggcatcgtatcaccccggaatggctctgggagaaatatggtttgcgtcccgaacaatgggtggattttcgcgccttagcgggcgatccgagcgacaatattccgggagttaaaggtatcggcgagaagacggcgctcaagctccttaaagaatgggggtcgttggagaacttgcttaagaatttagatcaggtcaaaccagcttcagtgcgtgagaagattcttgcacacctcgaagacctcaaattaagccgcgaattgtcccgtgtacgcaccgatttgccgctcgaagttgatttccgtggccgccgcgaacctgactgggagggtcttaaagcgtttttagagcgtcttgaatttggttcgctcttgcatgaattcggccttttagaaagcccgttaccagccgaagaagcaccttggccaccgcccgaaggcgcgtttttaggttaccgtttgagtcgcccggaaccgatgtgggccgaattattggctcttgcagcgtctgcccagggacgtgtgtatcgcgcggaagaccctcatggtgcgctccgtggcctcaaagaagtccgtggactccttgccaaagacttagctgttgttgcattgcgcgaaggtcttgatttacctccgactgatgatccaatgcttcttgcgtacctcttggacccgtcaaacacgacgcccgaaggcgtagcccgtcgttacggcggcgagtggaccgaagatgcaggtgagcgcgcgttattggccgaacgtttgcacgccaatttattaggacgtttgcaaggcgaggaacgttacctctggctttacgaagaagtggagaaaccattgagtcgcgtgctcgcgcatatggaagctaccggtgtcaaattagacgtggcgtatttggaggcactcagccttgaagttgctgccgaaatgcgccgcttggaggaagaagtattccgtttagcaggccactcctttaaccttaattctcgcgatcagttagaacgtgtgttgttcgatgaacttggtctccctcctatcggcaagacagagaagaccggtaaacgtagcacttcagcggcggttttagaagctcttcgcgaagtccatcccattgtggacaagatcttgcagtaccgcgaactcgcgaaattgaaaggcacctatattgaccctcttccggcattagtccacccgaaaacgggacgcctccatacccgcttcaaccaaacagccacggcgaccggtcgtttgtcctcctctgatccaaaccttcagaatattccagtacgtaccccattgggccagaagatccgcaaagcgtttgtagctgaggagggttggcgtttagtggccctcgattatagccaaattgaattacgtgtccttgcccatctttctggcgatgagaacctcatccgcgtgtttcaggaaggccgcgacattcacactcaaacggcaagctggatgtttggattatcagctgaagcgatcgatcctttgatgcgtcgtgcagcgaagaccatcaatttcggtgttctctacggtatgagtgcccatcgtttgtcgcaggaattaggcattccctatgaagaagctgcggcgttcattcagcgctactttcaaagctatcccaaagttaaagcatggatcgagaagactctcgaagaaggccgcacacgtggttacgtagagaccttatttggacgtcgccgctatgttcccgatttaaacgctcgcgtgaaatctgtccgtgaagccgccgaacgcatggcgttcaacatgcctgtacagggcacggcagctgacctcatgaaacttgcaatggtgcgcctttttccacaattgcgtgaagttggtgcccgcatgctcttgcaggtccacgatgaactcttgttagaagcgccaaaagagcgtgcggaagaggtggcagccctcgcgaaagaggttatggaaggcgtgtggcccttagcggtgcctcttgaagtcgaagttggtattggcgaggattggttggctgccaaaggataatga

SEQ ID NO: 480 - protein, 841 aa, synthetic construct
  REGION 1..841: note = Variant of DNA polymerase I from Thermus sp. strain 2.9
MHHHHHHGGSGMLPLFEPKGRVLLVDGHHLAYRNFFALKGLTTSRGEPVQGVYGFAKSLLKALKEDGDVVIVVFDAKAPSFRHEAYEAYKAGRAPTPEDFPRQLALMKELVDLLGLERLEVPGFEADDVLATLAKKAEREGYEVQILTADRDLFQLLSPRISVLHPEGHRITPEWLWEKYGLRPEQWVDFRALAGDPSDNIPGVKGIGEKTALKLLKEWGSLENLLKNLDQVKPASVREKILAHLEDLKLSRELSRVRTDLPLEVDFRGRREPDWEGLKAFLERLEFGSLLHEFGLLESPLPAEEAPWPPPEGAFLGYRLSRPEPMWAELLALAASAQGRVYRAEDPHGALRGLKEVRGLLAKDLAVVALREGLDLPPTDDPMLLAYLLDPSNTTPEGVARRYGGEWTEDAGERALLAERLHANLLGRLQGEERYLWLYEEVEKPLSRVLAHMEATGVKLDVAYLEALSLEVAAEMRRLEEEVFRLAGHSFNLNSRDQLERVLFDELGLPPIGKTEKTGKRSTSAAVLEALREVHPIVDKILQYRELAKLKGTYIDPLPALVHPKTGRLHTRFNQTATATGRLSSSDPNLQNIPVRTPLGQKIRKAFVAEEGWRLVALDYSQIELRVLAHLSGDENLIRVFQEGRDIHTQTASWMFGLSAEAIDPLMRRAAKTINFGVLYGMSAHRLSQELGIPYEEAAAFIQRYFQSYPKVKAWIEKTLEEGRTRGYVETLFGRRRYVPDLNARVKSVREAAERMAFNMPVQGTAADLMKLAMVRLFPQLREVGARMLLQVHDELLLEAPKERAEEVAALAKEVMEGVWPLAVPLEVEVGIGEDWLAAKG

SEQ ID NO: 481 - DNA, 2529 bp, synthetic construct
  misc_feature 1..2529: note = Variant of DNA polymerase I from Thermus sp. strain 2.9
  source 1..2529: mol_type = other DNA
atgcaccatcatcatcatcatggcggtagcggcatgttaccgttgttcgaacctaaaggtcgcgtgcttctggttgatggccatcatctcgcgtatcgtaacttctttgccctgaaaggattaaccaccagccgtggcgagccggtacagggtgtctacggctttgcaaagtcgctcctgaaagctctgaaagaagacggtgatgtggtgattgttgtctttgatgcgaaagcgccaagttttcgccacgaagcgtacgaagcttacaaagccgggcgtgctccaacgccggaagactttcctcgccaattggcgcttatgaaggaattagtggatttgcttggcctcgaacgcttggaagttcccggtttcgaggcagacgacgtattagcgactctcgcaaagaaagccgaacgtgagggctatgaagtccagatcttgacagcagatcgcgatcttttccagcttttatctccgcgcatctcggtgttacacccggaagggcatcgtatcaccccggaatggctctgggagaaatatggtttgcgtcccgaacaatgggtggattttcgcgccttagctggcgatccgagcgacaatattccgggagttaaaggtatcggcgagaagacggcgctcaagctccttaaagaatgggggtcgttggagaacttgcttaagaatttagatcaggtcaaaccagcttcagtgcgtgagaagattcttgcacacctcgaagacctcaaattaagccgcgaattgtcccgtgtacgcaccgatttgccgctcgaagttgatttccgtggccgccgcgaacctgactgggagggtcttaaagcgtttttagagcgtcttgaatttggttcgctcttgcatgaattcggccttttagaaagcccgttaccagccgaagaagcaccttggccaccgcccgaaggcgcgtttttaggttaccgtttgagtcgcccggaaccgatgtgggccgaattattggctcttgcagcgtctgcccagggacgtgtgtatcgcgcggaagaccctcatggtgcgctcaaaggcctcaaagaagtccgtggactccttgccaaagacttagctgttgttgcattgcgcgaaggtcttgatttacctccgactgatgatccaatgcttcttgcgtacctcttggacccgtcaaacacgacgcccgaaggcgtagcccgtcgttacggcggcgagtggaccgaagatgcaggcgagcgcgcgttattggccgaacgtttgcacgccaatttattaggacgtttgcaaggcgaggaacgcctcctctggctttacgaagaagtggagaaaccattgagtcgcgtgctcgcgcatatggaagctaccggtgtcaaattagacgtggcgtatttggaggcactcagccttgaagttgctgccgaaatgcgccgcttggaggaagaagtattccgtttagcaggccactcctttaaccttaattctcgcgatcagttagaacgtgtgttgttcgatgaacttggtctccctcctatcggcaagacagagaagaccggtaaacgtagcacttcagcggcggttttagaagctcttcgcgaagtccatcccattgtggacaagatcttgcagtaccgcgaactcgcgaaattgaaaggcacctatattgaccctcttccggcattagtccacccgaaaacgggacgcctccatacccgcttcaaccaaacagccacggcgaccggtcgtttgtcctcctctgatccaaaccttcagaatattccagtacgtaccccattgggccagaagatccgccgcgcgtttgtagctgaggagggttggcgtttagtggccctcgattatagccaaattgaattacgtgtccttgcccatctttctggcgatgagaacctcatccgcgtgtttcaggaaggcaaagacattcacactcaaacggcaagctggatgtttggattatcagctgaagcgatcgatcctttgatgcgtcgtgcagcgaagaccatcaatttcggtgttctctacggtatgagtgcccatcgtttgtcgcaggaattaggcattccctatgaagaagctgtggcgttcattcagcgctactttcaaagctatcccaaagttaaagcatggatcgagaagactctcgaagaaggccgcacacgtggttacgtagagaccttatttggacgtcgccgctatgttcccgatttaaacgctcgcgtgaaatctgtccgtgaagccgccgaacgcatggcgttcaacatgcctgtacagggcacggcagctgacctcatgaaacttgcaatggtgcgcctttttccacaattgcgtgaagttggtgcccgcatgctcttgcaggtccacgatgaactcttgttagaagcgccaaaagagcgtgcggaagaggtggcagccctcgcgaaagaggttatggaaggcgtgtggcccttagcggtgcctcttgaagtcgaagttggtattggcgaggattggttggctgccaaaggataatga

SEQ ID NO: 482 - protein, 841 aa, synthetic construct
  REGION 1..841: note = Variant of DNA polymerase I from Thermus sp. strain 2.9
MHHHHHHGGSGMLPLFEPKGRVLLVDGHHLAYRNFFALKGLTTSRGEPVQGVYGFAKSLLKALKEDGDVVIVVFDAKAPSFRHEAYEAYKAGRAPTPEDFPRQLALMKELVDLLGLERLEVPGFEADDVLATLAKKAEREGYEVQILTADRDLFQLLSPRISVLHPEGHRITPEWLWEKYGLRPEQWVDFRALAGDPSDNIPGVKGIGEKTALKLLKEWGSLENLLKNLDQVKPASVREKILAHLEDLKLSRELSRVRTDLPLEVDFRGRREPDWEGLKAFLERLEFGSLLHEFGLLESPLPAEEAPWPPPEGAFLGYRLSRPEPMWAELLALAASAQGRVYRAEDPHGALKGLKEVRGLLAKDLAVVALREGLDLPPTDDPMLLAYLLDPSNTTPEGVARRYGGEWTEDAGERALLAERLHANLLGRLQGEERLLWLYEEVEKPLSRVLAHMEATGVKLDVAYLEALSLEVAAEMRRLEEEVFRLAGHSFNLNSRDQLERVLFDELGLPPIGKTEKTGKRSTSAAVLEALREVHPIVDKILQYRELAKLKGTYIDPLPALVHPKTGRLHTRFNQTATATGRLSSSDPNLQNIPVRTPLGQKIRRAFVAEEGWRLVALDYSQIELRVLAHLSGDENLIRVFQEGKDIHTQTASWMFGLSAEAIDPLMRRAAKTINFGVLYGMSAHRLSQELGIPYEEAVAFIQRYFQSYPKVKAWIEKTLEEGRTRGYVETLFGRRRYVPDLNARVKSVREAAERMAFNMPVQGTAADLMKLAMVRLFPQLREVGARMLLQVHDELLLEAPKERAEEVAALAKEVMEGVWPLAVPLEVEVGIGEDWLAAKG

SEQ ID NO: 483 - DNA, 2529 bp, synthetic construct
  misc_feature 1..2529: note = Variant of DNA polymerase I from Thermus sp. strain 2.9
  source 1..2529: mol_type = other DNA
atgcaccatcatcatcatcatggcggtagcggcatgttaccgttgttcgaacctaaaggtcgcgtgcttctggttgatggccatcatctcgcgtatcgtaacttctttgccctgaaaggattaaccaccagccgtggcgagccggtacagggtgtctacggctttgcaaagtcgctcctgaaagctctgaaagaagacggtgatgtggtgattgttgtctttgatgcgaaagcgccaagttttcgccacgaagcgtacgaagcttacaaagccgggcgtgctccaacgccggaagactttcctcgccaattggcgcttatgaaggaattagtggatttgcttggcctcgaacgcttggaagttcccggtttcgaggcagacgacgtattagcgactctcgcaaagaaagccgaacgtgagggctatgaagtccagatcttgacagcagatcgcgatcttttccagcttttatctccgcgcatttccgtgttacacccggaagggcatcgtatcaccccggaatggctctgggagaaatatggtttgcgtcccgaacaatgggtggattttcgcgccttagcgggcgatccgagcgacaatattccgggagttaaaggtatcggcgagaagacggcgctcaagctccttaaagaatgggggtcgttggagaacttgcttaagaatttagatcaggtcaaaccagcttcagtgcgtgagaagattcttgcacacctcgaagacctcaaattaagccgcgaattggtccgtgtacgcaccgatttgccgctcgaagttgatttccgtggccgccgcgaacctgactgggagggtcttaaagcgtttttagagcgtcttgaatttggttcgctcttgcatgaattcggccttttagaaagcccgttaccagccgaagaagcaccttggccaccgcccgaaggcgcgtttttaggttaccgtttgagtcgcccggaaccgatgtgggccgaattattggctcttgcagcgtctgcccagggacgtgtgtatcgcgcggaagaccctcatggtgcgctccgtggcctcaaagaagtccgtggactccttgccaaagacttagctgttgttgcattgcgcgaaggtcttgatttacctccgactgatgatccaatgcttcttgcgtacctcttggactcgtcaaacacgacgcccgaaggcgtagcccgtcgttacggcggcgagtggaccgaagatgcaggtgagcgcgcgttattggccgaacgtttgcacgccaatttattaggacgtttgcaaggcgaggaacgtctcctctggctttacgaagaagtggagaaaccattgagtcgcgtgctcgcgcatatggaagctaccggtgtcaaattagacgtggcgtatttggaggcactcagccttgaagccgctgccgaaatgcgccgcttggaggaagaagtattccgtttagcaggccactcctttaaccttaattctcgcgatcagttagaacgtgtgttgttcgatgaacttggtctccctcctatcggtaagacagagaagaccggtaaacgtagcacttcagcggcggttttagaagctcttcgcgaagtccatcccattgtggacaagatcttgcagtaccgcgaactcgcgaaattgaaaggcacctatattgaccgtcttccggcattagtccacccgaaaacgggacgcctccatacccgcttcaaccaaacagccacggcgaccggtcgtttgtcctcctctgatccaaaccttcagaatattccagtacgtaccccattgggccagaaaatccgcaaagcgtttgtagctgaggagggttggcgtttagtggccctcgattatagccaaattgaattacgtgtccttgcccatctttctggcgatgagaacctcatccgcgtgtttcaggaaggccgcgacattcacactcaaacggcaagctggatgtttggagtgtcatcggaagcgatcgatcctttgatgcgtcgtgcagcgaagaccatcaatttcggtgttctctacggtatgagtgcccatcgtttgtcgcaggaattaggcattccctatgaagaagctgcggcgttcattcagcgctactttcaaagctatcccaaagttaaagcatggatcgagaagactctcgaagaaggccgcacacgtggttacgtagagaccttatttggacgtcgccgctatgttcccgatttaaatgctcgcgtgaaatctgtccgtgaagccgccgaacgcatggcgtggaacatgcctgtacagggcacggcagctgacctcatgaaacttgcaatggtgcgcctttttccacaattgcgtgaagttggtgcccgcatgctcttgcaggtccacgatgaactcttgttagaagcgccaaaagagcgtgcggaagaggtggcagccctcgcgaaagaggttatggaaggcgtgtggcccttagcggtgcctcttgaagtcgaagttggtattggcgaggattggttggctgccaaaggataatga

SEQ ID NO: 484 - protein, 841 aa, synthetic construct
  REGION 1..841: note = Variant of DNA polymerase I from Thermus sp. strain 2.9
MHHHHHHGGSGMLPLFEPKGRVLLVDGHHLAYRNFFALKGLTTSRGEPVQGVYGFAKSLLKALKEDGDVVIVVFDAKAPSFRHEAYEAYKAGRAPTPEDFPRQLALMKELVDLLGLERLEVPGFEADDVLATLAKKAEREGYEVQILTADRDLFQLLSPRISVLHPEGHRITPEWLWEKYGLRPEQWVDFRALAGDPSDNIPGVKGIGEKTALKLLKEWGSLENLLKNLDQVKPASVREKILAHLEDLKLSRELVRVRTDLPLEVDFRGRREPDWEGLKAFLERLEFGSLLHEFGLLESPLPAEEAPWPPPEGAFLGYRLSRPEPMWAELLALAASAQGRVYRAEDPHGALRGLKEVRGLLAKDLAVVALREGLDLPPTDDPMLLAYLLDSSNTTPEGVARRYGGEWTEDAGERALLAERLHANLLGRLQGEERLLWLYEEVEKPLSRVLAHMEATGVKLDVAYLEALSLEAAAEMRRLEEEVFRLAGHSFNLNSRDQLERVLFDELGLPPIGKTEKTGKRSTSAAVLEALREVHPIVDKILQYRELAKLKGTYIDRLPALVHPKTGRLHTRFNQTATATGRLSSSDPNLQNIPVRTPLGQKIRKAFVAEEGWRLVALDYSQIELRVLAHLSGDENLIRVFQEGRDIHTQTASWMFGVSSEAIDPLMRRAAKTINFGVLYGMSAHRLSQELGIPYEEAAAFIQRYFQSYPKVKAWIEKTLEEGRTRGYVETLFGRRRYVPDLNARVKSVREAAERMAWNMPVQGTAADLMKLAMVRLFPQLREVGARMLLQVHDELLLEAPKERAEEVAALAKEVMEGVWPLAVPLEVEVGIGEDWLAAKG

SEQ ID NO: 485 - DNA, 2529 bp, synthetic construct
  misc_feature 1..2529: note = Variant of DNA polymerase I from Thermus sp. strain 2.9
  source 1..2529: mol_type = other DNA
atgcaccatcatcatcatcatggcggtagcggcatgttaccgttgttcgaacctaaaggtcgcgtgcttctggttgatggccatcatctcgcgtatcgtaacttctttgccctgaaaggattaaccaccagccgtggcgagccggtacagggtgtctacggctttgcaaagtcgctcctgaaagctctgaaagaagacggtgatgtggtgattgttgtctttgatgcgaaagcgccaagttttcgccacgaagcgtacgaagcttacaaagccgggcgtgctccaacgccggaagactttcctcgccaattggcgcttatgaaggaattagtggatttgcttggcctcgaacgcttggaagttcccggtttcgaggcagacgacgtattagcgactctcgcaaagaaagccgaacgtgagggctatgaagtccagatcttgacagcagatcgcgatcttttccagcttttatctccgcgcatttccgtgttacacccggaagggcatcgtatcaccccggaatggctctgggagaaatatggtttgcgtcccgaacaatgggtggattttcgcgccttagcgggcgatccgagcgacaatattccgggagttaaaggtatcggcgagaagacggcgctcaagctccttaaagaatgggggtcgttggagaacttgcttaagaatttagatcaggtcaaaccagcttcagtgcgtgagaagattcttgcacacctcgaagacctcaaattaagccgcgaattggtccgtgtacgcaccgatttgccgctcgaagttgatttccgtggccgccgcgaacctgactgggagggtcttaaagcgtttttagagcgtcttgaatttggttcgctcttgcatgaattcggccttttagaaagcccgttaccagccgaagaagcaccttggccaccgcccgaaggcgcgtttttaggttaccgtttgagtcgcccggaaccgatgtgggccgaattattggctcttgcagcgtctgcccagggacgtgtgtatcgcgcggaagaccctcatggtgcgctccgtggcctcaaagaagtccgtggactccttgccaaagacttagctgttgttgcattgcgcgaaggtcttgatttacctccgactgatgatccaatgcttcttgcgtacctcttggactcgtcaaacacgacgcccgaaggcgtagcccgtcgttacggcggcgagtggaccgaagatgcaggtgagcgcgcgttattggccgaacgtttgcacgccaatttattaggacgtttgcaaggcgaggaacgtctcctctggctttacgaagaagtggagaaaccattgagtcgcgtgctcgcgcatatggaagctaccggtgtcaaattagacgtggcgtatttggaggcactcagccttgaagtcgctgccgaactgcgccgcttggaggaagaagtattccgtttagcaggccactcctttaaccttaattctcgcgatcagttagaacgtgtgttgttcgatgaacttggtctccctcctatcggtaagacagagaagaccggtaaacgtagcacttcagcggcggttttagaagctcttcgcgaagtccatcccattgtggacaagatcttgcagtaccgcgaactcgcgaaattgaaaggcacctatattgaccctcttccggcattagtccacccgaaaacgggacgcctccatacccgcttcaaccaaacagccacggcgaccggtcgtttgtcctcctctgatccaaaccttcagaatattccagtacgtaccccattgggccagaagatccgcaaagcgtttgtagctgaggagggttggcgtttagtggccctcgattatagccaaattgaattacgtgtccttgcccatctttctggcgatgagaacctcatccgcgtgtttcaggaaggccgcgacattcacactcaaacggcaagctggatgtttggattatcagctgaagcgatcgatcctttgatgcgtcgtgcagcgaagaccatcaatttcggtgttctctacggtatgagtgcccatcgtttgtcgcaggaattaggcattccctatgaagaagctgcggcgttcattcagcgctactttcaaagctatcccaaagttaaagcatggatcgagaagactctcgaagaaggccgcacacgtggttacgtagagaccttatttggacgtcgccgctatgttcccgatttaaacgctcgcgtgaaatctgtccgtgaagccgccgaacgcatggcgtggaacatgcctgtacagggcacggcagctgacctcatgaaacttgcaatggtgcgcctttttccacaattgcgtgaagttggtgcccgcatgctcttgcaggtccacgatgaactcttgttagaagcgccaaaagagcgtgcggaagaggtggcagccctcgcgaaagaggttatggaaggcgtgtggcccttagcggtgcctcttgaagtcgaagttggtattggcgaggattggttggctgccaaaggataatga

SEQ ID NO: 486 - protein, 841 aa, synthetic construct
  REGION 1..841: note = Variant of DNA polymerase I from Thermus sp. strain 2.9
MHHHHHHGGSGMLPLFEPKGRVLLVDGHHLAYRNFFALKGLTTSRGEPVQGVYGFAKSLLKALKEDGDVVIVVFDAKAPSFRHEAYEAYKAGRAPTPEDFPRQLALMKELVDLLGLERLEVPGFEADDVLATLAKKAEREGYEVQILTADRDLFQLLSPRISVLHPEGHRITPEWLWEKYGLRPEQWVDFRALAGDPSDNIPGVKGIGEKTALKLLKEWGSLENLLKNLDQVKPASVREKILAHLEDLKLSRELVRVRTDLPLEVDFRGRREPDWEGLKAFLERLEFGSLLHEFGLLESPLPAEEAPWPPPEGAFLGYRLSRPEPMWAELLALAASAQGRVYRAEDPHGALRGLKEVRGLLAKDLAVVALREGLDLPPTDDPMLLAYLLDSSNTTPEGVARRYGGEWTEDAGERALLAERLHANLLGRLQGEERLLWLYEEVEKPLSRVLAHMEATGVKLDVAYLEALSLEVAAELRRLEEEVFRLAGHSFNLNSRDQLERVLFDELGLPPIGKTEKTGKRSTSAAVLEALREVHPIVDKILQYRELAKLKGTYIDPLPALVHPKTGRLHTRFNQTATATGRLSSSDPNLQNIPVRTPLGQKIRKAFVAEEGWRLVALDYSQIELRVLAHLSGDENLIRVFQEGRDIHTQTASWMFGLSAEAIDPLMRRAAKTINFGVLYGMSAHRLSQELGIPYEEAAAFIQRYFQSYPKVKAWIEKTLEEGRTRGYVETLFGRRRYVPDLNARVKSVREAAERMAWNMPVQGTAADLMKLAMVRLFPQLREVGARMLLQVHDELLLEAPKERAEEVAALAKEVMEGVWPLAVPLEVEVGIGEDWLAAKG

SEQ ID NO: 487 - DNA, 2529 bp, synthetic construct
  misc_feature 1..2529: note = Variant of DNA polymerase I from Thermus sp. strain 2.9
  source 1..2529: mol_type = other DNA
atgcaccatcatcatcatcatggcggtagcggcatgttaccgttgttcgaacctaaaggtcgcgtgcttctggttgatggccatcatctcgcgtatcgtaacttctttgccctgaaaggattaaccaccagccgtggcgagccggtacagggtgtctacggctttgcaaagtcgctcctgaaagctctgaaagaagacggtgatgtggtgattgttgtctttgatgcgaaagcgccaagttttcgccacgaagcgtacgaagcttacaaagccgggcgtgctccaacgccggaagactttcctcgccaattggcgcttatgaaggaattagtggatttgcttggcctcgaacgcttggaagttcccggtttcgaggcagacgacgtattagcgactctcgcaaagaaagccgaacgtgagggctatgaagtccagatcttgacagcagatcgcgatcttttccagcttttatctccgcgcatttccgtgttacacccggaagggcatcgtatcaccccggaatggctctgggagaaatatggtttgcgtcccgaacaatgggtggattttcgcgccttagcgggcgatccgagcgacaatattccgggagttaaaggtatcggcgagaagacggcgctcaagctccttaaagaatgggggtcgttggagaacttgcttaagaatttagatcaggtcaaaccagcttcagtgcgtgagaagattcttgcacacctcgaagacctcaaattaagccgcgaattgtcccgtgtacgcaccgatttgccgctcgaagttgatttccgtggccgccgcgaacctgactgggagggtcttaaagcgtttttagagcgtcttgaatttggttcgctcttgcatgaattcggccttttagaaagcccgttaccagccgaagaagcaccttggccaccgcccgaaggcgcgtttttaggttaccgtttgagtcgcccggaaccgatgtgggccgaattattggctcttgcagcgtctgcccagggacgtgtgtatcgcgcggaagaccctcatggtgcgctccgtggcctcaaagaagtccgtggactccttgccaaagacttagctgttgttgcattgcgcgaaggtcttgatttacctccgactgatgatccaatgcttcttgcgtacctcttggacccgtcaaacacgacgcccgaaacggtagcccgtcgttacggcggcgagtggaccgaagatgcaggtgagcgcgcgttattggccgaacgtttgcacgccaatttattaggacgtttgcaaggcgaggaacgtctcctctggctttacgaagaagtggagaaaccattgagtcgcgtgctcgcgcatatggaagctaccggtgtcaaattagacgtggcgtatttggaggcactcagccttgaagttgctgccgaaatgcgccgcttggaggaagaagtattccgtttagcaggccactcctttaaccttaattctcgcgatcagttagaacgtgtgttgttcgatgaacttggtctccctcctatcggcaagacagagaagaccggtaaacgtagcacttcagcggcggttttagaagctcttcgcgaagtccatcccattgtggacaagatcttgcagtaccgcgaactcgcgaaattgaaaggcacctatattgaccctcttccggcattagtccacccgaaaacgggacgcctccatacccgcttcaaccaaacagccacggcgaccggtcgtttgtcctcctctgatccaaaccttcagaatattccagtacgtaccccattgggccagaagatccgcaaagcgtttgtagctgaggagggttggcgtttagtggccctcgattatagccaaattgaattacgtgtccttgcccatctttctggcgatgagaacctcatccgcgtgtttcaggaaggccgcgacattcacactcaaacggcaagctggatgtttggattatcagctgaagcgatcgatcctttgatgcgtcgtgcagcgaagaccatcaatttcggtgttctctacggtatgagtgcccatcgtttgtcgcaggaattaggcattccctatgaagaagctgcggcgttcattcagcgctactttcaaagctatcccaaagttaaagcatggatcgagaagactctcgaagaaggccgcacacgtggttacgtagagaccttatttggacgtcgccgctatgttcccgatttaaacgctcgcgtgaaatctgtccgtgaagccgccgaacgcatggcgttcaacatgcctgtacagggcacggcagctgacctcatgaaacttgcaatggtgcgcctttttccacaattgcgtgaagttggtgcccgcatgctcttgcaggtccacgatgaactcttgttagaagcgccaaaagagcgtgcggaagaggtggcagccctcgcgaaagaggttatggaaggcgtgtggcccttagcggtgcctcttgaagtcgaagttggtattggcgaggattggttggctgccaaaggataatga

SEQ ID NO: 488 - protein, 841 aa, synthetic construct
  REGION 1..841: note = Variant of DNA polymerase I from Thermus sp. strain 2.9
MHHHHHHGGSGMLPLFEPKGRVLLVDGHHLAYRNFFALKGLTTSRGEPVQGVYGFAKSLLKALKEDGDVVIVVFDAKAPSFRHEAYEAYKAGRAPTPEDFPRQLALMKELVDLLGLERLEVPGFEADDVLATLAKKAEREGYEVQILTADRDLFQLLSPRISVLHPEGHRITPEWLWEKYGLRPEQWVDFRALAGDPSDNIPGVKGIGEKTALKLLKEWGSLENLLKNLDQVKPASVREKILAHLEDLKLSRELSRVRTDLPLEVDFRGRREPDWEGLKAFLERLEFGSLLHEFGLLESPLPAEEAPWPPPEGAFLGYRLSRPEPMWAELLALAASAQGRVYRAEDPHGALRGLKEVRGLLAKDLAVVALREGLDLPPTDDPMLLAYLLDPSNTTPETVARRYGGEWTEDAGERALLAERLHANLLGRLQGEERLLWLYEEVEKPLSRVLAHMEATGVKLDVAYLEALSLEVAAEMRRLEEEVFRLAGHSFNLNSRDQLERVLFDELGLPPIGKTEKTGKRSTSAAVLEALREVHPIVDKILQYRELAKLKGTYIDPLPALVHPKTGRLHTRFNQTATATGRLSSSDPNLQNIPVRTPLGQKIRKAFVAEEGWRLVALDYSQIELRVLAHLSGDENLIRVFQEGRDIHTQTASWMFGLSAEAIDPLMRRAAKTINFGVLYGMSAHRLSQELGIPYEEAAAFIQRYFQSYPKVKAWIEKTLEEGRTRGYVETLFGRRRYVPDLNARVKSVREAAERMAFNMPVQGTAADLMKLAMVRLFPQLREVGARMLLQVHDELLLEAPKERAEEVAALAKEVMEGVWPLAVPLEVEVGIGEDWLAAKG

SEQ ID NO: 489 - DNA, 2529 bp, synthetic construct
  misc_feature 1..2529: note = Variant of DNA polymerase I from Thermus sp. strain 2.9
  source 1..2529: mol_type = other DNA
atgcaccatcatcatcatcatggcggtagcggcatgttaccgttgttcgaacctaaaggtcgcgtgcttctggttgatggccatcatctcgcgtatcgtaacttctttgccctgaaaggattaaccaccagccgtggcgagccggtacagggtgtctacggctttgcaaagtcgctcctgaaagctctgaaagaagacggtgatgtggtgattgttgtctttgatgcgaaagcgccaagttttcgccacgaagcgtacgaagcttacaaagccgggcgtgctccaacgccggaagactttcctcgccaattggcgcttatgaaggaattagtggatttgcttggcctcgaacgcttggaagttcccggtttcgaggcagacgacgtattagcgactctcgcaaagaaagccgaacgtgagggctatgaagtccagatcttgacagcagatcgcgatcttttccagcttttatctccgcgcatttccgtgttacacccggaagggcatcgtatcaccccggaatggctctgggagaaatatggtttgcgtcccgaacaatgggtggattttcgcgccttagcgggcgatccgagcgacaatattccgggagttaaaggtatcggcgagaagacggcgctcaagctccttaaagaatgggggtcgttggagaacttgcttaagaatttagatcaggtcaaaccagcttcagtgcgtgagaagattcttgcacacctcgaagacctcaaattaagccgcgaattgtcgcgtgtacgcaccgatttgccgctcgaagttgatttccgtggccgccgcgaacctgactgggagggtcttaaagcgtttttagagcgtcttgaactgggttcgctcttgcatgaattcggccttttagaaagcccgttaccagccgaagaagcaccttggccaccgcccgaaggcgcgtttttaggttaccgtttgagtcgcccggaaccgatgtgggccgaattattggctcttgcagcgtctgcccagggacgtgtgtatcgcgcggaagaccctcatggtgcgctccgtggcctcaaagaagtccgtggactccttgccaaagacttagctgttgttgcattgcgcgaaggtcttgatttacctccgactgatgatccaatgcttcttgcgtacctcttggactcgtcaaacacgacgcccgaaggcgtagcccgtcgttacggcggcgagtggaccgaagatgcaggtgagcgcgcgttattggccgaacgtttgcacgccaatttattaggacgtttgcaaggcgaggaacgtctcctctggctttacgaagaagtggagaaaccattgagtcgcgtgctcgcgcatatggaagctaccggtgtcaaattagacgtggcgtatttggaggcactcagccttgaagtcgctgccgaaatgcgccgcttggaggaagaagtattccgtttagcaggccactcctttaaccttaattctcgcgatcagttagaacgtgtgttgttcgatgaacttggtctccctcctatcggtaagacagagaagaccggtaaacgtagcacttcagcggcggttttagaagctcttcgcgaagtccatcccattgtggacaagatcttgcagtaccgcgaactcgcgaaattgaaaggcacctatattgaccgtcttccggcattagtccacccgaaaacgggacgcctccatacccgcttcaaccaaacagccacggcgaccggtcgtttgtcctcctctgatccaaaccttcagaatattccagtacgtaccccattgggccagcatatccgcaaagcgtttgtagctgaggagggttggcgtttagtggccctcgattatagccaaattgaattacgtgtccttgcccatctttctggcgatgagaacctcatccgcgtgtttcaggaaggccgcgacattcacactcaaacggcaagctggatgtttggagtgtcagcggaagcgatcgatcctttgatgcgtcgtgcagcgaagaccatcaatttcggtgttctctacggtatgagtgcccatcgtttgtcgcaggaattaggcattccctatgaagaagctgcggcgttcattcagcgctactttcaaagctatcccaaagttaaagcatggatcgagaagactctcgaagaaggccgcacacgtggttacgtagagaccttatttggacgtcgccgctatgttcccgatttaactgctcgcgtgaaatctgtccgtgaagccgccgaacgcatggcgtttaacatgcctgtacagggcacggcagctgacctcatgaaacttgcaatggtgcgcctttttccacaattgcgtgaagttggtgcccgcatgctcttgcaggtccacgatgaactcttgttagaagcgccaaaagagcgtgcggaagaggtggcagccctcgcgaaagaggttatggaaggcgtgtggcccttagcggtgcctcttgaagtcgaagttggtattggcgaggattggttggctgccaaaggataatga

SEQ ID NO: 490 - protein, 841 aa, synthetic construct
  REGION 1..841: note = Variant of DNA polymerase I from Thermus sp. strain 2.9
MHHHHHHGGSGMLPLFEPKGRVLLVDGHHLAYRNFFALKGLTTSRGEPVQGVYGFAKSLLKALKEDGDVVIVVFDAKAPSFRHEAYEAYKAGRAPTPEDFPRQLALMKELVDLLGLERLEVPGFEADDVLATLAKKAEREGYEVQILTADRDLFQLLSPRISVLHPEGHRITPEWLWEKYGLRPEQWVDFRALAGDPSDNIPGVKGIGEKTALKLLKEWGSLENLLKNLDQVKPASVREKILAHLEDLKLSRELSRVRTDLPLEVDFRGRREPDWEGLKAFLERLELGSLLHEFGLLESPLPAEEAPWPPPEGAFLGYRLSRPEPMWAELLALAASAQGRVYRAEDPHGALRGLKEVRGLLAKDLAVVALREGLDLPPTDDPMLLAYLLDSSNTTPEGVARRYGGEWTEDAGERALLAERLHANLLGRLQGEERLLWLYEEVEKPLSRVLAHMEATGVKLDVAYLEALSLEVAAEMRRLEEEVFRLAGHSFNLNSRDQLERVLFDELGLPPIGKTEKTGKRSTSAAVLEALREVHPIVDKILQYRELAKLKGTYIDRLPALVHPKTGRLHTRFNQTATATGRLSSSDPNLQNIPVRTPLGQHIRKAFVAEEGWRLVALDYSQIELRVLAHLSGDENLIRVFQEGRDIHTQTASWMFGVSAEAIDPLMRRAAKTINFGVLYGMSAHRLSQELGIPYEEAAAFIQRYFQSYPKVKAWIEKTLEEGRTRGYVETLFGRRRYVPDLTARVKSVREAAERMAFNMPVQGTAADLMKLAMVRLFPQLREVGARMLLQVHDELLLEAPKERAEEVAALAKEVMEGVWPLAVPLEVEVGIGEDWLAAKG

SEQ ID NO: 491 - DNA, 2529 bp, synthetic construct
  misc_feature 1..2529: note = Variant of DNA polymerase I from Thermus sp. strain 2.9
  source 1..2529: mol_type = other DNA
atgcaccatcatcatcatcatggcggtagcggcatgttaccgttgttcgaacctaaaggtcgcgtgcttctggttgatggccatcatctcgcgtatcgtaacttctttgccctgaaaggattaaccaccagccgtggcgagccggtacagggtgtctacggctttgcaaagtcgctcctgaaagctctgaaagaagacggtgatgtggtgattgttgtctttgatgcgaaagcgccaagttttcgccacgaagcgtacgaagcttacaaagccgggcgtgctccaacgccggaagactttcctcgccaattggcgcttatgaaggaattagtggattttcttggcctcgaacgcttggaagttcccggtttcgaggcagacgacgtattagcgactctcgcaaagaaagccgaacgtgagggctatgaagtccagatcttgacagcagatcgcgatcttttccagcttttatctccgcgcatttccgtgttacacccggaagggcatctgatcaccccggaatggctctgggagaaatatggtttgcgtcccgaacaatgggtggattttcgcgccttagtaggcgatccgagcgacaatattccgggagttaaaggtatcggcgagaagacggcgctcaagctccttaaagaatgggggtcgttggagaacttgcttaagaatttagatcaggtcaaaccagagtcagtgcgtgagaagattcttgcacacctcgaagacctccgtttaagccgcgaattgtcccgtgtacgcaccgatttgccgctcgaagttgatttccgtggccgccgcgaacctgactgggagggtcttaaagcgtttttagagcgtcttgaatttggttcgctcttgcatgaattcggccttttagaaagcccgttaccagccgaagaagcaccttggccaccgcccgaaggcgcgtttttaggttacgttttgagtcgcccggaaccgatgtgggccgaattattggctcttgcagcgtctgcccagggacgtgtgtatcgcgcggaagaccctcatggtgcgctccgcggcctcaaagaagtccgtggactccttgccaaagacttagctgttgttgcattgcgcgaaggtcttgatttacctccgactgatgatccaatgcttcttgcgtacctcttggacccgtcaaacacgacgcccgaaggcgtagcccgtcgttacggcggcgagtggaccgaagatgcaggcgagcgcgcgttattggccgaacgtttgcacgccaatttattaggacgtttgcaaggcgaggaacgtctcctctggctttacgaagaagtggagaaaccattgagtcgcgtgctcgcgcatatggaagctaccggtgtcaaattagacgtggcgtatttggaggcactcagccttgaagttgctgccgaaatgcgccgcttggaggaagaagtattccgtttagcaggccactcctttaaccttaattctcgcgatcagttagaacgtgtgttgttcgatgaacttggtctccctcctatcggcaagacagagaagaccggtaaacgtagcacttcagcggcggttttagaagctcttcgcgaagtccatcccattgtggacaagatcttgcagtaccgcgaactcgcgaaattgaaaggcacctatattgaccctcttccggcattagtccacccgaaaacgggacgcctccatacccgcttcaaccaaacagccacggcgaccggtcgtttgtcctcctctgatccaaaccttcagaatattccagtacgtaccccattgggccagaagatccgcaaagcgtttgtagctgaggagggttggcgtttagtggccctcgattatagccaaattgaattacgtgtccttgcccatctttctggcgatgagaacctcatccgcgtgtttcaggaaggcaaagacattcacactcaaacggcaagctggatgtttggattaccgccggaagcgatcgatcctttgatgcgtcgtgcagcgaagaccgttaatttcggtgttctctacggtatgagtgcccatcgtttgtcgcaggaattaggcattccctatgaagaagctgtggcgttcattcagcgctactttcaaagctatcccaaagttaaagcatggatcgagaagactctcgaagaaggccgcacacgtggttacgtagagaccttatttggacgtcgccgctatgttcccgatttaaacgctcgcgtgaaatctgtccgtgaagccgccgaacgcatggcgttcaacatgcctgtacagggcacggcagctgacctcatgaaacttgcaatggtgcgcctttttccacaattgcgtgaagttggtgcccgcatgctcttgcaggtccacgatgaactcttgttagaagcgccaaaagagcgtgcggaagaggtggcagccctcgcgaaagaggttatggaaggcgtgtggcccttagcggtgcctcttgaagtcgaagttggtattggcgaggattggttggctgccaaaggataatga

SEQ ID NO: 492 - protein, 841 aa, synthetic construct
  REGION 1..841: note = Variant of DNA polymerase I from Thermus sp. strain 2.9
MHHHHHHGGSGMLPLFEPKGRVLLVDGHHLAYRNFFALKGLTTSRGEPVQGVYGFAKSLLKALKEDGDVVIVVFDAKAPSFRHEAYEAYKAGRAPTPEDFPRQLALMKELVDFLGLERLEVPGFEADDVLATLAKKAEREGYEVQILTADRDLFQLLSPRISVLHPEGHLITPEWLWEKYGLRPEQWVDFRALVGDPSDNIPGVKGIGEKTALKLLKEWGSLENLLKNLDQVKPESVREKILAHLEDLRLSRELSRVRTDLPLEVDFRGRREPDWEGLKAFLERLEFGSLLHEFGLLESPLPAEEAPWPPPEGAFLGYVLSRPEPMWAELLALAASAQGRVYRAEDPHGALRGLKEVRGLLAKDLAVVALREGLDLPPTDDPMLLAYLLDPSNTTPEGVARRYGGEWTEDAGERALLAERLHANLLGRLQGEERLLWLYEEVEKPLSRVLAHMEATGVKLDVAYLEALSLEVAAEMRRLEEEVFRLAGHSFNLNSRDQLERVLFDELGLPPIGKTEKTGKRSTSAAVLEALREVHPIVDKILQYRELAKLKGTYIDPLPALVHPKTGRLHTRFNQTATATGRLSSSDPNLQNIPVRTPLGQKIRKAFVAEEGWRLVALDYSQIELRVLAHLSGDENLIRVFQEGKDIHTQTASWMFGLPPEAIDPLMRRAAKTVNFGVLYGMSAHRLSQELGIPYEEAVAFIQRYFQSYPKVKAWIEKTLEEGRTRGYVETLFGRRRYVPDLNARVKSVREAAERMAFNMPVQGTAADLMKLAMVRLFPQLREVGARMLLQVHDELLLEAPKERAEEVAALAKEVMEGVWPLAVPLEVEVGIGEDWLAAKG

SEQ ID NO: 493 - DNA, 2529 bp, synthetic construct
  misc_feature 1..2529: note = Variant of DNA polymerase I from Thermus sp. strain 2.9
  source 1..2529: mol_type = other DNA
atgcaccatcatcatcatcatggcggtagcggcatgttaccgttgttcgaacctaaaggtcgcgtgcttctggttgatggccatcatctcgcgtatcgtaacttctttgccctgaaaggattaaccaccagccgtggcgagccggtacagggtgtctacggctttgcaaagtcgctcctgaaagctctgaaagaagacggtgatgtggtgattgttgtctttgatgcgaaagcgccaagttttcgccacgaagcgtacgaagcttacaaagccgggcgtgctccaacgccggaagactttcctcgccaattggcgcttatgaaggaattagtggatttgcttggcctcgaacgcttggaagttcccggtttcgaggcagacgacgtattagcgactctcgcaaagaaagccgaacgtgagggctatgaagtccagatcttgacagcagatcgcgatcttttccagcttttatctccgcgcgtcgcggtgttacacccggaagggcatcgtatcaccccggaatggctctgggagaaatatggtttgcgtcccgaacaatgggtggattttcgcgccttagcgggcgatccgagcgacaatattccgggagttaaaggtatcggcgagaagacggcgctcaagctccttaaagaatgggggtcgttggagaacttgcttaagaatttagatcaggtcaaaccagcttcagtgcgtgagaagattcttgcacacctcgaagacctcaaattaagccgcgaattgtcccgtgtacgcaccgatttgccgctcgaagttgatttccgtggccgccgcgaacctgactgggagggtcttaaagcgtttttagagcgtcttgaatttggttcgctcttgcatgaattcggccttttagaaagcccgttaccagccgaagaagcaccttggccaccgcccgaaggcgcgtttttaggttaccgtttgagtcgcccggaaccgatgtgggccgaattattggctcttgcagcgtctgcccagggacgtgtgtatcgcgcggaagaccctcatggtgcgctccgcggcctcaaagaagtccgtggactccttgccaaagacttagctgttgttgcattgcgcgaaggtcttgatttacctccgactgatgatccaatgcttcttgcgtacctcttggacccgtcaaacacgacgcccgaaggcgtagcccgtcgttacggcggcgagtggaccgaagatgcaggtgagcgcgcgttattggccgaacgtttgcacgccaatttattaggacgtttgcaaggcgaggaacgtctcctctggctttacgaagaagtggagaaaccattgagtcgcgtgctcgcgcatatggaagctaccggtgtcaaattagacgtggcgtatttggaggcactcagccttgaagttgctgccgaaatgcgccgcttggaggaagaagtattccgtttagcaggccactcctttaaccttaattctcgcgatcagttagaacgtgtgttgttcgatgaacttggtctccctcctatcggcaagacagagaagaccggtaaacgtagcacttcagcggcggttttagaagctcttcgcgaagtccatcccattgtggacaagatcttgcagtaccgcgaactcgcgaaattgaaaggcacctatattgaccctcttccggcattagtccacccgaaaacgggacgcctccatacccgcttcaaccaaacagccacggcgaccggtcgtttgtcctcctctgatccaaaccttcagaatattccagtacgtaccccattgggccagaagatccgcaaagcgtttgtagctgaggagggttggcgtttagtggccctcgattatagccaaattgaattacgtgtccttgcccatctttctggcgatgagaacctcatccgcgtgtttcaggaaggccgcgacattcacactcaaacggcaagctggatgtttggattatcagctgaagcgatcgatcctttgatgcgtcgtgcagcgaagaccatcaatttcggtgttctctacggtatgagtgcccatcgtttgtcgcaggaattaggcattccctatgaagaagctgcggcgttcattcagcgctactttcaaagctatcccaaagttaaagcatggatcgagaagactctcgaagaaggccgcacacgtggttacgtagagaccttatttggacgtcgccgctatgttcccgatttaaacgctcgcgtgaaatctgtccgtgaagccgccgaacgcatggcgttcaacatgcctgtacagggcacggcagctgacctcatgaaacttgcaatggtgcgcctttttccacaattgcgtgaagttggtgcccgcatgctcttgcaggtccacgatgaactcttgttagaagcgccaaaagagcgtgcggaagaggtggcagccctcgcgaaagaggttatggaaggcgtgtggcccttagcggtgcctcttgaagtcgaagttggtattggcgaggattggttggctgccaaaggataatga

SEQ ID NO: 494 - protein, 841 aa, synthetic construct
  REGION 1..841: note = Variant of DNA polymerase I from Thermus sp. strain 2.9
MHHHHHHGGSGMLPLFEPKGRVLLVDGHHLAYRNFFALKGLTTSRGEPVQGVYGFAKSLLKALKEDGDVVIVVFDAKAPSFRHEAYEAYKAGRAPTPEDFPRQLALMKELVDLLGLERLEVPGFEADDVLATLAKKAEREGYEVQILTADRDLFQLLSPRVAVLHPEGHRITPEWLWEKYGLRPEQWVDFRALAGDPSDNIPGVKGIGEKTALKLLKEWGSLENLLKNLDQVKPASVREKILAHLEDLKLSRELSRVRTDLPLEVDFRGRREPDWEGLKAFLERLEFGSLLHEFGLLESPLPAEEAPWPPPEGAFLGYRLSRPEPMWAELLALAASAQGRVYRAEDPHGALRGLKEVRGLLAKDLAVVALREGLDLPPTDDPMLLAYLLDPSNTTPEGVARRYGGEWTEDAGERALLAERLHANLLGRLQGEERLLWLYEEVEKPLSRVLAHMEATGVKLDVAYLEALSLEVAAEMRRLEEEVFRLAGHSFNLNSRDQLERVLFDELGLPPIGKTEKTGKRSTSAAVLEALREVHPIVDKILQYRELAKLKGTYIDPLPALVHPKTGRLHTRFNQTATATGRLSSSDPNLQNIPVRTPLGQKIRKAFVAEEGWRLVALDYSQIELRVLAHLSGDENLIRVFQEGRDIHTQTASWMFGLSAEAIDPLMRRAAKTINFGVLYGMSAHRLSQELGIPYEEAAAFIQRYFQSYPKVKAWIEKTLEEGRTRGYVETLFGRRRYVPDLNARVKSVREAAERMAFNMPVQGTAADLMKLAMVRLFPQLREVGARMLLQVHDELLLEAPKERAEEVAALAKEVMEGVWPLAVPLEVEVGIGEDWLAAKG

SEQ ID NO: 495 - DNA, 2529 bp, synthetic construct
  misc_feature 1..2529: note = Variant of DNA polymerase I from Thermus sp. strain 2.9
  source 1..2529: mol_type = other DNA
atgcaccatcatcatcatcatggcggtagcggcatgttaccgttgttcgaacctaaaggtcgcgtgcttctggttgatggccatcatctcgcgtatcgtaacttctttgccctgaaaggattaaccaccagccgtggcgagccggtacagggtgtctacggctttgcaaagtcgctcctgaaagctctgaaagaagacggtgatgtggtgattgttgtctttgatgcgaaagcgccaagttttcgccacgaagcgtacgaagcttacaaagccgggcgtgctccaacgccggaagactttcctcgccaattggcgcttatgaaggaattagtggatttgcttggcctcgaacgcttggaagttcccggtttcgaggcagacgacgtattagcgactctcgcaaagaaagccgaacgtgagggctatgaagtccagatcttgacagcagatcgcgatcttttccagcttttatctccgcgcatttccgtgttacacccggaagggcatcgtatcaccccggaatggctctgggagaaatatggtttgcgtcccgaacaatgggtggattttcgcgccttagcgggcgatccgagcgacaatattccgggagttaaaggtatcggcgagaagacggcgctcaagctccttaaagaatgggggtcgttggagaacttgcttaagaatttagatcaggtcaaaccagcttcagtgcgtgagaagattcttgcacacctcgaagacctcaaattaagccgcgaattgtcccgtgtacgcaccgatttgccgctcgaagttgatttccgtggctatcgcgaacctgactgggagggtcttaaagcgtttttagagcgtcttgaatttggttcgctcttgcatgaattcggccttttagaaagcccgttaccagccgaagaagcaccttggccaccgcccgaaggcgcgtttttaggttaccgtttgagtcgcccggaaccgatgtgggccgaattattggctcttgcagcgtctgcccagggacgtgtgtatcgcgcggaagaccctcatggtgcgctccgtggcctcaaagaagtccgtggactccttgccaaagacttagctgttgttgcattgcgcgaaggtcttgatttacctccgactgatgatccaatgcttcttgcgtacctcttggacccgtcaaacacgacgcccgaaggcgtagcccgtcgttacggcggcgagtggaccgaagatgcaggtgagcgcgcgttattggccgaacgtttgcacgccaatttattaggacgtttgcaaggcgaggaacgtctcctctggctttacgaagaagtggagaaaccattgagtcgcgtgctcgcgcatatggaagctaccggtgtcaaattagacgtggcgtatttggaggcactcagccttgaagttgctgccgaaatgcgccgcttggaggaagaagtattccgtttagcaggccactcctttaaccttaattctcgcgatcagttagaacgtgtgttgttcgatgaacttggtctccctcctatcggcaagacagagaagaccggtaaacgtagcacttcagcggcggttttagaagctcttcgcgaagtccatcccattgtggacaagatcttgcagtaccgcgaactcgcgaaattgaaaggcacctatattgaccctcttccggcattagtccacccgaaaacgggacgcctccatacccgcttcaaccaaacagccacggcgaccggtcgtttgtcctcctctgatccaaaccttcagaatattccagtacgtaccccattgggccagaagatccgcaaagcgtttgtagctgaggagggttggcgtttagtggccctcgattatagccaaattgaattacgtgtccttgcccatctttctggcgatgagaacctcatccgcgtgtttcaggaaggccgcgacattcacactcaaacggcaagctggatgtttggattatcagctgaagcgatcgatcctttgatgcgtcgtgcagcgaagaccatcaatttcggtgttctctacggtatgagtgcccatcgtttgtcgcaggaattaggcattccctatgaagaagctgcggcgttcattcagcgctactttcaaagctatcccaaagttaaagcatggatcgagaagactctcgaagaaggccgcacacgtggttacgtagagaccttatttggacgtcgccgctatgttcccgatttaaacgctcgcgtgaaatctgtccgtgaagccgccgaacgcatggcgttcaacatgcctgtacagggcacggcagctgacctcatgaaacttgcaatggtgcgcctttttccacaattgcgtgaagttggtgcccgcatgctcttgcaggtccacgatgaactcttgttagaagcgccaaaagagcgtgcggaagaggtggcagccctcgcgaaagaggttatggaaggcgtgtggcccttagcggtgcctcttgaagtcgaagttggtattggcgaggattggttggctgccaaaggataatga

SEQ ID NO: 496 - protein, 841 aa, synthetic construct
  REGION 1..841: note = Variant of DNA polymerase I from Thermus sp. strain 2.9
MHHHHHHGGSGMLPLFEPKGRVLLVDGHHLAYRNFFALKGLTTSRGEPVQGVYGFAKSLLKALKEDGDVVIVVFDAKAPSFRHEAYEAYKAGRAPTPEDFPRQLALMKELVDLLGLERLEVPGFEADDVLATLAKKAEREGYEVQILTADRDLFQLLSPRISVLHPEGHRITPEWLWEKYGLRPEQWVDFRALAGDPSDNIPGVKGIGEKTALKLLKEWGSLENLLKNLDQVKPASVREKILAHLEDLKLSRELSRVRTDLPLEVDFRGYREPDWEGLKAFLERLEFGSLLHEFGLLESPLPAEEAPWPPPEGAFLGYRLSRPEPMWAELLALAASAQGRVYRAEDPHGALRGLKEVRGLLAKDLAVVALREGLDLPPTDDPMLLAYLLDPSNTTPEGVARRYGGEWTEDAGERALLAERLHANLLGRLQGEERLLWLYEEVEKPLSRVLAHMEATGVKLDVAYLEALSLEVAAEMRRLEEEVFRLAGHSFNLNSRDQLERVLFDELGLPPIGKTEKTGKRSTSAAVLEALREVHPIVDKILQYRELAKLKGTYIDPLPALVHPKTGRLHTRFNQTATATGRLSSSDPNLQNIPVRTPLGQKIRKAFVAEEGWRLVALDYSQIELRVLAHLSGDENLIRVFQEGRDIHTQTASWMFGLSAEAIDPLMRRAAKTINFGVLYGMSAHRLSQELGIPYEEAAAFIQRYFQSYPKVKAWIEKTLEEGRTRGYVETLFGRRRYVPDLNARVKSVREAAERMAFNMPVQGTAADLMKLAMVRLFPQLREVGARMLLQVHDELLLEAPKERAEEVAALAKEVMEGVWPLAVPLEVEVGIGEDWLAAKG

SEQ ID NO: 497 - DNA, 2529 bp, synthetic construct
  misc_feature 1..2529: note = Variant of DNA polymerase I from Thermus sp. strain 2.9
  source 1..2529: mol_type = other DNA
atgcaccatcatcatcatcatggcggtagcggcatgttaccgttgttcgaacctaaaggtcgcgtgcttctggttgatggccatcatctcgcgtatcgtaacttctttgccctgaaaggattaaccaccagccgtggcgagccggtacagggtgtctacggctttgcaaagtcgctcctgaaagctctgaaagaagacggtgatgtggtgattgttgtctttgatgcgaaagcgccaagttttcgccacgaagcgtacgaagcttacaaagccgggcgtgctccaacgccggaagactttcctcgccaattggcgcttatgaaggaattagtggatttgcttggcctcgaacgcttggaagttcccggtttcgaggcagacgacgtattagcgactctcgcaaagaaagccgaacgtgagggctatgaagtccagatcttgacagcagatcgcgatcttttccagcttttatctccgcgcatttccgtgttacacccggaagggcatcgtatcaccccggaatggctctgggagaaatatggtttgcgtcccgaacaatgggtggattttcgcgccttagcgggcgatccgagcgacaatattccgggagttaaaggtatcggcgagaagacggcgctcaagctccttaaagaatgggggtcgttggagaacttgcttaagaatttagatcaggtcaaaccagcttcagtgcgtgagaagattcttgcacacctcgaagacctcaaattaagccgcgaattggtccgtgtacgcaccgatctgccgctcgaagttgatttccgtggccgccgcgaacctgactgggagggtcttaaagcgtttttagagcgtcttgaatttggttcgctcttgcatgaattcggccttttagaaagcccgttaccagccgaagaagcaccttggccaccgcccgaaggcgcgtttttaggttaccgtttgagtcgcccggaaccgatgtgggccgaattattggctcttgcagcgtctgcccagggacgtgtgtatcgcgcggaagaccctcatggtgcgctccgtggcctcaaagaagtccgtggactccttgccaaagacttagctgttgttgcattgcgcgaaggtcttgatttacctccgactgatgatccaatgcttcttgcgtacctcttggacccgtcaaacacgacgcccgaaggcgtagcccgtcgttacggcggcgagtggaccgaagatgcaggtgagcgcgcgttattggccgaacgtttgcacgccaatttattaggacgtttgcaaggcgaggaacgtctcctctggctttacgaagaagtggagaaaccattgagtcgcgtgctcgcgcatatggaagctaccggtgtcaaattagacgtggcgtatttggaggcactcagccttgaagtcgctgccgaaatgcgccgcttggaggaagaagtattccgtttagcaggccactcctttaaccttaattctcgcgatcagttagaacgtgtgttgttcgatgaacttggtctccctcctatcggcaagacagagaagaccggtaaacgtagcacttcagcggcggttttagaagctcttcgcgaagtccatcccattgtggacaagatcttgcagtaccgcgaactcgcgaaattgaaaggcacctatattgaccctcttccggcattagtccacccgaaaacgggacgcctccatacccgcttcaaccaaacagccacggcgaccggtcgtttgtcctcctctgatccaaaccttcagaatattccagtacgtaccccattgggccagaagatccgcaaagcgtttgtagctgaggagggttggcgtttagtggccctcgattatagccaaattgaattacgtgtccttgcccatctttctggcgatgagaacctcatccgcgtgtttcaggaaggccgcgacattcacactcaaacggcaagctggatgtttggactgtcatcggaagcgatcgatcctttgatgcgtcgtgcagcgaagaccatcaatttcggtgttctctacggtatgagtgcccatcgtttgtcgcaggaattaggcattccctatgaagaagctgcggcgttcattcagcgctactttcaaagctatcccaaagttaaagcatggatcgagaagactctcgaagaaggccgcacacgtggttacgtagagaccttatttggacgtcgccgctatgttcccgatttaaacgctcgcgtgaaatctgtccgtgaagccgccgaacgcatggcgtttaacatgcctgtacagggcacggcagctgacctcatgaaacttgcaatggtgcgcctttttccacaattgcgtgaagttggtgcccgcatgctcttgcaggtccacgatgaactcttgttagaagcgccaaaagagcgtgcggaagaggtggcagccctcgcgaaagaggttatggaaggcgtgtggcccttagcggtgcctcttgaagtcgaagttggtattggcgaggattggttggctgccaaaggataatga

SEQ ID NO: 498 - protein, 841 aa, synthetic construct
  REGION 1..841: note = Variant of DNA polymerase I from Thermus sp. strain 2.9
MHHHHHHGGSGMLPLFEPKGRVLLVDGHHLAYRNFFALKGLTTSRGEPVQGVYGFAKSLLKALKEDGDVVIVVFDAKAPSFRHEAYEAYKAGRAPTPEDFPRQLALMKELVDLLGLERLEVPGFEADDVLATLAKKAEREGYEVQILTADRDLFQLLSPRISVLHPEGHRITPEWLWEKYGLRPEQWVDFRALAGDPSDNIPGVKGIGEKTALKLLKEWGSLENLLKNLDQVKPASVREKILAHLEDLKLSRELVRVRTDLPLEVDFRGRREPDWEGLKAFLERLEFGSLLHEFGLLESPLPAEEAPWPPPEGAFLGYRLSRPEPMWAELLALAASAQGRVYRAEDPHGALRGLKEVRGLLAKDLAVVALREGLDLPPTDDPMLLAYLLDPSNTTPEGVARRYGGEWTEDAGERALLAERLHANLLGRLQGEERLLWLYEEVEKPLSRVLAHMEATGVKLDVAYLEALSLEVAAEMRRLEEEVFRLAGHSFNLNSRDQLERVLFDELGLPPIGKTEKTGKRSTSAAVLEALREVHPIVDKILQYRELAKLKGTYIDPLPALVHPKTGRLHTRFNQTATATGRLSSSDPNLQNIPVRTPLGQKIRKAFVAEEGWRLVALDYSQIELRVLAHLSGDENLIRVFQEGRDIHTQTASWMFGLSSEAIDPLMRRAAKTINFGVLYGMSAHRLSQELGIPYEEAAAFIQRYFQSYPKVKAWIEKTLEEGRTRGYVETLFGRRRYVPDLNARVKSVREAAERMAFNMPVQGTAADLMKLAMVRLFPQLREVGARMLLQVHDELLLEAPKERAEEVAALAKEVMEGVWPLAVPLEVEVGIGEDWLAAKG

SEQ ID NO: 499 - DNA, 2529 bp, synthetic construct
  misc_feature 1..2529: note = Variant of DNA polymerase I from Thermus sp. strain 2.9
  source 1..2529: mol_type = other DNA
atgcaccatcatcatcatcatggcggtagcggcatgttaccgttgttcgaacctaaaggtcgcgtgcttctggttgatggccatcatctcgcgtatcgtaacttctttgccctgaaaggattaaccaccagccgtggcgagccggtacagggtgtctacggctttgcaaagtcgctcctgaaagctctgaaagaagacggtgatgtggtgattgttgtctttgatgcgaaagcgccaagttttcgccacgaagcgtacgaagcttacaaagccgggcgtgctccaacgccggaagactttcctcgccaattggcgcttatgaaggaattagtggatttgcttggcctcgaacgcttggaagttcccggtttcgaggcagacgacgtattagcgactctcgcaaagaaagccgaacgtgagggctatgaagtccagatcttgacagcagatcgcgatcttttccagcttttatctccgcgcatttccgtgttacacccggaagggcatcgtatcaccccggaatggctctgggagaaatatggtttgcgtcccgaacaatgggtggattttcgcgccttagcgggcgatccgagcgacaatattccgggagttaaaggtatcggcgagaagacggcgctcaagctccttaaagaatgggggtcgttggagaacttgcttaagaatttagatcaggtcaaaccagcttcagtgcgtgagaagattcttgcacacctcgaagacctcaaattaagccgcgaattgtcccgtgtacgcaccgatttgccgctcgaagttgatttccgtggccgccgcgaacctgactgggagggtcttaaagcgtttttagagcgtcttgaatttggttcgctcttgcatgaattcggccttttagaaagcccgttaccagccgaagaagcaccttggccaccgcccgaaggcgcgtttttaggttaccgtttgagtcgcccggaaccgatgtgggccgaattattggctcttgcagcgtctgcccagggacgtgtgtatcgcgcggaagaccctcatggtgcgctccgtggcctcaaagaagtccgtggactccttgccaaagacttagctgttgttgcattgcgcgaaggtcttgatttacctccgactgatgatccaatgcttcttgcgtacctcttggacccgtcaaacacgacgcccgaaggcgtagcccgtcgttacggcggcgagtggaccgaagatgcagccgagcgcgcgttattggccgaacgtttgcacgccaatttattaggacgtttgcaaggcgaggaacgtctcctctggctttacgaagaagtggagaaaccattgagtcgcgtgctcgcgcatatggaagctaccggtgtcaaattagacgtggcgtatttggaggcactcagccttgaagttgctgccgaaatgcgccgcttggaggaagaagtattccgtttagcaggccactcctttaaccttaattctcgcgatcagttagaacgtgtgttgttcgatgaacttggtctccctcctatcggcaagacagagaagaccggtaaacgtagcacttcagcggcggttttagaagctcttcgcgaagtccatcccattgtggacaagatcttgcagtaccgcgaactcgcgaaattgaaaggcacctatattgaccctcttccggcattagtccacccgaaaacgggacgcctccatacccgcttcaaccaaacagccacggcgaccggtcgtttgtcctcctctgatccaaaccttcagaatattccagtacgtaccccattgggccagaagatccgcaaagcgtttgtagctgaggagggttggcgtttagtggccctcgattatagccaaattgaattacgtgtccttgcccatctttctggcgatgagaacctcatccgcgtgtttcaggaaggccgcgacattcacactcaaacggcaagctggatgtttggattatcagctgaagcgatcgatcctttgatgcgtcgtgcagcgaagaccatcaatttcggtgttctctacggtatgagtgcccatcgtttgtcgcaggaattaggcattccctatgaagaagctgcggcgttcattcagcgctactttcaaagctatcccaaagttaaagcatggatcgagaagactctcgaagaaggccgcacacgtggttacgtagagaccttatttggacgtcgccgctatgttcccgatttaaacgctcgcgtgaaatctgtccgtgaagccgccgaacgcatggcgttcaacatgcctgtacagggcacggcagctgacctcatgaaacttgcaatggtgcgcctttttccacaattgcgtgaagttggtgcccgcatgctcttgcaggtccacgatgaactcttgttagaagcgccaaaagagcgtgcggaagaggtggcagccctcgcgaaagaggttatggaaggcgtgtggcccttagcggtgcctcttgaagtcgaagttggtattggcgaggattggttggctgccaaaggataatga

SEQ ID NO: 500 - protein, 841 aa, synthetic construct
  REGION 1..841: note = Variant of DNA polymerase I from Thermus sp. strain 2.9
MHHHHHHGGSGMLPLFEPKGRVLLVDGHHLAYRNFFALKGLTTSRGEPVQGVYGFAKSLLKALKEDGDVVIVVFDAKAPSFRHEAYEAYKAGRAPTPEDFPRQLALMKELVDLLGLERLEVPGFEADDVLATLAKKAEREGYEVQILTADRDLFQLLSPRISVLHPEGHRITPEWLWEKYGLRPEQWVDFRALAGDPSDNIPGVKGIGEKTALKLLKEWGSLENLLKNLDQVKPASVREKILAHLEDLKLSRELSRVRTDLPLEVDFRGRREPDWEGLKAFLERLEFGSLLHEFGLLESPLPAEEAPWPPPEGAFLGYRLSRPEPMWAELLALAASAQGRVYRAEDPHGALRGLKEVRGLLAKDLAVVALREGLDLPPTDDPMLLAYLLDPSNTTPEGVARRYGGEWTEDAAERALLAERLHANLLGRLQGEERLLWLYEEVEKPLSRVLAHMEATGVKLDVAYLEALSLEVAAEMRRLEEEVFRLAGHSFNLNSRDQLERVLFDELGLPPIGKTEKTGKRSTSAAVLEALREVHPIVDKILQYRELAKLKGTYIDPLPALVHPKTGRLHTRFNQTATATGRLSSSDPNLQNIPVRTPLGQKIRKAFVAEEGWRLVALDYSQIELRVLAHLSGDENLIRVFQEGRDIHTQTASWMFGLSAEAIDPLMRRAAKTINFGVLYGMSAHRLSQELGIPYEEAAAFIQRYFQSYPKVKAWIEKTLEEGRTRGYVETLFGRRRYVPDLNARVKSVREAAERMAFNMPVQGTAADLMKLAMVRLFPQLREVGARMLLQVHDELLLEAPKERAEEVAALAKEVMEGVWPLAVPLEVEVGIGEDWLAAKG

SEQ ID NO: 501 - DNA, 2529 bp, synthetic construct
  misc_feature 1..2529: note = Variant of DNA polymerase I from Thermus sp. strain 2.9
  source 1..2529: mol_type = other DNA
atgcaccatcatcatcatcatggcggtagcggcatgttaccgttgttcgaacctaaaggtcgcgtgcttctggttgatggccatcatctcgcgtatcgtaacttctttgccctgaaaggattaaccaccagccgtggcgagccggtacagggtgtctacggctttgcaaagtcgctcctgaaagctctgaaagaagacggtgatgtggtgattgttgtctttgatgcgaaagcgccaagttttcgccacgaagcgtacgaagcttacaaagccgggcgtgctccaacgccggaagactttcctcgccaattggcgcttatgaaggaattagtggatttgcttggcctcgaacgcttggaagttcccggtttcgaggcagacgacgtattagcgactctcgcaaagaaagccgaacgtgagggctatgaagtccagatcttgacagcagatcgcgatcttttccagcttttatctccgcgcatctcggtgttacacccggaagggcatcgcatcaccccggaatggctctgggagaaatatggtttgcgtcccgaacaatgggtggattttcgcgccttagtaggcgatccgagcgacaatattccgggagttaaaggtatcggcgagaagacggcgctcaagctccttaaagaatgggggtcgttggagaacttgcttaagaatttagatcaggtcaaaccagcgtcagtgcgtgagaagattcttgcacacctcgaagacctcaaattaagccgcgaattgtcccgtgtacgcaccgatttgccgctcgaagttgatttccgtcgccgccgcgaacctgactgggagggtcttaaagcgtttttagagcgtcttgaatttggttcgctcttgcatgaattcggccttttagaaagcccgttaccagccgaagaagcaccttggccaccgcccgaaggcgcgtttttaggttacgttttgagtcgcccggaaccgatgtgggccgaattattggctcttgcagcgtctgcccagggacgtgtgtatcgcgcggaagaccctcatggtgcgctccgcggcctcaaagaagtccgtggactccttgccaaagacttagctgttgttgcattgcgcgaaggtcttgatttacctccgactgatgatccaatgcttcttgcgtacctcttggacccgtcaaacacgacgcccgaaggcgtagcccgtcgttacggcggcgagtggaccgaagatgcagccgagcgcgcgttattggccgaacgtttgcacgccaatttattaggacgtttgcaaggcgaggaacgtctcctctggctttacgaagaagtggagaaaccattgagtcgcgtgctcgcgcatatggaagctaccggtgtcaaattagacgtggcgtatttggaggcactcagccttgaagttgctgccgaaatgcgccgcttggaggaagaagtattccgtttagcaggccactcctttaaccttaattctcgcgatcagttagaacgtgtgttgttcgatgaacttggtctccctcctatcggcaagacagagaagaccggtaaacgtagcacttcagcggcggttttagaagctcttcgcgaagtccatcccattgtggacaagatcttgcagtaccgcgaactcgcgaaattgaaaggcacctatattgaccctcttccggcattagtccacccgaaaacgggacgcctccatacccgcttcaaccaaacagccacggcgaccggtcgtttgtcctcctctgatccaaaccttcagaatattccagtacgtaccccattgggccagaagatccgccgcgcgtttgtagctgaggagggttggcgtttagtggccctcgattatagccaaattgaattacgtgtccttgcccatctttctggcgatgagaacctcatccgcgtgtttcaggaaggccgtgacattcacactcaaacggcaagctggatgtttggattatcagctgaagcgatcgatcctttgatgcgtcgtgcagcgaagaccgttaatttcggtgttctctacggtatgagtgcccatcgtttgtcgcaggaattaggcattccctatgaagaagctgtggcgttcattcagcgctactttcaaagctatcccaaagttaaagcatggatcgagaagactctcgaagaaggccgcacacgtggttacgtagagaccttatttggacgtcgccgctatgttcccgatttaaacgctcgcgtgaaatctgtccgtgaagccgccgaacgcatggcgttcaacatgcctgtacagggcacggcagctgacctcatgaaacttgcaatggtgcgcctttttccacaattgcgtgaagttggtgcccgcatgctcttgcaggtccacgatgaactcttgttagaagcgccaaaagagcgtgcggaagaggtggcagccctcgcgaaagaggttatggaaggcgtgtggcccttagcggtgcctcttgaagtcgaagttggtattggcgaggattggttggctgccaaaggataatga

SEQ ID NO: 502 - protein, 841 aa, synthetic construct
  REGION 1..841: note = Variant of DNA polymerase I from Thermus sp. strain 2.9
MHHHHHHGGSGMLPLFEPKGRVLLVDGHHLAYRNFFALKGLTTSRGEPVQGVYGFAKSLLKALKEDGDVVIVVFDAKAPSFRHEAYEAYKAGRAPTPEDFPRQLALMKELVDLLGLERLEVPGFEADDVLATLAKKAEREGYEVQILTADRDLFQLLSPRISVLHPEGHRITPEWLWEKYGLRPEQWVDFRALVGDPSDNIPGVKGIGEKTALKLLKEWGSLENLLKNLDQVKPASVREKILAHLEDLKLSRELSRVRTDLPLEVDFRRRREPDWEGLKAFLERLEFGSLLHEFGLLESPLPAEEAPWPPPEGAFLGYVLSRPEPMWAELLALAASAQGRVYRAEDPHGALRGLKEVRGLLAKDLAVVALREGLDLPPTDDPMLLAYLLDPSNTTPEGVARRYGGEWTEDAAERALLAERLHANLLGRLQGEERLLWLYEEVEKPLSRVLAHMEATGVKLDVAYLEALSLEVAAEMRRLEEEVFRLAGHSFNLNSRDQLERVLFDELGLPPIGKTEKTGKRSTSAAVLEALREVHPIVDKILQYRELAKLKGTYIDPLPALVHPKTGRLHTRFNQTATATGRLSSSDPNLQNIPVRTPLGQKIRRAFVAEEGWRLVALDYSQIELRVLAHLSGDENLIRVFQEGRDIHTQTASWMFGLSAEAIDPLMRRAAKTVNFGVLYGMSAHRLSQELGIPYEEAVAFIQRYFQSYPKVKAWIEKTLEEGRTRGYVETLFGRRRYVPDLNARVKSVREAAERMAFNMPVQGTAADLMKLAMVRLFPQLREVGARMLLQVHDELLLEAPKERAEEVAALAKEVMEGVWPLAVPLEVEVGIGEDWLAAKG

SEQ ID NO: 503 - DNA, 2529 bp, synthetic construct
  misc_feature 1..2529: note = Variant of DNA polymerase I from Thermus sp. strain 2.9
  source 1..2529: mol_type = other DNA
atgcaccatcatcatcatcatggcggtagcggcatgttaccgttgttcgaacctaaaggtcgcgtgcttctggttgatggccatcatctcgcgtatcgtaacttctttgccctgaaaggattaaccaccagccgtggcgagccggtacagggtgtctacggctttgcaaagtcgctcctgaaagctctgaaagaagacggtgatgtggtgattgttgtctttgatgcgaaagcgccaagttttcgccacgaagcgtacgaagcttacaaagccgggcgtgctccaacgccggaagactttcctcgccaattggcgcttatgaaggaattagtggatttgcttggcctcgaacgcttggaagttcccggtttcgaggcagacgacgtattagcgactctcgcaaagaaagccgaacgtgagggctatgaagtccatatcttgacagcagatcgcgatcttttccagcttttatctccgcgcatttccgtgttacacccggaagggcatcgtatcaccccggaatggctctgggagaaatatggtttgcgtcccgaacaatgggtggattttcgcgccttagcgggcgatccgagcgacaatattccgggagttaaaggtatcggcgagaagacggcgctcaagctccttaaagaatgggggtcgttggagaacttgcttaagaatttagatcaggtcaaaccagcttcagtgcgtgagaagattcttgcacacctcgaagacctcaaattaagccgcgaattgtcgcgtgtacgcaccgatttgccgctcgaagttgatttccgtggccgccgcgaacctgactgggagggtcttaaagcgtttttagagcgtcttgaatttggttcgctcttgcatgaattcggccttttagaaagcccgttaccagccgaagaagcaccttggccaccgcccgaaggcgcgtttttaggttaccgtttgagtcgcccggaaccgatgtgggccgaattattggctcttgcagcgtctgcccagggacgtgtgtatcgcgcggaagaccctcatggtgcgctccgtggcctcaaagaagtccgtggactccttgccaaagacttagctgttgttgcattgcgcgaaggtcttgatttacctccgactgatgatccaatgcttcttgcgtacctcttggacccgtcaaacacgacgcccgaaggcgtagcccgtcgttacggcggcgagtggaccgaagatgcaggtgagcgcgcgttattggccgaacgtttgcacgccaatttattaggacgtttgcaaggcgaggaacgtctcctctggctttacgaagaagtggagaaaccattgagtcgcgtgctcgcgcatatggaagctaccggtgtcaaattagacgtggcgtatttggaggcactcagccttgaagtcgctgccgaactgcgccgcttggaggaagaagtattccgtttagcaggccactcctttaaccttaattctcgcgatcagttagaacgtgtgttgttcgatgaacttggtctccctcctatcggcaagacagagaagaccggtaaacgtagcacttcagcggcggttttagaagctcttcgcgaagtccatcccattgtggacaagatcttgcagtaccgcgaactcgcgaaattgaaaggcacctatattgaccgtcttccggcattagtccacccgaaaacgggacgcctccatacccgcttcaaccaaacagccacggcgaccggtcgtttgtcctcctctgatccaaaccttcagaatattccagtacgtaccccattgggccagaaaatccgcaaagcgtttgtagctgaggagggttggcgtttagtggccctcgattatagccaaattgaattacgtgtccttgcccatctttctggcgatgagaacctcatccgcgtgtttcaggaaggccgcgacattcacactcaaacggcaagctggatgtttggactgtcatcggaagcgatcgatcctttgatgcgtcgtgcagcgaagaccatcaatttcggtgttctctacggtatgagtgccgcgcgtttgtcgcaggaattaggcattccctatgaagaagctgcggcgttcattcagcgctactttcaaagctatcccaaagttaaagcatggatcgagaagactctcgaagaaggccgcacacgtggttacgtagagaccttatttggacgtcgccgctatgttcccgatttaactgctcgcgtgaaatctgtccgtgaagccgccgaacgcatggcgtggaacatgcctgtacagggcacggcagctgacctcatgaaacttgcaatggtgcgcctttttccacaattgcgtgaagttggtgcccgcatgctcttgcaggtccacgatgaactcttgttagaagcgccaaaagagcgtgcggaagaggtggcagccctcgcgaaagaggttatggaaggcgtgtggcccttagcggtgcctcttgaagtcgaagttggtattggcgaggattggttggctgccaaaggataatga

SEQ ID NO: 504 - protein, 841 aa, synthetic construct
  REGION 1..841: note = Variant of DNA polymerase I from Thermus sp. strain 2.9
MHHHHHHGGSGMLPLFEPKGRVLLVDGHHLAYRNFFALKGLTTSRGEPVQGVYGFAKSLLKALKEDGDVVIVVFDAKAPSFRHEAYEAYKAGRAPTPEDFPRQLALMKELVDLLGLERLEVPGFEADDVLATLAKKAEREGYEVHILTADRDLFQLLSPRISVLHPEGHRITPEWLWEKYGLRPEQWVDFRALAGDPSDNIPGVKGIGEKTALKLLKEWGSLENLLKNLDQVKPASVREKILAHLEDLKLSRELSRVRTDLPLEVDFRGRREPDWEGLKAFLERLEFGSLLHEFGLLESPLPAEEAPWPPPEGAFLGYRLSRPEPMWAELLALAASAQGRVYRAEDPHGALRGLKEVRGLLAKDLAVVALREGLDLPPTDDPMLLAYLLDPSNTTPEGVARRYGGEWTEDAGERALLAERLHANLLGRLQGEERLLWLYEEVEKPLSRVLAHMEATGVKLDVAYLEALSLEVAAELRRLEEEVFRLAGHSFNLNSRDQLERVLFDELGLPPIGKTEKTGKRSTSAAVLEALREVHPIVDKILQYRELAKLKGTYIDRLPALVHPKTGRLHTRFNQTATATGRLSSSDPNLQNIPVRTPLGQKIRKAFVAEEGWRLVALDYSQIELRVLAHLSGDENLIRVFQEGRDIHTQTASWMFGLSSEAIDPLMRRAAKTINFGVLYGMSAARLSQELGIPYEEAAAFIQRYFQSYPKVKAWIEKTLEEGRTRGYVETLFGRRRYVPDLTARVKSVREAAERMAWNMPVQGTAADLMKLAMVRLFPQLREVGARMLLQVHDELLLEAPKERAEEVAALAKEVMEGVWPLAVPLEVEVGIGEDWLAAKG

SEQ ID NO: 505 - DNA, 2529 bp, synthetic construct
  misc_feature 1..2529: note = Variant of DNA polymerase I from Thermus sp. strain 2.9
  source 1..2529: mol_type = other DNA
atgcaccatcatcatcatcatggcggtagcggcatgttaccgttgttcgaacctaaaggtcgcgtgcttctggttgatggccatcatctcgcgtatcgtaacttctttgccctgaaaggattaaccaccagccgtggcgagccggtacagggtgtctacggctttgcaaagtcgctcctgaaagctctgaaagaagacggtgatgtggtgattgttgtctttgatgcgaaagcgccaagttttcgccacgaagcgtacgaagcttacaaagccgggcgtgctccaacgccggaagactttcctcgccaattggcgcttatgaaggaattagtggatttgcttggcctcgaacgcttggaagttcccggtttcgaggcagacgacgtattagcgactctcgcaaagaaagccgaacgtgagggctatgaagtccagatcttgacagcagatcgcgatcttttccagcttttatctccgcgcgtctcggtgttacacccggaagggcatcgtatcaccccggaatggctctgggagaaatatggtttgcgtcccgaacaatgggtggattttcgcgccttagcaggcgatccgagcgacaatattccgggagttaaaggtatcggcgagaagacggcgctcaagctccttaaagaatgggggtcgttggagaacttgcttaagaatttagatcaggtcaaaccagcgtcagtgcgtgagaagattcttgcacacctcgaagacctcaaattaagcctggaattgtcccgtgtacgcaccgatttgccgctcgaagttgatttccgtggccgccgcgaacctgactgggagggtcttaaagcgtttttagagcgtcttgaatttggttcgctcttgcatgaattcggccttttagaaagcccgttaccagccgaagaagcaccttggccaccgcccgaaggcgcgtttttaggttacgttttgagtcgcccggaaccgatgtgggccgaattattggctcttgcagcgtctgcccagggacgtgtgtatcgcgcggaagaccctcatggtgcgctccgcggcctcaaagaagtccgtggactccttgccaaagacttagctgttgttgcattgcgcgaaggtcttgatttacctccgactgatgatccaatgcttcttgcgtacctcttggacccgtcaaacacgacgcccgaaggcgtagcccgtcgttacggcggcgagtggaccgaagatgcaggcgagcgcgcgttattggccgaacgtttgcacgccaatttattaggacgtttgcaaggcgaggaacgcctcctctggctttacgaagaagtggagaaaccattgagtcgcgtgctcgcgcatatggaagctaccggtgtcaaattagacgtggcgtatttggaggcactcagccttgaagttgctgccgaaatgcgccgcttggaggaagaagtattccgtttagcaggccactcctttaaccttaattctcgcgatcagttagaacgtgtgttgttcgatgaacttggtctccctcctatcggcaagacagagaagaccggtaaacgtagcacttcagcggcggttttagaagctcttcgcgaagtccatcccattgtggacaagatcttgcagtaccgcgaactcgcgaaattgaaaggcacctatattgaccctcttccggcattagtccacccgaaaacgggacgcctccatacccgcttcaaccaaacagccacggcgaccggtcgtttgtcctcctctgatccaaaccttcagaatattccagtacgtaccccattgggccagaagatccgcaaagcgtttgtagctgaggagggttggcgtttagtggccctcgattatagccaaattgaattacgtgtccttgcccatctttctggcgatgagaacctcatccgcgtgtttcaggaaggccgtgacattcacactcaaacggcaagctggatgtttggattatcagctgaagcgatcgatcctttgatgcgtcgtgcagcgaagaccgttaatttcggtgttctctacggtatgagtgcccatcgtttgtcgcaggaattaggcattccctatgaagaagctgcggcgttcattcagcgctactttcaaagctatcccaaagttaaagcatggatcgagaagactctcgaagaaggccgcacacgtggttacgtagagaccttatttggacgtcgccgctatgttcccgatttaaacgctcgcgtgaaatctgtccgtgaagccgccgaacgcatggcgttcaacatgcctgtacagggcacggcagctgacctcatgaaacttgcaatggtgcgcctttttccacaattgcgtgaagttggtgcccgcatgctcttgcaggtccacgatgaactcttgttagaagcgccaaaagagcgtgcggaagaggtggcagccctcgcgaaagaggttatggaaggcgtgtggcccttagcggtgcctcttgaagtcgaagttggtattggcgaggattggttggctgccaaaggataatga

SEQ ID NO: 506 - protein, 841 aa, synthetic construct
  REGION 1..841: note = Variant of DNA polymerase I from Thermus sp. strain 2.9
MHHHHHHGGSGMLPLFEPKGRVLLVDGHHLAYRNFFALKGLTTSRGEPVQGVYGFAKSLLKALKEDGDVVIVVFDAKAPSFRHEAYEAYKAGRAPTPEDFPRQLALMKELVDLLGLERLEVPGFEADDVLATLAKKAEREGYEVQILTADRDLFQLLSPRVSVLHPEGHRITPEWLWEKYGLRPEQWVDFRALAGDPSDNIPGVKGIGEKTALKLLKEWGSLENLLKNLDQVKPASVREKILAHLEDLKLSLELSRVRTDLPLEVDFRGRREPDWEGLKAFLERLEFGSLLHEFGLLESPLPAEEAPWPPPEGAFLGYVLSRPEPMWAELLALAASAQGRVYRAEDPHGALRGLKEVRGLLAKDLAVVALREGLDLPPTDDPMLLAYLLDPSNTTPEGVARRYGGEWTEDAGERALLAERLHANLLGRLQGEERLLWLYEEVEKPLSRVLAHMEATGVKLDVAYLEALSLEVAAEMRRLEEEVFRLAGHSFNLNSRDQLERVLFDELGLPPIGKTEKTGKRSTSAAVLEALREVHPIVDKILQYRELAKLKGTYIDPLPALVHPKTGRLHTRFNQTATATGRLSSSDPNLQNIPVRTPLGQKIRKAFVAEEGWRLVALDYSQIELRVLAHLSGDENLIRVFQEGRDIHTQTASWMFGLSAEAIDPLMRRAAKTVNFGVLYGMSAHRLSQELGIPYEEAAAFIQRYFQSYPKVKAWIEKTLEEGRTRGYVETLFGRRRYVPDLNARVKSVREAAERMAFNMPVQGTAADLMKLAMVRLFPQLREVGARMLLQVHDELLLEAPKERAEEVAALAKEVMEGVWPLAVPLEVEVGIGEDWLAAKG

SEQ ID NO: 507 - DNA, 2529 bp, synthetic construct
  misc_feature 1..2529: note = Variant of DNA polymerase I from Thermus sp. strain 2.9
  source 1..2529: mol_type = other DNA
atgcaccatcatcatcatcatggcggtagcggcatgttaccgttgttcgaacctaaaggtcgcgtgcttctggttgatggccatcatctcgcgtatcgtaacttctttgccctgaaaggattaaccaccagccgtggcgagccggtacagggtgtctacggctttgcaaagtcgctcctgaaagctctgaaagaagacggtgatgtggtgattgttgtctttgatgcgaaagcgccaagttttcgccacgaagcgtacgaagcttacaaagccgggcgtgctccaacgccggaagactttcctcgccaattggcgcttatgaaggaattagtggatttgcttggcctcgaacgcttggaagttcccggtttcgaggcagacgacgtattagcgactctcgcaaagaaagccgaacgtgagggctatgaagtccatatcttgacagcagatcgcgatcttttccagcttttatctccgcgcatttccgtgttacacccggaagggcatcgtatcaccccggaatggctctgggagaaatatggtttgcgtcccgaacaatgggtggattttcgcgccttagcgggcgatccgagcgacaatattccgggagttaaaggtatcggcgagaagacggcgctcaagctccttaaagaatgggggtcgttggagaacttgcttaagaatttagatcaggtcaaaccagcttcagtgcgtgagaagattcttgcacacctcgaagacctcaaattaagccgcgaattgtcccgtgtacgcaccgatttgccgctcgaagttgatttccgtggccgccgcgaacctgactgggagggtcttaaagcgtttttagagcgtcttgaactgggttcgctcttgcatgaattcggccttttagaaagcccgttaccagccgaagaagcaccttggccaccgcccgaaggcgcgtttttaggttaccgtttgagtcgcccggaaccgatgtgggccgaattattggctcttgcagcgtctgcccagggacgtgtgtatcgcgcggaagaccctcatggtgcgctccgtggcctcaaagaagtccgtggactccttgccaaagacttagctgttgttgcattgcgcgaaggtcttgatttacctccgactgatgatccaatgcttcttgcgtacctcttggactcgtcaaacacgacgcccgaaggcgtagcccgtcgttacggcggcgagtggaccgaagatgcaggtgagcgcgcgttattggccgaacgtttgcacgccaatttattaggacgtttgcaaggcgaggaacgtctcctctggctttacgaagaagtggagaaaccattgagtcgcgtgctcgcgcatatggaagctaccggtgtcaaattagacgtggcgtatttggaggcactcagccttgaagtcgctgccgaactgcgccgcttggaggaagaagtattccgtttagcaggccactcctttaaccttaattctcgcgatcagttagaacgtgtgttgttcgatgaacttggtctccctcctatcggtaagacagagaagaccggtaaacgtagcacttcagcggcggttttagaagctcttcgcgaagtccatcccattgtggacaagatcttgcagtaccgcgaactcgcgaaattgaaaggcacctatattgaccctcttccggcattagtccacccgaaaacgggacgcctccatacccgcttcaaccaaacagccacggcgaccggtcgtttgtcctcctctgatccaaaccttcagaatattccagtacgtaccccattgggccagaagatccgcaaagcgtttgtagctgaggagggttggcgtttagtggccctcgattatagccaaattgaattacgtgtccttgcccatctttctggcgatgagaacctcatccgcgtgtttcaggaaggccgcgacattcacactcaaacggcaagctggatgtttggagtgtcatcggaagcgatcgatcctttgatgcgtcgtgcagcgaagaccatcaatttcggtgttctctacggtatgagtgccgcgcgtttgtcgcaggaattaggcattccctatgaagaagctgcggcgttcattcagcgctactttcaaagctatcccaaagttaaagcatggatcgagaagactctcgaagaaggccgcacacgtggttacgtagagaccttatttggacgtcgccgctatgttcccgatttaaatgctcgcgtgaaatctgtccgtgaagccgccgaacgcatggcgtttaacatgcctgtacagggcacggcagctgacctcatgaaacttgcaatggtgcgcctttttccacaattgcgtgaagttggtgcccgcatgctcttgcaggtccacgatgaactcttgttagaagcgccaaaagagcgtgcggaagaggtggcagccctcgcgaaagaggttatggaaggcgtgtggcccttagcggtgcctcttgaagtcgaagttggtattggcgaggattggttggctgccaaaggataatga

SEQ ID NO: 508 - protein, 841 aa, synthetic construct
  REGION 1..841: note = Variant of DNA polymerase I from Thermus sp. strain 2.9
MHHHHHHGGSGMLPLFEPKGRVLLVDGHHLAYRNFFALKGLTTSRGEPVQGVYGFAKSLLKALKEDGDVVIVVFDAKAPSFRHEAYEAYKAGRAPTPEDFPRQLALMKELVDLLGLERLEVPGFEADDVLATLAKKAEREGYEVHILTADRDLFQLLSPRISVLHPEGHRITPEWLWEKYGLRPEQWVDFRALAGDPSDNIPGVKGIGEKTALKLLKEWGSLENLLKNLDQVKPASVREKILAHLEDLKLSRELSRVRTDLPLEVDFRGRREPDWEGLKAFLERLELGSLLHEFGLLESPLPAEEAPWPPPEGAFLGYRLSRPEPMWAELLALAASAQGRVYRAEDPHGALRGLKEVRGLLAKDLAVVALREGLDLPPTDDPMLLAYLLDSSNTTPEGVARRYGGEWTEDAGERALLAERLHANLLGRLQGEERLLWLYEEVEKPLSRVLAHMEATGVKLDVAYLEALSLEVAAELRRLEEEVFRLAGHSFNLNSRDQLERVLFDELGLPPIGKTEKTGKRSTSAAVLEALREVHPIVDKILQYRELAKLKGTYIDPLPALVHPKTGRLHTRFNQTATATGRLSSSDPNLQNIPVRTPLGQKIRKAFVAEEGWRLVALDYSQIELRVLAHLSGDENLIRVFQEGRDIHTQTASWMFGVSSEAIDPLMRRAAKTINFGVLYGMSAARLSQELGIPYEEAAAFIQRYFQSYPKVKAWIEKTLEEGRTRGYVETLFGRRRYVPDLNARVKSVREAAERMAFNMPVQGTAADLMKLAMVRLFPQLREVGARMLLQVHDELLLEAPKERAEEVAALAKEVMEGVWPLAVPLEVEVGIGEDWLAAKG

SEQ ID NO: 509 - DNA, 2529 bp, synthetic construct
  misc_feature 1..2529: note = Variant of DNA polymerase I from Thermus sp. strain 2.9
  source 1..2529: mol_type = other DNA
atgcaccatcatcatcatcatggcggtagcggcatgttaccgttgttcgaacctaaaggtcgcgtgcttctggttgatggccatcatctcgcgtatcgtaacttctttgccctgaaaggattaaccaccagccgtggcgagccggtacagggtgtctacggctttgcaaagtcgctcctgaaagctctgaaagaagacggtgatgtggtgattgttgtctttgatgcgaaagcgccaagttttcgccacgaagcgtacgaagcttacaaagccgggcgtgctccaacgccggaagactttcctcgccaattggcgcttatgaaggaattagtggatttgcttggcctcgaacgcttggaagttcccggtttcgaggcagacgacgtattagcgactctcgcaaagaaagccgaacgtgagggctatgaagtccagatcttgacagcagatcgcgatcttttccagcttttatctccgcgcatttccgtgttacacccggaagggcatcgtatcaccccggaatggctctgggagaaatatggtttgcgtcccgaacaatgggtggattttcgcgccttagcgggcgatccgagcgacaatattccgggagttaaaggtatcggcgagaagacggcgctcaagctccttaaagaatgggggtcgttggagaacttgcttaagaatttagatcaggtcaaaccagcttcagtgcgtgagaagattcttgcacacctcgaagacctcaaattaagccgcgaattgtcccgtgtacgcaccgatttgccgctcgaagttgatttccgtggccgccgcgaacctgactgggagggtcttaaagcgtttttagagcgtcttgaactgggttcgctcttgcatgaattcggccttttagaaagcccgttaccagccgaagaagcaccttggccaccgcccgaaggcgcgtttttaggttaccgtttgagtcgcccggaaccgatgtgggccgaattattggctcttgcagcgtctgcccagggacgtgtgtatcgcgcggaagaccctcatggtgcgctccgtggcctcaaagaagtccgtggactccttgccaaagacttagctgttgttgcattgcgcgaaggtcttgatttacctccgactgatgatccaatgcttcttgcgtacctcttggactcgtcaaacacgacgcccgaaggcgtagcccgtcgttacggcggcgagtggaccgaagatgcaggtgagcgcgcgttattggccgaacgtttgcacgccaatttattaggacgtttgcaaggcgaggaacgtctcctctggctttacgaagaagtggagaaaccattgagtcgcgtgctcgcgcatatggaagctaccggtgtcaaattagacgtggcgtatttggaggcactcagccttgaagccgctgccgaaatgcgccgcttggaggaagaagtattccgtttagcaggccactcctttaaccttaattctcgcgatcagttagaacgtgtgttgttcgatgaacttggtctccctcctatcggcaagacagagaagaccggtaaacgtagcacttcagcggcggttttagaagctcttcgcgaagtccatcccattgtggacaagatcttgcagtaccgcgaactcgcgaaattgaaaggcacctatattgaccctcttccggcattagtccacccgaaaacgggacgcctccatacccgcttcaaccaaacagccacggcgaccggtcgtttgtcctcctctgatccaaaccttcagaatattccagtacgtaccccattgggccagaaaatccgcaaagcgtttgtagctgaggagggttggcgtttagtggccctcgattatagccaaattgaattacgtgtccttgcccatctttctggcgatgagaacctcatccgcgtgtttcaggaaggccgcgacattcacactcaaacggcaagctggatgtttggattatcagctgaagcgatcgatcctttgatgcgtcgtgcagcgaagaccatcaatttcggtgttctctacggtatgagtgcccatcgtttgtcgcaggaattaggcattccctatgaagaagctgcggcgttcattcagcgctactttcaaagctatcccaaagttaaagcatggatcgagaagactctcgaagaaggccgcacacgtggttacgtagagaccttatttggacgtcgccgctatgttcccgatttaaacgctcgcgtgaaatctgtccgtgaagccgccgaacgcatggcgtttaacatgcctgtacagggcacggcagctgacctcatgaaacttgcaatggtgcgcctttttccacaattgcgtgaagttggtgcccgcatgctcttgcaggtccacgatgaactcttgttagaagcgccaaaagagcgtgcggaagaggtggcagccctcgcgaaagaggttatggaaggcgtgtggcccttagcggtgcctcttgaagtcgaagttggtattggcgaggattggttggctgccaaaggataatga

SEQ ID NO: 510 - protein, 841 aa, synthetic construct
  REGION 1..841: note = Variant of DNA polymerase I from Thermus sp. strain 2.9
MHHHHHHGGSGMLPLFEPKGRVLLVDGHHLAYRNFFALKGLTTSRGEPVQGVYGFAKSLLKALKEDGDVVIVVFDAKAPSFRHEAYEAYKAGRAPTPEDFPRQLALMKELVDLLGLERLEVPGFEADDVLATLAKKAEREGYEVQILTADRDLFQLLSPRISVLHPEGHRITPEWLWEKYGLRPEQWVDFRALAGDPSDNIPGVKGIGEKTALKLLKEWGSLENLLKNLDQVKPASVREKILAHLEDLKLSRELSRVRTDLPLEVDFRGRREPDWEGLKAFLERLELGSLLHEFGLLESPLPAEEAPWPPPEGAFLGYRLSRPEPMWAELLALAASAQGRVYRAEDPHGALRGLKEVRGLLAKDLAVVALREGLDLPPTDDPMLLAYLLDSSNTTPEGVARRYGGEWTEDAGERALLAERLHANLLGRLQGEERLLWLYEEVEKPLSRVLAHMEATGVKLDVAYLEALSLEAAAEMRRLEEEVFRLAGHSFNLNSRDQLERVLFDELGLPPIGKTEKTGKRSTSAAVLEALREVHPIVDKILQYRELAKLKGTYIDPLPALVHPKTGRLHTRFNQTATATGRLSSSDPNLQNIPVRTPLGQKIRKAFVAEEGWRLVALDYSQIELRVLAHLSGDENLIRVFQEGRDIHTQTASWMFGLSAEAIDPLMRRAAKTINFGVLYGMSAHRLSQELGIPYEEAAAFIQRYFQSYPKVKAWIEKTLEEGRTRGYVETLFGRRRYVPDLNARVKSVREAAERMAFNMPVQGTAADLMKLAMVRLFPQLREVGARMLLQVHDELLLEAPKERAEEVAALAKEVMEGVWPLAVPLEVEVGIGEDWLAAKG

SEQ ID NO: 511 - DNA, 2529 bp, synthetic construct
  misc_feature 1..2529: note = Variant of DNA polymerase I from Thermus sp. strain 2.9
  source 1..2529: mol_type = other DNA
atgcaccatcatcatcatcatggcggtagcggcatgttaccgttgttcgaacctaaaggtcgcgtgcttctggttgatggccatcatctcgcgtatcgtaacttctttgccctgaaaggattaaccaccagccgtggcgagccggtacagggtgtctacggctttgcaaagtcgctcctgaaagctctgaaagaagacggtgatgtggtgattgttgtctttgatgcgaaagcgccaagttttcgccacgaagcgtacgaagcttacaaagccgggcgtgctccaacgccggaagactttcctcgccaattggcgcttatgaaggaattagtggatttgcttggcctcgaacgcttggaagttcccggtttcgaggcagacgacgtattagcgactctcgcaaagaaagccgaacgtgagggctatgaagtccagatcttgacagcagatcgcgatcttttccagcttttatctccgcgcgtctcggtgttacacccggaagggcatctgatcaccccggaatggctctgggagaaatatggtttgcgtcccgaacaatgggtggattttcgcgccttagcgggcgatccgagcgacaatattccgggagttaaaggtatcggcgagaagacggcgctcaagctccttaaagaatgggggtcgttggagaacttgcttaagaatttagatcaggtcaaaccagcgtcagtgcgtgagaagattcttgcacacctcgaagacctcaaattaagccgcgaattgtcccgtgtacgcaccgatttgccgctcgaagttgatttccgtggccgccgcgaacctgactgggagggtcttaaagcgtttttagagcgtcttgaatttggttcgctcttgcatgaattcggccttttagaaagcccgttaccagccgaagaagcaccttggccaccgcccgaaggcgcgtttttaggttaccgtttgagtcgcccggaaccgatgtgggccgaattattggctcttgcagcgtctgcccagggacgtgtgtatcgcgcggaagaccctcatggtgcgctccgtggcctcaaagaagtccgtggactccttgccaaagacttagctgttgttgcattgcgcgaaggtcttgatttacctccgactgatgatccaatgcttcttgcgtacctcttggacccgtcaaacacgacgcccgaaggcgtagcccgtcgttacggcggcgagtggaccgaagatgcaggtgagcgcgcgttattggccgaacgtttgcacgccaatttattaggacgtttgcaaggcgaggaacgtctcctctggctttacgaagaagtggagaaaccattgagtcgcgtgctcgcgcatatggaagctaccggtgtcaaattagacgtggcgtatttggaggcactcagccttgaagttgctgccgaaattcgccgcttggaggaagaagtattccgtttagcaggccactcctttaaccttaattctcgcgatcagttagaacgtgtgttgttcgatgaacttggtctccctcctatcggcaagacagagaagaccggtaaacgtagcacttcagcggcggttttagaagctcttcgcgaagtccatcccattgtggacaagatcttgcagtaccgcgaactcgcgaaattgaaaggcacctatattgaccctcttccggcattagtccacccgaaaacgggacgcctccatacccgcttcaaccaaacagccacggcgaccggtcgtttgtcctcctctgatccaaaccttcagaatattccagtacgtaccccattgggccagaagatccgcaaagcgtttgtagctgaggagggttggcgtttagtggccctcgattatagccaaattgaattacgtgtccttgcccatctttctggcgatgagaacctcatccgcgtgtttcaggaaggccgcgacattcacactcaaacggcaagctggatgtttggattatcagctgaagcgatcgatcctttgatgcgtcgtgcagcgaagaccatcaatttcggtgttctctacggtatgagtgcccatcgtttgtcgcaggaattaggcattccctatgaagaagctgcggcgttcattcagcgctactttcaaagctatcccaaagttaaagcatggatcgagaagactctcgaagaaggccgcacacgtggttacgtagagaccttatttggacgtcgccgctatgttcccgatttaaacgctcgcgtgaaatctgtccgtgaagccgccgaacgcatggcgttcaacatgcctgtacagggcacggcagctgacctcatgaaacttgcaatggtgcgcctttttccacaattgcgtgaagttggtgcccgcatgctcttgcaggtccacgatgaactcttgttagaagcgccaaaagagcgtgcggaagaggtggcagccctcgcgaaagaggttatggaaggcgtgtggcccttagcggtgcctcttgaagtcgaagttggtattggcgaggattggttggctgccaaaggataatga

SEQ ID NO: 512 - protein, 841 aa, synthetic construct
  REGION 1..841: note = Variant of DNA polymerase I from Thermus sp. strain 2.9
MHHHHHHGGSGMLPLFEPKGRVLLVDGHHLAYRNFFALKGLTTSRGEPVQGVYGFAKSLLKALKEDGDVVIVVFDAKAPSFRHEAYEAYKAGRAPTPEDFPRQLALMKELVDLLGLERLEVPGFEADDVLATLAKKAEREGYEVQILTADRDLFQLLSPRVSVLHPEGHLITPEWLWEKYGLRPEQWVDFRALAGDPSDNIPGVKGIGEKTALKLLKEWGSLENLLKNLDQVKPASVREKILAHLEDLKLSRELSRVRTDLPLEVDFRGRREPDWEGLKAFLERLEFGSLLHEFGLLESPLPAEEAPWPPPEGAFLGYRLSRPEPMWAELLALAASAQGRVYRAEDPHGALRGLKEVRGLLAKDLAVVALREGLDLPPTDDPMLLAYLLDPSNTTPEGVARRYGGEWTEDAGERALLAERLHANLLGRLQGEERLLWLYEEVEKPLSRVLAHMEATGVKLDVAYLEALSLEVAAEIRRLEEEVFRLAGHSFNLNSRDQLERVLFDELGLPPIGKTEKTGKRSTSAAVLEALREVHPIVDKILQYRELAKLKGTYIDPLPALVHPKTGRLHTRFNQTATATGRLSSSDPNLQNIPVRTPLGQKIRKAFVAEEGWRLVALDYSQIELRVLAHLSGDENLIRVFQEGRDIHTQTASWMFGLSAEAIDPLMRRAAKTINFGVLYGMSAHRLSQELGIPYEEAAAFIQRYFQSYPKVKAWIEKTLEEGRTRGYVETLFGRRRYVPDLNARVKSVREAAERMAFNMPVQGTAADLMKLAMVRLFPQLREVGARMLLQVHDELLLEAPKERAEEVAALAKEVMEGVWPLAVPLEVEVGIGEDWLAAKG

SEQ ID NO: 513 - DNA, 2529 bp, synthetic construct
  misc_feature 1..2529: note = Variant of DNA polymerase I from Thermus sp. strain 2.9
  source 1..2529: mol_type = other DNA
atgcaccatcatcatcatcatggcggtagcggcatgttaccgttgttcgaacctaaaggtcgcgtgcttctggttgatggccatcatctcgcgtatcgtaacttctttgccctgaaaggattaaccaccagccgtggcgagccggtacagggtgtctacggctttgcaaagtcgctcctgaaagctctgaaagaagacggtgatgtggtgattgttgtctttgatgcgaaagcgccaagttttcgccacgaagcgtacgaagcttacaaagccgggcgtgctccaacgccggaagactttcctcgccaattggcgcttatgaaggaattagtggatttgcttggcctcgaacgcttggaagttcccggtttcgaggcagacgacgtattagcgactctcgcaaagaaagccgaacgtgagggctatgaagtccagatcttgacagcagatcgcgatcttttccagcttttatctccgcgcatttccgtgttacacccggaagggcatcgtatcaccccggaatggctctgggagaaatatggtttgcgtcccgaacaatgggtggattttcgcgccttagcgggcgatccgagcgacaatattccgggagttaaaggtatcggcgagaagacggcgctcaagctccttaaagaatgggggtcgttggagaacttgcttaagaatttagatcaggtcaaaccagcttcagtgcgtgagaagattcttgcacacctcgaagacctcaaattaagccgcgaattgtcccgtgtacgcaccgatttgccgctcgaagttgatttccgtggccgccgcgaacctgactgggagggtcttaaagcgtttttagagcgtcttgaatttggttcgctcttgcatgaattcggccttttagaaagcccgttaccagccgaagaagcaccttggccaccgcccgaaggcgcgtttttaggttaccgtttgagtcgcccggaaccgatgtgggccgaattattggctcttgcagcgtctgcccagggacgtgtgtatcgcgcggaagaccctcatggtgcgctccgtggcctcaaagaagtccgtggactccttgccaaagacttagctgttgttgcattgcgcgaaggtcttgatttacctccgactgatgatccaatgcttcttgcgtacctcttggacccgtcaaacacgacgcccgaaggcgtagcccgtcgttacggcggcgagtggaccgaagatgcaggtgagcgcgcgttattggccgaacgtttgcacgccaatttattaggacgtttgcaaggcgaggaacgtctcctctggctttacgaagaagtggagaaaccattgagtcgcgtgctcgcgcatatggaagtaaccggtgtcaaattagacgtggcgtatttggaggcactcagccttgaagttgctgccgaaatgcgccgcttggaggaagaagtattccgtttagcaggccactcctttaaccttaattctcgcgatcagttagaacgtgtgttgttcgatgaacttggtctccctcctatcggcaagacagagaagaccggtaaacgtagcacttcagcggcggttttagaagctcttcgcgaagtccatcccattgtggacaagatcttgcagtaccgcgaactcgcgaaattgaaaggcacctatattgaccctcttccggcattagtccacccgaaaacgggacgcctccatacccgcttcaaccaaacagccacggcgaccggtcgtttgtcctcctctgatccaaaccttcagaatattccagtacgtaccccattgggccagaagatccgcaaagcgtttgtagctgaggagggttggcgtttagtggccctcgattatagccaaattgaattacgtgtccttgcccatctttctggcgatgagaacctcatccgcgtgtttcaggaaggccgcgacattcacactcaaacggcaagctggatgtttggattatcagctgaagcgatcgatcctttgatgcgtcgtgcagcgaagaccatcaatttcggtgttctctacggtatgagtgcccatcgtttgtcgcaggaattaggcattccctatgaagaagctgcggcgttcattcagcgctactttcaaagctatcccaaagttaaagcatggatcgagaagactctcgaagaaggccgcacacgtggttacgtagagaccttatttggacgtcgccgctatgttcccgatttaaacgctcgcgtgaaatctgtccgtgaagccgccgaacgcatggcgttcaacatgcctgtacagggcacggcagctgacctcatgaaacttgcaatggtgcgcctttttccacaattgcgtgaagttggtgcccgcatgctcttgcaggtccacgatgaactcttgttagaagcgccaaaagagcgtgcggaagaggtggcagccctcgcgaaagaggttatggaaggcgtgtggcccttagcggtgcctcttgaagtcgaagttggtattggcgaggattggttggctgccaaaggataatga

SEQ ID NO: 514 - protein, 841 aa, synthetic construct
  REGION 1..841: note = Variant of DNA polymerase I from Thermus sp. strain 2.9
MHHHHHHGGSGMLPLFEPKGRVLLVDGHHLAYRNFFALKGLTTSRGEPVQGVYGFAKSLLKALKEDGDVVIVVFDAKAPSFRHEAYEAYKAGRAPTPEDFPRQLALMKELVDLLGLERLEVPGFEADDVLATLAKKAEREGYEVQILTADRDLFQLLSPRISVLHPEGHRITPEWLWEKYGLRPEQWVDFRALAGDPSDNIPGVKGIGEKTALKLLKEWGSLENLLKNLDQVKPASVREKILAHLEDLKLSRELSRVRTDLPLEVDFRGRREPDWEGLKAFLERLEFGSLLHEFGLLESPLPAEEAPWPPPEGAFLGYRLSRPEPMWAELLALAASAQGRVYRAEDPHGALRGLKEVRGLLAKDLAVVALREGLDLPPTDDPMLLAYLLDPSNTTPEGVARRYGGEWTEDAGERALLAERLHANLLGRLQGEERLLWLYEEVEKPLSRVLAHMEVTGVKLDVAYLEALSLEVAAEMRRLEEEVFRLAGHSFNLNSRDQLERVLFDELGLPPIGKTEKTGKRSTSAAVLEALREVHPIVDKILQYRELAKLKGTYIDPLPALVHPKTGRLHTRFNQTATATGRLSSSDPNLQNIPVRTPLGQKIRKAFVAEEGWRLVALDYSQIELRVLAHLSGDENLIRVFQEGRDIHTQTASWMFGLSAEAIDPLMRRAAKTINFGVLYGMSAHRLSQELGIPYEEAAAFIQRYFQSYPKVKAWIEKTLEEGRTRGYVETLFGRRRYVPDLNARVKSVREAAERMAFNMPVQGTAADLMKLAMVRLFPQLREVGARMLLQVHDELLLEAPKERAEEVAALAKEVMEGVWPLAVPLEVEVGIGEDWLAAKG

SEQ ID NO: 515 - DNA, 2529 bp, synthetic construct
  misc_feature 1..2529: note = Variant of DNA polymerase I from Thermus sp. strain 2.9
  source 1..2529: mol_type = other DNA
atgcaccatcatcatcatcatggcggtagcggcatgttaccgttgttcgaacctaaaggtcgcgtgcttctggttgatggccatcatctcgcgtatcgtaacttctttgccctgaaaggattaaccaccagccgtggcgagccggtacagggtgtctacggctttgcaaagtcgctcctgaaagctctgaaagaagacggtgatgtggtgattgttgtctttgatgcgaaagcgccaagttttcgccacgaagcgtacgaagcttacaaagccgggcgtgctccaacgccggaagactttcctcgccaattggcgcttatgaaggaattagtggatttgcttggcctcgaacgcttggaagttcccggtttcgaggcagacgacgtattagcgactctcgcaaagaaagccgaacgtgagggctatgaagtccagatcttgacagcagatcgcgatcttttccagcttttatctccgcgcatttcggtgttacacccggaagggcatcgtatcaccccggaatggctctgggagaaatatggtttgcgtcccgaacaatgggtggattttcgcgccttagcgggcgatccgagcgacaatattccgggagttaaaggtatcggcgagaagacggcgctcaagctccttaaagaatgggggtcgttggagaacttgcttaagaatttagatcaggtcaaaccagcttcagtgcgtgagaagattcttgcacacctcgaagacctcaaattaagccgcgaattgtcccgtgtacgcaccgatttgccgctcgaagttgatttccgtcgccgccgcgaacctgactgggagggtcttaaagcgtttttagagcgtcttgaatttggttcgctcttgcatgaattcggccttttagaaagcccgttaccagccgaagaagcaccttggccaccgcccgaaggcgcgtttttaggttaccgtttgagtcgcccggaaccgatgtgggccgaattattggctcttgcagcgtctgcccagggacgtgtgtatcgcgcggaagaccctcatggtgcgctcaaaggcctcaaagaagtccgtggactccttgccaaagacttagctgttgttgcattgcgcgaaggtcttgatttacctccgactgatgatccaatgcttcttgcgtacctcttggacccgtcaaacacgacgcccgaaggcgtagcccgtcgttacggcggcgagtggaccgaagatgcaggtgagcgcgcgttattggccgaacgtttgcacgccaatttattaggacgtttgcaaggcgaggaacgtctcctctggctttacgaagaagtggagaaaccattgagtcgcgtgctcgcgcatatggaagctaccggtgtcaaattagacgtggcgtatttggaggcactcagccttgaagttgctgccgaaatgcgccgcttggaggaagaagtattccgtttagcaggccactcctttaaccttaattctcgcgatcagttagaacgtgtgttgttcgatgaacttggtctccctcctatcggcaagacagagaagaccggtaaacgtagcacttcagcggcggttttagaagctcttcgcgaagtccatcccattgtggacaagatcttgcagtaccgcgaactcgcgaaattgaaaggcacctatattgaccctcttccggcattagtccacccgaaaacgggacgcctccatacccgcttcaaccaaacagccacggcgaccggtcgtttgtcctcctctgatccaaaccttcagaatattccagtacgtaccccattgggccagaagatccgcaaagcgtttgtagctgaggagggttggcgtttagtggccctcgattatagccaaattgaattacgtgtccttgcccatctttctggcgatgagaacctcatccgcgtgtttcaggaaggccgcgacattcacactcaaacggcaagctggatgtttggattatcagctgaagcgatcgatcctttgatgcgtcgtgcagcgaagaccatcaatttcggtgttctctacggtatgagtgcccatcgtttgtcgcaggaattaggcattccctatgaagaagctgcggcgttcattcagcgctactttcaaagctatcccaaagttaaagcatggatcgagaagactctcgaagaaggccgcacacgtggttacgtagagaccttatttggacgtcgccgctatgttcccgatttaaacgctcgcgtgaaatctgtccgtgaagccgccgaacgcatggcgttcaacatgcctgtacagggcacggcagctgacctcatgaaacttgcaatggtgcgcctttttccacaattgcgtgaagttggtgcccgcatgctcttgcaggtccacgatgaactcttgttagaagcgccaaaagagcgtgcggaagaggtggcagccctcgcgaaagaggttatggaaggcgtgtggcccttagcggtgcctcttgaagtcgaagttggtattggcgaggattggttggctgccaaaggataatga

SEQ ID NO: 516 - protein, 841 aa, synthetic construct
  REGION 1..841: note = Variant of DNA polymerase I from Thermus sp. strain 2.9
MHHHHHHGGSGMLPLFEPKGRVLLVDGHHLAYRNFFALKGLTTSRGEPVQGVYGFAKSLLKALKEDGDVVIVVFDAKAPSFRHEAYEAYKAGRAPTPEDFPRQLALMKELVDLLGLERLEVPGFEADDVLATLAKKAEREGYEVQILTADRDLFQLLSPRISVLHPEGHRITPEWLWEKYGLRPEQWVDFRALAGDPSDNIPGVKGIGEKTALKLLKEWGSLENLLKNLDQVKPASVREKILAHLEDLKLSRELSRVRTDLPLEVDFRRRREPDWEGLKAFLERLEFGSLLHEFGLLESPLPAEEAPWPPPEGAFLGYRLSRPEPMWAELLALAASAQGRVYRAEDPHGALKGLKEVRGLLAKDLAVVALREGLDLPPTDDPMLLAYLLDPSNTTPEGVARRYGGEWTEDAGERALLAERLHANLLGRLQGEERLLWLYEEVEKPLSRVLAHMEATGVKLDVAYLEALSLEVAAEMRRLEEEVFRLAGHSFNLNSRDQLERVLFDELGLPPIGKTEKTGKRSTSAAVLEALREVHPIVDKILQYRELAKLKGTYIDPLPALVHPKTGRLHTRFNQTATATGRLSSSDPNLQNIPVRTPLGQKIRKAFVAEEGWRLVALDYSQIELRVLAHLSGDENLIRVFQEGRDIHTQTASWMFGLSAEAIDPLMRRAAKTINFGVLYGMSAHRLSQELGIPYEEAAAFIQRYFQSYPKVKAWIEKTLEEGRTRGYVETLFGRRRYVPDLNARVKSVREAAERMAFNMPVQGTAADLMKLAMVRLFPQLREVGARMLLQVHDELLLEAPKERAEEVAALAKEVMEGVWPLAVPLEVEVGIGEDWLAAKG

SEQ ID NO: 517 - DNA, 2529 bp, synthetic construct
  misc_feature 1..2529: note = Variant of DNA polymerase I from Thermus sp. strain 2.9
  source 1..2529: mol_type = other DNA
atgcaccatcatcatcatcatggcggtagcggcatgttaccgttgttcgaacctaaaggtcgcgtgcttctggttgatggccatcatctcgcgtatcgtaacttctttgccctgaaaggattaaccaccagccgtggcgagccggtacagggtgtctacggctttgcaaagtcgctcctgaaagctctgaaagaagacggtgatgtggtgattgttgtctttgatgcgaaagcgccaagttttcgccacgaagcgtacgaagcttacaaagccgggcgtgctccaacgccggaagactttcctcgccaattggcgcttatgaaggaattagtggatttgcttggcctcgaacgcttggaagttcccggtttcgaggcagacgacgtattagcgactctcgcaaagaaagccgaacgtgagggctatgaagtccagatcttgacagcagatcgcgatcttttccagcttttatctccgcgcatttccgtgttacacccggaagggcatcgtatcaccccggaatggctctgggagaaatatggtttgcgtcccgaacaatgggtggattttcgcgccttagcgggcgatccgagcgacaatattccgggagttaaaggtatcggcgagaagacggcgctcaagctccttaaagaatgggggtcgttggagaacttgcttaagaatttagatcaggtcaaaccagcttcagtgcgtgagaagattcttgcacacctcgaagacctcaaattaagccgcgaattgtcccgtgtacgcaccgatttgccgctcgaagttgatttccgtggccgccgcgaacctgactgggagggtcttaaagcgtttttagagcgtcttgaatttggttcgctcttgcatgaattcggccttttagaaagcccgttaccagccgaagaagcaccttggccaccgcccgaaggcgcgtttttaggttaccgtttgagtcgcccggaaccgatgtgggccgaattattggctcttgcagcgtctgcccagggacgtgtgtatcgcgcggaagaccctcatggtgcgctccgtggcctcaaagaagtccgtggactccttgccaaagacttagctgttgttgcattgcgcgaaggtcttgatttacctccgactgatgatccaatgcttcttgcgtacctcttggacccgtcaaacacgacgcccgaaggcgtagcccgtcgttacggcggcgagtggaccgaagatgcaggtgagcgcgcgttattggccgaacgtttgcacgccaatttattaggacgtttgcaaggcgaggaacgtctcctctggctttacgaagaagtggagaaaccattgagtcgcgtgctcgcgcatatggaagctaccggtgtcaaattagacgtggcgtatttggaggcactcagccttgaagttgctgccgaaatgcgccgcttggaggaagaagtattccgtttagcaggccactcctttaaccttaattctcgcgatcagttagaacgtgtgttgttcgatgaacttggtctccctcctatcggcaagacagagaagaccggtaaacgtagcacttcagcggcggttttagaagctcttcgcgaagtccatcccattgtggacaagatcttgcagtaccgcgaactcgcgaaattgaaaggcacctatattgaccctcttccggcattagtccacccgaaaacgggacgcctccatacccgcttcaaccaaacagccacggcgaccggtcgtttgtcctcctctgatccaaaccttcagaatattccagtacgtaccccattgggccagaagatccgcaaagcgtttgtagctgaggagggttggcgtttagtggccctcgattatagccaaattgaattacgtgtccttgcccatctttctggcgatgagaacctcatccgcgtgtttcaggaaggccgcgacattcacactcaaacggcaagctggatgtttggattatcagctgaagcgatcgatcctttgatgcgtcgtgcagcgaagaccatcaatttcggtgttctctacggtatgagtgcccatcgtttgtcgcaggaattaggcattccctatgaagaagctgcggcgttcattcagcgctactttcaaagctatcccaaagttaaagcatggatcgagaagactctcgaagaaggccgcacacgtggttacgtagagaccttatttggacgtcgccgctatgttcccgatttaaacgctcgcgtgaaatctgtccgtgaagccgccgaacgcatggcgttcaacatgcctgtacagggcacggcagctgacctcatgaaacttgcaatggtgcgcctttttccacaattgcgtgaagttggtgcccgcatgctcttgcaggtccacgatgaactcttgttagaagcgccaaaagagcgtgcggaagaggtggcaaagctcgcgaaagaggttatggaaggcgtgtggcccttagcggtgcctcttgaagtcgaagttggtattggcgaggattggttggctgccaaaggataatga

SEQ ID NO: 518 - protein, 841 aa, synthetic construct
  REGION 1..841: note = Variant of DNA polymerase I from Thermus sp. strain 2.9
MHHHHHHGGSGMLPLFEPKGRVLLVDGHHLAYRNFFALKGLTTSRGEPVQGVYGFAKSLLKALKEDGDVVIVVFDAKAPSFRHEAYEAYKAGRAPTPEDFPRQLALMKELVDLLGLERLEVPGFEADDVLATLAKKAEREGYEVQILTADRDLFQLLSPRISVLHPEGHRITPEWLWEKYGLRPEQWVDFRALAGDPSDNIPGVKGIGEKTALKLLKEWGSLENLLKNLDQVKPASVREKILAHLEDLKLSRELSRVRTDLPLEVDFRGRREPDWEGLKAFLERLEFGSLLHEFGLLESPLPAEEAPWPPPEGAFLGYRLSRPEPMWAELLALAASAQGRVYRAEDPHGALRGLKEVRGLLAKDLAVVALREGLDLPPTDDPMLLAYLLDPSNTTPEGVARRYGGEWTEDAGERALLAERLHANLLGRLQGEERLLWLYEEVEKPLSRVLAHMEATGVKLDVAYLEALSLEVAAEMRRLEEEVFRLAGHSFNLNSRDQLERVLFDELGLPPIGKTEKTGKRSTSAAVLEALREVHPIVDKILQYRELAKLKGTYIDPLPALVHPKTGRLHTRFNQTATATGRLSSSDPNLQNIPVRTPLGQKIRKAFVAEEGWRLVALDYSQIELRVLAHLSGDENLIRVFQEGRDIHTQTASWMFGLSAEAIDPLMRRAAKTINFGVLYGMSAHRLSQELGIPYEEAAAFIQRYFQSYPKVKAWIEKTLEEGRTRGYVETLFGRRRYVPDLNARVKSVREAAERMAFNMPVQGTAADLMKLAMVRLFPQLREVGARMLLQVHDELLLEAPKERAEEVAKLAKEVMEGVWPLAVPLEVEVGIGEDWLAAKG

SEQ ID NO: 519 - DNA, 2529 bp, synthetic construct
  misc_feature 1..2529: note = Variant of DNA polymerase I from Thermus sp. strain 2.9
  source 1..2529: mol_type = other DNA
atgcaccatcatcatcatcatggcggtagcggcatgttaccgttgttcgaacctaaaggtcgcgtgcttctggttgatggccatcatctcgcgtatcgtaacttctttgccctgaaaggattaaccaccagccgtggcgagccggtacagggtgtctacggctttgcaaagtcgctcctgaaagctctgaaagaagacggtgatgtggtgattgttgtctttgatgcgaaagcgccaagttttcgccacgaagcgtacgaagcttacaaagccgggcgtgctccaacgccggaagactttcctcgccaattggcgcttatgaaggaattagtggatttgcttggcctcgaacgcttggaagttcccggtttcgaggcagacgacgtattagcgactctcgcaaagaaagccgaacgtgagggctatgaagtccagatcttgacagcagatcgcgatcttttccagcttttatctccgcgcatcgcggtgttacacccggaagggcatcgtatcaccccggaatggctctgggagaaatatggtttgcgtcccgaacaatgggtggattttcgcgccttagcgggcgatccgagcgacaatattccgggagttaaaggtatcggcgagaagacggcgctcaagctccttaaagaatgggggtcgttggagaacttgcttaagaatttagatcaggtcaaaccagcttcagtgcgtgagaagattcttgcacacctcgaagacctcaaattaagccgcgaattgtcccgtgtacgcaccgatttgccgctcgaagttgatttccgtggccgccgcgaacctgactgggagggtcttaaagcgtttttagagcgtcttgaatttggttcgctcttgcatgaattcggccttttagaaagcccgttaccagccgaagaagcaccttggccaccgcccgaaggcgcgtttttaggttaccgtttgagtcgcccggaaccgatgtgggccgaattattggctcttgcagcgtctgcccagggacgtgtgtatcgcgcggaagaccctcatggtgcgctccgcggcctcaaagaagtccgtggactccttgccaaagacttagctgttgttgcattgcgcgaaggtcttgatttacctccgactgatgatccaatgcttcttgcgtacctcttggacccgtcaaacacgacgcccgaaggcgtagcccgtcgttacggcggcgagtggaccgaagatgcaggtgagcgcgcgttattggccgaacgtttgcacgccaatttattaggacgtttgcaaggcgaggaacgtctcctctggctttacgaagaagtggagaaaccattgagtcgcgtgctcgcgcatatggaagctaccggtgtcaaattagacgtggcgtatttggaggcactcagccttgaagttgctgccgaaatgcgccgcttggaggaagaagtattccgtttagcaggccactcctttaaccttaattctcgcgatcagttagaacgtgtgttgttcgatgaacttggtctccctcctatcggcaagacagagaagaccggtaaacgtagcacttcagcggcggttttagaagctcttcgcgaagtccatcccattgtggacaagatcttgcagtaccgcgaactcgcgaaattgaaaggcacctatattgaccctcttccggcattagtccacccgaaaacgggacgcctccatacccgcttcaaccaaacagccacggcgaccggtcgtttgtcctcctctgatccaaaccttcagaatattccagtacgtaccccattgggccagaagatccgcaaagcgtttgtagctgaggagggttggcgtttagtggccctcgattatagccaaattgaattacgtgtccttgcccatctttctggcgatgagaacctcatccgcgtgtttcaggaaggccgcgacattcacactcaaacggcaagctggatgtttggattatcagctgaagcgatcgatcctttgatgcgtcgtgcagcgaagaccatcaatttcggtgttctctacggtatgagtgcccatcgtttgtcgcaggaattaggcattccctatgaagaagctgcggcgttcattcagcgctactttcaaagctatcccaaagttaaagcatggatcgagaagactctcgaagaaggccgcacacgtggttacgtagagaccttatttggacgtcgccgctatgttcccgatttaaacgctcgcgtgaaatctgtccgtgaagccgccgaacgcatggcgttcaacatgcctgtacagggcacggcagctgacctcatgaaacttgcaatggtgcgcctttttccacaattgcgtgaagttggtgcccgcatgctcttgcaggtccacgatgaactcttgttagaagcgccaaaagagcgtgcggaagaggtggcagccctcgcgaaagaggttatggaaggcgtgtggcccttagcggtgcctcttgaagtcgaagttggtattggcgaggattggttggctgccaaaggataatga

SEQ ID NO: 520 - protein, 841 aa, synthetic construct
  REGION 1..841: note = Variant of DNA polymerase I from Thermus sp. strain 2.9
MHHHHHHGGSGMLPLFEPKGRVLLVDGHHLAYRNFFALKGLTTSRGEPVQGVYGFAKSLLKALKEDGDVVIVVFDAKAPSFRHEAYEAYKAGRAPTPEDFPRQLALMKELVDLLGLERLEVPGFEADDVLATLAKKAEREGYEVQILTADRDLFQLLSPRIAVLHPEGHRITPEWLWEKYGLRPEQWVDFRALAGDPSDNIPGVKGIGEKTALKLLKEWGSLENLLKNLDQVKPASVREKILAHLEDLKLSRELSRVRTDLPLEVDFRGRREPDWEGLKAFLERLEFGSLLHEFGLLESPLPAEEAPWPPPEGAFLGYRLSRPEPMWAELLALAASAQGRVYRAEDPHGALRGLKEVRGLLAKDLAVVALREGLDLPPTDDPMLLAYLLDPSNTTPEGVARRYGGEWTEDAGERALLAERLHANLLGRLQGEERLLWLYEEVEKPLSRVLAHMEATGVKLDVAYLEALSLEVAAEMRRLEEEVFRLAGHSFNLNSRDQLERVLFDELGLPPIGKTEKTGKRSTSAAVLEALREVHPIVDKILQYRELAKLKGTYIDPLPALVHPKTGRLHTRFNQTATATGRLSSSDPNLQNIPVRTPLGQKIRKAFVAEEGWRLVALDYSQIELRVLAHLSGDENLIRVFQEGRDIHTQTASWMFGLSAEAIDPLMRRAAKTINFGVLYGMSAHRLSQELGIPYEEAAAFIQRYFQSYPKVKAWIEKTLEEGRTRGYVETLFGRRRYVPDLNARVKSVREAAERMAFNMPVQGTAADLMKLAMVRLFPQLREVGARMLLQVHDELLLEAPKERAEEVAALAKEVMEGVWPLAVPLEVEVGIGEDWLAAKG

SEQ ID NO: 521 - DNA, 2529 bp, synthetic construct
  misc_feature 1..2529: note = Variant of DNA polymerase I from Thermus sp. strain 2.9
  source 1..2529: mol_type = other DNA
atgcaccatcatcatcatcatggcggtagcggcatgttaccgttgttcgaacctaaaggtcgcgtgcttctggttgatggccatcatctcgcgtatcgtaacttctttgccctgaaaggattaaccaccagccgtggcgagccggtacagggtgtctacggctttgcaaagtcgctcctgaaagctctgaaagaagacggtgatgtggtgattgttgtctttgatgcgaaagcgccaagttttcgccacgaagcgtacgaagcttacaaagccgggcgtgctccaacgccggaagactttcctcgccaattggcgcttatgaaggaattagtggatttgcttggcctcgaacgcttggaagttcccggtttcgaggcagacgacgtattagcgactctcgcaaagaaagccgaacgtgagggctatgaagtccagatcttgacagcagatcgcgatcttttccagcttttatctccgcgcatttccgtgttacacccggaagggcatctgatcaccccggaatggctctgggagaaatatggtttgcgtcccgaacaatgggtggattttcgcgccttagtaggcgatccgggcgacaatattccgggagttaaaggtatcggcgagaagacggcgctcaagctccttaaagaatgggggtcgttggagaacttgcttaagaatttagatcaggtcaaaccagagtcagtgcgtgagaagattcttgcacacctcgaagacctcaaattaagccgcgaattgtcccgtgtacgcaccgatttgccgctcgaagttgatttccgtggccgccgcgaacctgactgggagggtcttaaagcgtttttagagcgtcttgaatttggttcgctcttgcatgaattcggccttttagaaagcccgttaccagccgaagaagcaccttggccaccgcccgaaggcgcgtttttaggttaccgtttgagtcgcccggaaccgatgtgggccgaattattggctcttgcagcgtctgcccagggacgtgtgtatcgcgcggaagaccctcatggtgcgctccgcggcctcaaagaagtccgtggactccttgccaaagacttagctgttgttgcattgcgcgaaggtcttgatttacctccgactgatgatccaatgcttcttgcgtacctcttggacccgtcaaacacgacgcccgaaggcgtagcccgtcgttacggcggcgagtggaccgaagatgcaggtgagcgcgcgttattggccgaacgtttgcacgccaatttattaggacgtttgcaaggcgaggaacgtctcctctggctttacgaagaagtggagaaaccattgagtcgcgtgctcgcgcatatggaagctaccggtgtcaaattagacgtggcgtatttggaggcactcagccttgaagttgctgccgaaatgcgccgcttggaggaagaagtattccgtttagcaggccactcctttaaccttaattctcgcgatcagttagaacgtgtgttgttcgatgaacttggtctccctcctatcggcaagacagagaagaccggtaaacgtagcacttcagcggcggttttagaagctcttcgcgaagtccatcccattgtggacaagatcttgcagtaccgcgaactcgcgaaattgaaaggcacctatattgaccctcttccggcattagtccacccgaaaacgggacgcctccatacccgcttcaaccaaacagccacggcgaccggtcgtttgtcctcctctgatccaaaccttcagaatattccagtacgtaccccattgggccagaagatccgcaaagcgtttgtagctgaggagggttggcgtttagtggccctcgattatagccaaattgaattacgtgtccttgcccatctttctggcgatgagaacctcatccgcgtgtttcaggaaggccgtgacattcacactcaaacggcaagctggatgtttggattatcagctgaagcgatcgatcctttgatgcgtcgtgcagcgaagaccgttaatttcggtgttctctacggtatgagtgcccatcgtttgtcgcaggaattaggcattccctatgaagaagctgtggcgttcattcagcgctactttcaaagctatcccaaagttaaagcatggatcgagaagactctcgaagaaggccgcacacgtggttacgtagagaccttatttggacgtcgccgctatgttcccgatttaaacgctcgcgtgaaatctgtccgtgaagccgccgaacgcatggcgttcaacatgcctgtacagggcacggcagctgacctcatgaaacttgcaatggtgcgcctttttccacaattgcgtgaagttggtgcccgcatgctcttgcaggtccacgatgaactcttgttagaagcgccaaaagagcgtgcggaagaggtggcagccctcgcgaaagaggttatggaaggcgtgtggcccttagcggtgcctcttgaagtcgaagttggtattggcgaggattggttggctgccaaaggataatga

SEQ ID NO: 522 - protein, 841 aa, synthetic construct
  REGION 1..841: note = Variant of DNA polymerase I from Thermus sp. strain 2.9
MHHHHHHGGSGMLPLFEPKGRVLLVDGHHLAYRNFFALKGLTTSRGEPVQGVYGFAKSLLKALKEDGDVVIVVFDAKAPSFRHEAYEAYKAGRAPTPEDFPRQLALMKELVDLLGLERLEVPGFEADDVLATLAKKAEREGYEVQILTADRDLFQLLSPRISVLHPEGHLITPEWLWEKYGLRPEQWVDFRALVGDPGDNIPGVKGIGEKTALKLLKEWGSLENLLKNLDQVKPESVREKILAHLEDLKLSRELSRVRTDLPLEVDFRGRREPDWEGLKAFLERLEFGSLLHEFGLLESPLPAEEAPWPPPEGAFLGYRLSRPEPMWAELLALAASAQGRVYRAEDPHGALRGLKEVRGLLAKDLAVVALREGLDLPPTDDPMLLAYLLDPSNTTPEGVARRYGGEWTEDAGERALLAERLHANLLGRLQGEERLLWLYEEVEKPLSRVLAHMEATGVKLDVAYLEALSLEVAAEMRRLEEEVFRLAGHSFNLNSRDQLERVLFDELGLPPIGKTEKTGKRSTSAAVLEALREVHPIVDKILQYRELAKLKGTYIDPLPALVHPKTGRLHTRFNQTATATGRLSSSDPNLQNIPVRTPLGQKIRKAFVAEEGWRLVALDYSQIELRVLAHLSGDENLIRVFQEGRDIHTQTASWMFGLSAEAIDPLMRRAAKTVNFGVLYGMSAHRLSQELGIPYEEAVAFIQRYFQSYPKVKAWIEKTLEEGRTRGYVETLFGRRRYVPDLNARVKSVREAAERMAFNMPVQGTAADLMKLAMVRLFPQLREVGARMLLQVHDELLLEAPKERAEEVAALAKEVMEGVWPLAVPLEVEVGIGEDWLAAKG

SEQ ID NO: 523 - DNA, 2529 bp, synthetic construct
  misc_feature 1..2529: note = Variant of DNA polymerase I from Thermus sp. strain 2.9
  source 1..2529: mol_type = other DNA
atgcaccatcatcatcatcatggcggtagcggcatgttaccgttgttcgaacctaaaggtcgcgtgcttctggttgatggccatcatctcgcgtatcgtaacttctttgccctgaaaggattaaccaccagccgtggcgagccggtacagggtgtctacggctttgcaaagtcgctcctgaaagctctgaaagaagacggtgatgtggtgattgttgtctttgatgcgaaagcgccaagttttcgccacgaagcgtacgaagcttacaaagccgggcgtgctccaacgccggaagactttcctcgccaattggcgcttatgaaggaattagtggatttgcttggcctcgaacgcttggaagttcccggtttcgaggcagacgacgtattagcgactctcgcaaagaaagccgaacgtgagggctatgaagtccagatcttgacagcagatcgcgatcttttccagcttttatctccgcgcgtctcggtgttacacccggaagggcatcgcatcaccccggaatggctctgggagaaatatggtttgcgtcccgaacaatgggtggattttcgcgccttagcgggcgatccgagcgacaatattccgggagttaaaggtatcggcgagaagacggcgctcaagctccttaaagaatgggggtcgttggagaacttgcttaagaatttagatcaggtcaaaccagcttcagtgcgtgagaagattcttgcacacctcgaagacctcaaattaagccgcgaattgtcccgtgtacgcaccgatttgccgctcgaagttgatttccgtggccgccgcgaacctgactgggagggtcttaaagcgtttttagagcgtcttgaatttggttcgctcttgcatgaattcggccttttagaaagcccgttaccagccgaagaagcaccttggccaccgcccgaaggcgcgtttttaggttaccgtttgagtcgcccggaaccgatgtgggccgaattattggctcttgcagcgtctgcccagggacgtgtgtatcgcgcggaagaccctcatggtgcgctccgtggcctcaaagaagtccgtggactccttgccaaagacttagctgttgttgcattgcgcgaaggtcttgatttacctccgactgatgatccaatgcttcttgcgtacctcttggacccgtcaaacacgacgcccgaaggcgtagcccgtcgttacggcggcgagtggaccgaagatgcaggtgagcgcgcgttattggccgaacgtttgcacgccaatttattaggacgtttgcaaggcgaggaacgcctcctctggctttacgaagaagtggagaaaccattgagtcgcgtgctcgcgcatatggaagctaccggtgtcaaattagacgtggcgtatttggaggcactcagccttgaagttgctgccgaaatgcgccgcttggaggaagaagtattccgtttagcaggccactcctttaaccttaattctcgcgatcagttagaacgtgtgttgttcgatgaacttggtctccctcctatcggcaagacagagaagaccggtaaacgtagcacttcagcggcggttttagaagctcttcgcgaagtccatcccattgtggacaagatcttgcagtaccgcgaactcgcgaaattgaaaggcacctatattgaccctcttccggcattagtccacccgaaaacgggacgcctccatacccgcttcaaccaaacagccacggcgaccggtcgtttgtcctcctctgatccaaaccttcagaatattccagtacgtaccccattgggccagaagatccgccgcgcgtttgtagctgaggagggttggcgtttagtggccctcgattatagccaaattgaattacgtgtccttgcccatctttctggcgatgagaacctcatccgcgtgtttcaggaaggccgcgacattcacactcaaacggcaagctggatgtttggattatcagctgaagcgatcgatcctttgatgcgtcgtgcagcgaagaccatcaatttcggtgttctctacggtatgagtgcccatcgtttgtcgcaggaattaggcattccctatgaagaagctgcggcgttcattcagcgctactttcaaagctatcccaaagttaaagcatggatcgagaagactctcgaagaaggccgcacacgtggttacgtagagaccttatttggacgtcgccgctatgttcccgatttaaacgctcgcgtgaaatctgtccgtgaagccgccgaacgcatggcgttcaacatgcctgtacagggcacggcagctgacctcatgaaacttgcaatggtgcgcctttttccacaattgcgtgaagttggtgcccgcatgctcttgcaggtccacgatgaactcttgttagaagcgccaaaagagcgtgcggaagaggtggcagccctcgcgaaagaggttatggaaggcgtgtggcccttagcggtgcctcttgaagtcgaagttggtattggcgaggattggttggctgccaaaggataatga

SEQ ID NO: 524 - protein, 841 aa, synthetic construct
  REGION 1..841: note = Variant of DNA polymerase I from Thermus sp. strain 2.9
MHHHHHHGGSGMLPLFEPKGRVLLVDGHHLAYRNFFALKGLTTSRGEPVQGVYGFAKSLLKALKEDGDVVIVVFDAKAPSFRHEAYEAYKAGRAPTPEDFPRQLALMKELVDLLGLERLEVPGFEADDVLATLAKKAEREGYEVQILTADRDLFQLLSPRVSVLHPEGHRITPEWLWEKYGLRPEQWVDFRALAGDPSDNIPGVKGIGEKTALKLLKEWGSLENLLKNLDQVKPASVREKILAHLEDLKLSRELSRVRTDLPLEVDFRGRREPDWEGLKAFLERLEFGSLLHEFGLLESPLPAEEAPWPPPEGAFLGYRLSRPEPMWAELLALAASAQGRVYRAEDPHGALRGLKEVRGLLAKDLAVVALREGLDLPPTDDPMLLAYLLDPSNTTPEGVARRYGGEWTEDAGERALLAERLHANLLGRLQGEERLLWLYEEVEKPLSRVLAHMEATGVKLDVAYLEALSLEVAAEMRRLEEEVFRLAGHSFNLNSRDQLERVLFDELGLPPIGKTEKTGKRSTSAAVLEALREVHPIVDKILQYRELAKLKGTYIDPLPALVHPKTGRLHTRFNQTATATGRLSSSDPNLQNIPVRTPLGQKIRRAFVAEEGWRLVALDYSQIELRVLAHLSGDENLIRVFQEGRDIHTQTASWMFGLSAEAIDPLMRRAAKTINFGVLYGMSAHRLSQELGIPYEEAAAFIQRYFQSYPKVKAWIEKTLEEGRTRGYVETLFGRRRYVPDLNARVKSVREAAERMAFNMPVQGTAADLMKLAMVRLFPQLREVGARMLLQVHDELLLEAPKERAEEVAALAKEVMEGVWPLAVPLEVEVGIGEDWLAAKG

SEQ ID NO: 525 - DNA, 2529 bp, synthetic construct
  misc_feature 1..2529: note = Variant of DNA polymerase I from Thermus sp. strain 2.9
  source 1..2529: mol_type = other DNA
atgcaccatcatcatcatcatggcggtagcggcatgttaccgttgttcgaacctaaaggtcgcgtgcttctggttgatggccatcatctcgcgtatcgtaacttctttgccctgaaaggattaaccaccagccgtggcgagccggtacagggtgtctacggctttgcaaagtcgctcctgaaagctctgaaagaagacggtgatgtggtgattgttgtctttgatgcgaaagcgccaagttttcgccacgaagcgtacgaagcttacaaagccgggcgtgctccaacgccggaagactttcctcgccaattggcgcttatgaaggaattagtggatttgcttggcctcgaacgcttggaagttcccggtttcgaggcagacgacgtattagcgactctcgcaaagaaagccgaacgtgagggctatgaagtccagatcttgacagcagatcgcgatcttttccagcttttatctccgcgcatttccgtgttacacccggaagggcatcgtatcaccccggaatggctctgggagaaatatggtttgcgtcccgaacaatgggtggattttcgcgccttagcgggcgatccgagcgacaatattccgggagttaaaggtatcggcgagaagacggcgctcaagctccttaaagaatgggggtcgttggagaacttgcttaagaatttagatcaggtcaaaccagcttcagtgcgtgagaagattcttgcacacctcgaagacctcaaattaagccgcgaattgtcccgtgtacgcaccgatttgccgctcgaagttgatttccgtggccgccgcgaacctgactgggagggtcttaaagcgtttttagagcgtcttgaatttggttcgctcttgcatgaattcggccttttagaaagcccgttaccagccgaagaagcaccttggccaccgcccgaaggcgcgtttttaggttaccgtttgagtcgcccggaaccgatgtgggccgaattattggctcttgcagcgtctgcccagggacgtgtgtatcgcgcggaagaccctcatggtgcgctccgtggcctcaaagaagtccgtggactccttgccaaagacttagctgttgttgcattgcgcgaaggtcttgatttacctccgactgatgatccaatgcttcttgcgtacctcttggacccgtcaaacacgacgcccgaaggcgtagcccgtcgttacggcggcgagtggaccgaagatgcaggtgagcgcgcgttattggccgaacgtttgcacgccaatttattaggacgtttgcaaggcgaggaacgtctcctctggctttacgaagaagtggagaaaccattgagtcgcgtgctcgcgcatatggaagctaccggtgtcaaattagacgtggcgtatttggaggcactcagccttgaagttgctgccgaaatgcgccgcttggaggaagaagtattccgtttagcaggccactcctttaaccttaattctcgcgatcagttagaacgtgtgttgttcgataatcttggtctccctcctatcggcaagacagagaagaccggtaaacgtagcacttcagcggcggttttagaagctcttcgcgaagtccatcccattgtggacaagatcttgcagtaccgcgaactcgcgaaattgaaaggcacctatattgaccctcttccggcattagtccacccgaaaacgggacgcctccatacccgcttcaaccaaacagccacggcgaccggtcgtttgtcctcctctgatccaaaccttcagaatattccagtacgtaccccattgggccagaagatccgcaaagcgtttgtagctgaggagggttggcgtttagtggccctcgattatagccaaattgaattacgtgtccttgcccatctttctggcgatgagaacctcatccgcgtgtttcaggaaggccgcgacattcacactcaaacggcaagctggatgtttggattatcagctgaagcgatcgatcctttgatgcgtcgtgcagcgaagaccatcaatttcggtgttctctacggtatgagtgcccatcgtttgtcgcaggaattaggcattccctatgaagaagctgcggcgttcattcagcgctactttcaaagctatcccaaagttaaagcatggatcgagaagactctcgaagaaggccgcacacgtggttacgtagagaccttatttggacgtcgccgctatgttcccgatttaaacgctcgcgtgaaatctgtccgtgaagccgccgaacgcatggcgttcaacatgcctgtacagggcacggcagctgacctcatgaaacttgcaatggtgcgcctttttccacaattgcgtgaagttggtgcccgcatgctcttgcaggtccacgatgaactcttgttagaagcgccaaaagagcgtgcggaagaggtggcagccctcgcgaaagaggttatggaaggcgtgtggcccttagcggtgcctcttgaagtcgaagttggtattggcgaggattggttggctgccaaaggataatga

SEQ ID NO: 526 - protein, 841 aa, synthetic construct
  REGION 1..841: note = Variant of DNA polymerase I from Thermus sp. strain 2.9
MHHHHHHGGSGMLPLFEPKGRVLLVDGHHLAYRNFFALKGLTTSRGEPVQGVYGFAKSLLKALKEDGDVVIVVFDAKAPSFRHEAYEAYKAGRAPTPEDFPRQLALMKELVDLLGLERLEVPGFEADDVLATLAKKAEREGYEVQILTADRDLFQLLSPRISVLHPEGHRITPEWLWEKYGLRPEQWVDFRALAGDPSDNIPGVKGIGEKTALKLLKEWGSLENLLKNLDQVKPASVREKILAHLEDLKLSRELSRVRTDLPLEVDFRGRREPDWEGLKAFLERLEFGSLLHEFGLLESPLPAEEAPWPPPEGAFLGYRLSRPEPMWAELLALAASAQGRVYRAEDPHGALRGLKEVRGLLAKDLAVVALREGLDLPPTDDPMLLAYLLDPSNTTPEGVARRYGGEWTEDAGERALLAERLHANLLGRLQGEERLLWLYEEVEKPLSRVLAHMEATGVKLDVAYLEALSLEVAAEMRRLEEEVFRLAGHSFNLNSRDQLERVLFDNLGLPPIGKTEKTGKRSTSAAVLEALREVHPIVDKILQYRELAKLKGTYIDPLPALVHPKTGRLHTRFNQTATATGRLSSSDPNLQNIPVRTPLGQKIRKAFVAEEGWRLVALDYSQIELRVLAHLSGDENLIRVFQEGRDIHTQTASWMFGLSAEAIDPLMRRAAKTINFGVLYGMSAHRLSQELGIPYEEAAAFIQRYFQSYPKVKAWIEKTLEEGRTRGYVETLFGRRRYVPDLNARVKSVREAAERMAFNMPVQGTAADLMKLAMVRLFPQLREVGARMLLQVHDELLLEAPKERAEEVAALAKEVMEGVWPLAVPLEVEVGIGEDWLAAKG

SEQ ID NO: 527 - DNA, 2529 bp, synthetic construct
  misc_feature 1..2529: note = Variant of DNA polymerase I from Thermus sp. strain 2.9
  source 1..2529: mol_type = other DNA
atgcaccatcatcatcatcatggcggtagcggcatgttaccgttgttcgaacctaaaggtcgcgtgcttctggttgatggccatcatctcgcgtatcgtaacttctttgccctgaaaggattaaccaccagccgtggcgagccggtacagggtgtctacggctttgcaaagtcgctcctgaaagctctgaaagaagacggtgatgtggtgattgttgtctttgatgcgaaagcgccaagttttcgccacgaagcgtacgaagcttacaaagccgggcgtgctccaacgccggaagactttcctcgccaattggcgcttatgaaggaattagtggatttgcttggcctcgaacgcttggaagttcccggtttcgaggcagacgacgtattagcgactctcgcaaagaaagccgaacgtgagggctatgaagtccatatcttgacagcagatcgcgatcttttccagcttttatctccgcgcatttccgtgttacacccggaagggcatcgtatcaccccggaatggctctgggagaaatatggtttgcgtcccgaacaatgggtggattttcgcgccttagcgggcgatccgagcgacaatattccgggagttaaaggtatcggcgagaagacggcgctcaagctccttaaagaatgggggtcgttggagaacttgcttaagaatttagatcaggtcaaaccagcttcagtgcgtgagaagattcttgcacacctcgaagacctcaaattaagccgcgaattgtcgcgtgtacgcaccgatttgccgctcgaagttgatttccgtggccgccgcgaacctgactgggagggtcttaaagcgtttttagagcgtcttgaatttggttcgctcttgcatgaattcggccttttagaaagcccgttaccagccgaagaagcaccttggccaccgcccgaaggcgcgtttttaggttaccgtttgagtcgcccggaaccgatgtgggccgaattattggctcttgcagcgtctgcccagggacgtgtgtatcgcgcggaagaccctcatggtgcgctccgtggcctcaaagaagtccgtggactccttgccaaagacttagctgttgttgcattgcgcgaaggtcttgatttacctccgactgatgatccaatgcttcttgcgtacctcttggactcgtcaaacacgacgcccgaaggcgtagcccgtcgttacggcggcgagtggaccgaagatgcaggtgagcgcgcgttattggccgaacgtttgcacgccaatttattaggacgtttgcaaggcgaggaacgtctcctctggctttacgaagaagtggagaaaccattgagtcgcgtgctcgcgcatatggaagctaccggtgtcaaattagacgtggcgtatttggaggcactcagccttgaagtcgctgccgaaatgcgccgcttggaggaagaagtattccgtttagcaggccactcctttaaccttaattctcgcgatcagttagaacgtgtgttgttcgatgaacttggtctccctcctatcggcaagacagagaagaccggtaaacgtagcacttcagcggcggttttagaagctcttcgcgaagtccatcccattgtggacaagatcttgcagtaccgcgaactcgcgaaattgaaaggcacctatattgaccgtcttccggcattagtccacccgaaaacgggacgcctccatacccgcttcaaccaaacagccacggcgaccggtcgtttgtcctcctctgatccaaaccttcagaatattccagtacgtaccccattgggccagaaaatccgcaaagcgtttgtagctgaggagggttggcgtttagtggccctcgattatagccaaattgaattacgtgtccttgcccatctttctggcgatgagaacctcatccgcgtgtttcaggaaggccgcgacattcacactcaaacggcaagctggatgtttggagtgtcagcggaagcgatcgatcctttgatgcgtcgtgcagcgaagaccatcaatttcggtgttctctacggtatgagtgcccatcgtttgtcgcaggaattaggcattccctatgaagaagctgcggcgttcattcagcgctactttcaaagctatcccaaagttaaagcatggatcgagaagactctcgaagaaggccgcacacgtggttacgtagagaccttatttggacgtcgccgctatgttcccgatttaaacgctcgcgtgaaatctgtccgtgaagccgccgaacgcatggcgtggaacatgcctgtacagggcacggcagctgacctcatgaaacttgcaatggtgcgcctttttccacaattgcgtgaagttggtgcccgcatgctcttgcaggtccacgatgaactcttgttagaagcgccaaaagagcgtgcggaagaggtggcagccctcgcgaaagaggttatggaaggcgtgtggcccttagcggtgcctcttgaagtcgaagttggtattggcgaggattggttggctgccaaaggataatga

SEQ ID NO: 528 - protein, 841 aa, synthetic construct
  REGION 1..841: note = Variant of DNA polymerase I from Thermus sp. strain 2.9
MHHHHHHGGSGMLPLFEPKGRVLLVDGHHLAYRNFFALKGLTTSRGEPVQGVYGFAKSLLKALKEDGDVVIVVFDAKAPSFRHEAYEAYKAGRAPTPEDFPRQLALMKELVDLLGLERLEVPGFEADDVLATLAKKAEREGYEVHILTADRDLFQLLSPRISVLHPEGHRITPEWLWEKYGLRPEQWVDFRALAGDPSDNIPGVKGIGEKTALKLLKEWGSLENLLKNLDQVKPASVREKILAHLEDLKLSRELSRVRTDLPLEVDFRGRREPDWEGLKAFLERLEFGSLLHEFGLLESPLPAEEAPWPPPEGAFLGYRLSRPEPMWAELLALAASAQGRVYRAEDPHGALRGLKEVRGLLAKDLAVVALREGLDLPPTDDPMLLAYLLDSSNTTPEGVARRYGGEWTEDAGERALLAERLHANLLGRLQGEERLLWLYEEVEKPLSRVLAHMEATGVKLDVAYLEALSLEVAAEMRRLEEEVFRLAGHSFNLNSRDQLERVLFDELGLPPIGKTEKTGKRSTSAAVLEALREVHPIVDKILQYRELAKLKGTYIDRLPALVHPKTGRLHTRFNQTATATGRLSSSDPNLQNIPVRTPLGQKIRKAFVAEEGWRLVALDYSQIELRVLAHLSGDENLIRVFQEGRDIHTQTASWMFGVSAEAIDPLMRRAAKTINFGVLYGMSAHRLSQELGIPYEEAAAFIQRYFQSYPKVKAWIEKTLEEGRTRGYVETLFGRRRYVPDLNARVKSVREAAERMAWNMPVQGTAADLMKLAMVRLFPQLREVGARMLLQVHDELLLEAPKERAEEVAALAKEVMEGVWPLAVPLEVEVGIGEDWLAAKG

SEQ ID NO: 529 - DNA, 2529 bp, synthetic construct
  misc_feature 1..2529: note = Variant of DNA polymerase I from Thermus sp. strain 2.9
  source 1..2529: mol_type = other DNA
atgcaccatcatcatcatcatggcggtagcggcatgttaccgttgttcgaacctaaaggtcgcgtgcttctggttgatggccatcatctcgcgtatcgtaacttctttgccctgaaaggattaaccaccagccgtggcgagccggtacagggtgtctacggctttgcaaagtcgctcctgaaagctctgaaagaagacggtgatgtggtgattgttgtctttgatgcgaaagcgccaagttttcgccacgaagcgtacgaagcttacaaagccgggcgtgctccaacgccggaagactttcctcgccaattggcgcttatgaaggaattagtggatttgcttggcctcgaacgcttggaagttcccggtttcgaggcagacgacgtattagcgactctcgcaaagaaagccgaacgtgagggctatgaagtccagatcttgacagcagatcgcgatcttttccagcttttatctccgcgcatctcggtgttacacccggaagggcatcgcatcaccccggaatggctctgggagaaatatggtttgcgtcccgaacaatgggtggattttcgcgccttagcgggcgatccgagcgacaatattccgggagttaaaggtatcggcgagaagacggcgctcaagctccttaaagaatgggggtcgttggagaacttgcttaagaatttagatcaggtcaaaccagcgtcagtgcgtgagaagattcttgcacacctcgaagacctccgtttaagccgcgaattgtcccgtgtacgcaccgatttgccgctcgaagttgatttccgtggccgccgcgaacctgactgggagggtcttaaagcgtttttagagcgtcttgaatttggttcgctcttgcatgaattcggccttttagaaagcccgttaccagccgaagaagcaccttggccaccgcccgaaggcgcgtttttaggttaccgtttgagtcgcccggaaccgatgtgggccgaattattggctcttgcagcgtctgcccagggacgtgtgtatcgcgcggaagaccctcatggtgcgctccgtggcctcaaagaagtccgtggactccttgccaaagacttagctgttgttgcattgcgcgaaggtcttgatttacctccgactgatgatccaatgcttcttgcgtacctcttggacccgtcaaacacgacgcccgaaggcgtagcccgtcgttacggcggcgagtggaccgaagatgcagccgagcgcgcgttattggccgaacgtttgcacgccaatttattaggacgtttgcaaggcgaggaacgcctcctctggctttacgaagaagtggagaaaccattgagtcgcgtgctcgcgcatatggaagctaccggtgtcaaattagacgtggcgtatttggaggcactcagccttgaagttgctgccgaaattcgccgcttggaggaagaagtattccgtttagcaggccactcctttaaccttaattctcgcgatcagttagaacgtgtgttgttcgatgaacttggtctccctcctatcggcaagacagagaagaccggtaaacgtagcacttcagcggcggttttagaagctcttcgcgaagtccatcccattgtggacaagatcttgcagtaccgcgaactcgcgaaattgaaaggcacctatattgaccctcttccggcattagtccacccgaaaacgggacgcctccatacccgcttcaaccaaacagccacggcgaccggtcgtttgtcctcctctgatccaaaccttcagaatattccagtacgtaccccattgggccagaagatccgccgcgcgtttgtagctgaggagggttggcgtttagtggccctcgattatagccaaattgaattacgtgtccttgcccatctttctggcgatgagaacctcatccgcgtgtttcaggaaggccgcgacattcacactcaaacggcaagctggatgtttggattatcagctgaagcgatcgatcctttgatgcgtcgtgcagcgaagaccatcaatttcggtgttctctacggtatgagtgcccatcgtttgtcgcaggaattaggcattccctatgaagaagctgcggcgttcattcagcgctactttcaaagctatcccaaagttaaagcatggatcgagaagactctcgaagaaggccgcacacgtggttacgtagagaccttatttggacgtcgccgctatgttcccgatttaaacgctcgcgtgaaatctgtccgtgaagccgccgaacgcatggcgttcaacatgcctgtacagggcacggcagctgacctcatgaaacttgcaatggtgcgcctttttccacaattgcgtgaagttggtgcccgcatgctcttgcaggtccacgatgaactcttgttagaagcgccaaaagagcgtgcggaagaggtggcagccctcgcgaaagaggttatggaaggcgtgtggcccttagcggtgcctcttgaagtcgaagttggtattggcgaggattggttggctgccaaaggataatga

SEQ ID NO: 530 - protein, 841 aa, synthetic construct
  REGION 1..841: note = Variant of DNA polymerase I from Thermus sp. strain 2.9
MHHHHHHGGSGMLPLFEPKGRVLLVDGHHLAYRNFFALKGLTTSRGEPVQGVYGFAKSLLKALKEDGDVVIVVFDAKAPSFRHEAYEAYKAGRAPTPEDFPRQLALMKELVDLLGLERLEVPGFEADDVLATLAKKAEREGYEVQILTADRDLFQLLSPRISVLHPEGHRITPEWLWEKYGLRPEQWVDFRALAGDPSDNIPGVKGIGEKTALKLLKEWGSLENLLKNLDQVKPASVREKILAHLEDLRLSRELSRVRTDLPLEVDFRGRREPDWEGLKAFLERLEFGSLLHEFGLLESPLPAEEAPWPPPEGAFLGYRLSRPEPMWAELLALAASAQGRVYRAEDPHGALRGLKEVRGLLAKDLAVVALREGLDLPPTDDPMLLAYLLDPSNTTPEGVARRYGGEWTEDAAERALLAERLHANLLGRLQGEERLLWLYEEVEKPLSRVLAHMEATGVKLDVAYLEALSLEVAAEIRRLEEEVFRLAGHSFNLNSRDQLERVLFDELGLPPIGKTEKTGKRSTSAAVLEALREVHPIVDKILQYRELAKLKGTYIDPLPALVHPKTGRLHTRFNQTATATGRLSSSDPNLQNIPVRTPLGQKIRRAFVAEEGWRLVALDYSQIELRVLAHLSGDENLIRVFQEGRDIHTQTASWMFGLSAEAIDPLMRRAAKTINFGVLYGMSAHRLSQELGIPYEEAAAFIQRYFQSYPKVKAWIEKTLEEGRTRGYVETLFGRRRYVPDLNARVKSVREAAERMAFNMPVQGTAADLMKLAMVRLFPQLREVGARMLLQVHDELLLEAPKERAEEVAALAKEVMEGVWPLAVPLEVEVGIGEDWLAAKG

SEQ ID NO: 531 - DNA, 2529 bp, synthetic construct
  misc_feature 1..2529: note = Variant of DNA polymerase I from Thermus sp. strain 2.9
  source 1..2529: mol_type = other DNA
atgcaccatcatcatcatcatggcggtagcggcatgttaccgttgttcgaacctaaaggtcgcgtgcttctggttgatggccatcatctcgcgtatcgtaacttctttgccctgaaaggattaaccaccagccgtggcgagccggtacagggtgtctacggctttgcaaagtcgctcctgaaagctctgaaagaagacggtgatgtggtgattgttgtctttgatgcgaaagcgccaagttttcgccacgaagcgtacgaagcttacaaagccgggcgtgctccaacgccggaagactttcctcgccaattggcgcttatgaaggaattagtggatttgcttggcctcgaacgcttggaagttcccggtttcgaggcagacgacgtattagcgactctcgcaaagaaagccgaacgtgagggctatgaagtccagatcttgacagcagatcgcgatcttttccagcttttatctccgcgcatttccgtgttacacccggaagggcatcgtatcaccccggaatggctctgggagaaatatggtttgcgtcccgaacaatgggtggattttcgcgccttagcgggcgatccgagcgacaatattccgggagttaaaggtatcggcgagaagacggcgctcaagctccttaaagaatgggggtcgttggagaacttgcttaagaatttagatcaggtcaaaccagcttcagtgcgtgagaagattcttgcacacctcgaagacctcaaattaagccgcgaattgtcccgtgtacgcaccgatttgccgctcgaagttgatttccgtggccgccgcgaacctgactgggagggtcttaaagcgtttttagagcgtcttgaatttggttcgctcttgcatgaattcggccttttagaaagcccgttaccagccgaagaagcaccttggccaccgcccgaaggcgcgtttttaggttaccgtttgagtcgcccggaaccgatgtgggccgaattattggctcttgcagcgtctgcccagggacgtgtgtatcgcgcggaagaccctcatggtgcgctccgtggcctcaaagaagtccgtggactccttgccaaagacttagctgttgttgcattgcgcgaaggtcttgatttacctccgactgatgatccaatgcttcttgcgtacctcttggacccgtcaaacacgacgcccgaacgcgtagcccgtcgttacggcggcgagtggaccgaagatgcaggtgagcgcgcgttattggccgaacgtttgcacgccaatttattaggacgtttgcaaggcgaggaacgtctcctctggctttacgaagaagtggagaaaccattgagtcgcgtgctcgcgcatatggaagctaccggtgtcaaattagacgtggcgtatttggaggcactcagccttgaagttgctgccgaaatgcgccgcttggaggaagaagtattccgtttagcaggccactcctttaaccttaattctcgcgatcagttagaacgtgtgttgttcgatgaacttggtctccctcctatcggcaagacagagaagaccggtaaacgtagcacttcagcggcggttttagaagctcttcgcgaagtccatcccattgtggacaagatcttgcagtaccgcgaactcgcgaaattgaaaggcacctatattgaccctcttccggcattagtccacccgaaaacgggacgcctccatacccgcttcaaccaaacagccacggcgaccggtcgtttgtcctcctctgatccaaaccttcagaatattccagtacgtaccccattgggccagaagatccgcaaagcgtttgtagctgaggagggttggcgtttagtggccctcgattatagccaaattgaattacgtgtccttgcccatctttctggcgatgagaacctcatccgcgtgtttcaggaaggccgcgacattcacactcaaacggcaagctggatgtttggattatcagctgaagcgatcgatcctttgatgcgtcgtgcagcgaagaccatcaatttcggtgttctctacggtatgagtgcccatcgtttgtcgcaggaattaggcattccctatgaagaagctgcggcgttcattcagcgctactttcaaagctatcccaaagttaaagcatggatcgagaagactctcgaagaaggccgcacacgtggttacgtagagaccttatttggacgtcgccgctatgttcccgatttaaacgctcgcgtgaaatctgtccgtgaagccgccgaacgcatggcgttcaacatgcctgtacagggcacggcagctgacctcatgaaacttgcaatggtgcgcctttttccacaattgcgtgaagttggtgcccgcatgctcttgcaggtccacgatgaactcttgttagaagcgccaaaagagcgtgcggaagaggtggcagccctcgcgaaagaggttatggaaggcgtgtggcccttagcggtgcctcttgaagtcgaagttggtattggcgaggattggttggctgccaaaggataatga

SEQ ID NO: 532 - protein, 841 aa, synthetic construct
  REGION 1..841: note = Variant of DNA polymerase I from Thermus sp. strain 2.9
MHHHHHHGGSGMLPLFEPKGRVLLVDGHHLAYRNFFALKGLTTSRGEPVQGVYGFAKSLLKALKEDGDVVIVVFDAKAPSFRHEAYEAYKAGRAPTPEDFPRQLALMKELVDLLGLERLEVPGFEADDVLATLAKKAEREGYEVQILTADRDLFQLLSPRISVLHPEGHRITPEWLWEKYGLRPEQWVDFRALAGDPSDNIPGVKGIGEKTALKLLKEWGSLENLLKNLDQVKPASVREKILAHLEDLKLSRELSRVRTDLPLEVDFRGRREPDWEGLKAFLERLEFGSLLHEFGLLESPLPAEEAPWPPPEGAFLGYRLSRPEPMWAELLALAASAQGRVYRAEDPHGALRGLKEVRGLLAKDLAVVALREGLDLPPTDDPMLLAYLLDPSNTTPERVARRYGGEWTEDAGERALLAERLHANLLGRLQGEERLLWLYEEVEKPLSRVLAHMEATGVKLDVAYLEALSLEVAAEMRRLEEEVFRLAGHSFNLNSRDQLERVLFDELGLPPIGKTEKTGKRSTSAAVLEALREVHPIVDKILQYRELAKLKGTYIDPLPALVHPKTGRLHTRFNQTATATGRLSSSDPNLQNIPVRTPLGQKIRKAFVAEEGWRLVALDYSQIELRVLAHLSGDENLIRVFQEGRDIHTQTASWMFGLSAEAIDPLMRRAAKTINFGVLYGMSAHRLSQELGIPYEEAAAFIQRYFQSYPKVKAWIEKTLEEGRTRGYVETLFGRRRYVPDLNARVKSVREAAERMAFNMPVQGTAADLMKLAMVRLFPQLREVGARMLLQVHDELLLEAPKERAEEVAALAKEVMEGVWPLAVPLEVEVGIGEDWLAAKG

SEQ ID NO: 533 - DNA, 2529 bp, synthetic construct
  misc_feature 1..2529: note = Variant of DNA polymerase I from Thermus sp. strain 2.9
  source 1..2529: mol_type = other DNA
atgcaccatcatcatcatcatggcggtagcggcatgttaccgttgttcgaacctaaaggtcgcgtgcttctggttgatggccatcatctcgcgtatcgtaacttctttgccctgaaaggattaaccaccagccgtggcgagccggtacagggtgtctacggctttgcaaagtcgctcctgaaagctctgaaagaagacggtgatgtggtgattgttgtctttgatgcgaaagcgccaagttttcgccacgaagcgtacgaagcttacaaagccgggcgtgctccaacgccggaagactttcctcgccaattggcgcttatgaaggaattagtggatttgcttggcctcgaacgcttggaagttcccggtttcgaggcagacgacgtattagcgactctcgcaaagaaagccgaacgtgagggctatgaagtccagatcttgacagcagatcgcgatcttttccagcttttatctccgcgcatttccgtgttacacccggaagggcatcgtatcaccccggaatggctctgggagaaatatggtttgcgtcccgaacaatgggtggattttcgcgccttagtaggcgatccgagcgacaatattccgggagttaaaggtatcggcgagaagacggcgctcaagctccttaaagaatgggggtcgttggagaacttgcttaagaatttagatcaggtcaaaccagagtcagtgcgtgagaagattcttgcacacctcgaagacctcaaattaagccgcgaattgtcccgtgtacgcaccgatttgccgctcgaagttgatttccgtggccgccgcgaacctgactgggagggtcttaaagcgtttttagagcgtcttgaatttggttcgctcttgcatgaattcggccttttagaaagcccgttaccagccgaagaagcaccttggccaccgcccgaaggcgcgtttttaggttaccgtttgagtcgcccggaaccgatgtgggccgaattattggctcttgcagcgtctgcccagggacgtgtgtatcgcgcggaagaccctcatggtgcgctccgtggcctcaaagaagtccgtggactccttgccaaagacttagctgttgttgcattgcgcgaaggtcttgatttacctccgactgatgatccaatgcttcttgcgtacctcttggacccgtcaaacacgacgcccgaaggcgtagcccgtcgttacggcggcgagtggaccgaagatgcaggcgagcgcgcgttattggccgaacgtttgcacgccaatttattaggacgtttgcaaggcgaggaacgtctcctctggctttacgaagaagtggagaaaccattgagtcgcgtgctcgcgcatatggaagctaccggtgtcaaattagacgtggcgtatttggaggcactcagccttgaagttgctgccgaaatgcgccgcttggaggaagaagtattccgtttagcaggccactcctttaaccttaattctcgcgatcagttagaacgtgtgttgttcgatgaacttggtctccctcctatcggcaagacagagaagaccggtaaacgtagcacttcagcggcggttttagaagctcttcgcgaagtccatcccattgtggacaagatcttgcagtaccgcgaactcgcgaaattgaaaggcacctatattgaccctcttccggcattagtccacccgaaaacgggacgcctccatacccgcttcaaccaaacagccacggcgaccggtcgtttgtcctcctctgatccaaaccttcagaatattccagtacgtaccccattgggccagaagatccgcaaagcgtttgtagctgaggagggttggcgtttagtggccctcgattatagccaaattgaattacgtgtccttgcccatctttctggcgatgagaacctcatccgcgtgtttcaggaaggccgtgacattcacactcaaacggcaagctggatgtttggattatcagctgaagcgatcgatcctttgatgcgtcgtgcagcgaagaccattaatttcggtgttctctacggtatgagtgcccatcgtttgtcgcaggaattaggcattccctatgaagaagctgtggcgttcattcagcgctactttcaaagctatcccaaagttaaagcatggatcgagaagactctcgaagaaggccgcacacgtggttacgtagagaccttatttggacgtcgccgctatgttcccgatttaaacgctcgcgtgaaatctgtccgtgaagccgccgaacgcatggcgttcaacatgcctgtacagggcacggcagctgacctcatgaaacttgcaatggtgcgcctttttccacaattgcgtgaagttggtgcccgcatgctcttgcaggtccacgatgaactcttgttagaagcgccaaaagagcgtgcggaagaggtggcagccctcgcgaaagaggttatggaaggcgtgtggcccttagcggtgcctcttgaagtcgaagttggtattggcgaggattggttggctgccaaaggataatga

SEQ ID NO: 534 - protein, 841 aa, synthetic construct
  REGION 1..841: note = Variant of DNA polymerase I from Thermus sp. strain 2.9
MHHHHHHGGSGMLPLFEPKGRVLLVDGHHLAYRNFFALKGLTTSRGEPVQGVYGFAKSLLKALKEDGDVVIVVFDAKAPSFRHEAYEAYKAGRAPTPEDFPRQLALMKELVDLLGLERLEVPGFEADDVLATLAKKAEREGYEVQILTADRDLFQLLSPRISVLHPEGHRITPEWLWEKYGLRPEQWVDFRALVGDPSDNIPGVKGIGEKTALKLLKEWGSLENLLKNLDQVKPESVREKILAHLEDLKLSRELSRVRTDLPLEVDFRGRREPDWEGLKAFLERLEFGSLLHEFGLLESPLPAEEAPWPPPEGAFLGYRLSRPEPMWAELLALAASAQGRVYRAEDPHGALRGLKEVRGLLAKDLAVVALREGLDLPPTDDPMLLAYLLDPSNTTPEGVARRYGGEWTEDAGERALLAERLHANLLGRLQGEERLLWLYEEVEKPLSRVLAHMEATGVKLDVAYLEALSLEVAAEMRRLEEEVFRLAGHSFNLNSRDQLERVLFDELGLPPIGKTEKTGKRSTSAAVLEALREVHPIVDKILQYRELAKLKGTYIDPLPALVHPKTGRLHTRFNQTATATGRLSSSDPNLQNIPVRTPLGQKIRKAFVAEEGWRLVALDYSQIELRVLAHLSGDENLIRVFQEGRDIHTQTASWMFGLSAEAIDPLMRRAAKTINFGVLYGMSAHRLSQELGIPYEEAVAFIQRYFQSYPKVKAWIEKTLEEGRTRGYVETLFGRRRYVPDLNARVKSVREAAERMAFNMPVQGTAADLMKLAMVRLFPQLREVGARMLLQVHDELLLEAPKERAEEVAALAKEVMEGVWPLAVPLEVEVGIGEDWLAAKG

SEQ ID NO: 535 - DNA, 2529 bp, synthetic construct
  misc_feature 1..2529: note = Variant of DNA polymerase I from Thermus sp. strain 2.9
  source 1..2529: mol_type = other DNA
atgcaccatcatcatcatcatggcggtagcggcatgttaccgttgttcgaacctaaaggtcgcgtgcttctggttgatggccatcatctcgcgtatcgtaacttctttgccctgaaaggattaaccaccagccgtggcgagccggtacagggtgtctacggctttgcaaagtcgctcctgaaagctctgaaagaagacggtgatgtggtgattgttgtctttgatgcgaaagcgccaagttttcgccacgaagcgtacgaagcttacaaagccgggcgtgctccaacgccggaagactttcctcgccaattggcgcttatgaaggaattagtggatttgcttggcctcgaacgcttggaagttcccggtttcgaggcagacgacgtattagcgactctcgcaaagaaagccgaacgtgagggctatgaagtccagatcttgacagcagatcgcgatcttttccagcttttatctccgcgcatttccgtgttacacccggaagggcatcgtatcaccccggaatggctctgggagaaatatggtttgcgtcccgaacaatgggtggattttcgcgccttagcgggcgatccgagcgacaatattccgggagttaaaggtatcggcgagaagacggcgctcaagctccttaaagaatgggggtcgttggagaacttgcttaagaatttagatcaggtcaaaccagcttcagtgcgtgagaagattcttgcacacctcgaagacctcaaattaagccgcgaattgtcccgtgtacgcaccgatttgccgctcgaagttgatttccgtggccgccgcgaacctgactgggagggtcttaaagcgtttttagagcgtcttgaatttggttcgctcttgcatgaattcggccttttagaaagcccgttaccagccgaagaagcaccttggccaccgcccgaaggcgcgtttttaggttaccgtttgagtcgcccggaaccgatgtgggccgaattattggctcttgcagcgtctgcccagggacgtgtgtatcgcgcggaagaccctcatggtgcgctccgtggcctcaaagaagtccgtggactccttgccaaagacttagctgttgttgcattgcgcgaaggtcttgatttacctccgactgatgatccaatgcttcttgcgtacctcttggacccgtcaaacacgacgcccgaaggcgtagcccgtcgttacggcggcgagtggaccgaagatgcaggtgagcgcgcgttattggccgaacgtttgcacgccaatttattaggacgtttgcaaggcgaggaacgtctcctctggctttacgaagaagtggagaaaccattgagtcgcgtgctcgcgcatatggaagctaccggtgtcaaattagacgtggcgtatttggagaacctcagccttgaagttgctgccgaaatgcgccgcttggaggaagaagtattccgtttagcaggccactcctttaaccttaattctcgcgatcagttagaacgtgtgttgttcgatgaacttggtctccctcctatcggcaagacagagaagaccggtaaacgtagcacttcagcggcggttttagaagctcttcgcgaagtccatcccattgtggacaagatcttgcagtaccgcgaactcgcgaaattgaaaggcacctatattgaccctcttccggcattagtccacccgaaaacgggacgcctccatacccgcttcaaccaaacagccacggcgaccggtcgtttgtcctcctctgatccaaaccttcagaatattccagtacgtaccccattgggccagaagatccgcaaagcgtttgtagctgaggagggttggcgtttagtggccctcgattatagccaaattgaattacgtgtccttgcccatctttctggcgatgagaacctcatccgcgtgtttcaggaaggccgcgacattcacactcaaacggcaagctggatgtttggattatcagctgaagcgatcgatcctttgatgcgtcgtgcagcgaagaccatcaatttcggtgttctctacggtatgagtgcccatcgtttgtcgcaggaattaggcattccctatgaagaagctgcggcgttcattcagcgctactttcaaagctatcccaaagttaaagcatggatcgagaagactctcgaagaaggccgcacacgtggttacgtagagaccttatttggacgtcgccgctatgttcccgatttaaacgctcgcgtgaaatctgtccgtgaagccgccgaacgcatggcgttcaacatgcctgtacagggcacggcagctgacctcatgaaacttgcaatggtgcgcctttttccacaattgcgtgaagttggtgcccgcatgctcttgcaggtccacgatgaactcttgttagaagcgccaaaagagcgtgcggaagaggtggcagccctcgcgaaagaggttatggaaggcgtgtggcccttagcggtgcctcttgaagtcgaagttggtattggcgaggattggttggctgccaaaggataatga

SEQ ID NO: 536 - protein, 841 aa, synthetic construct
  REGION 1..841: note = Variant of DNA polymerase I from Thermus sp. strain 2.9
MHHHHHHGGSGMLPLFEPKGRVLLVDGHHLAYRNFFALKGLTTSRGEPVQGVYGFAKSLLKALKEDGDVVIVVFDAKAPSFRHEAYEAYKAGRAPTPEDFPRQLALMKELVDLLGLERLEVPGFEADDVLATLAKKAEREGYEVQILTADRDLFQLLSPRISVLHPEGHRITPEWLWEKYGLRPEQWVDFRALAGDPSDNIPGVKGIGEKTALKLLKEWGSLENLLKNLDQVKPASVREKILAHLEDLKLSRELSRVRTDLPLEVDFRGRREPDWEGLKAFLERLEFGSLLHEFGLLESPLPAEEAPWPPPEGAFLGYRLSRPEPMWAELLALAASAQGRVYRAEDPHGALRGLKEVRGLLAKDLAVVALREGLDLPPTDDPMLLAYLLDPSNTTPEGVARRYGGEWTEDAGERALLAERLHANLLGRLQGEERLLWLYEEVEKPLSRVLAHMEATGVKLDVAYLENLSLEVAAEMRRLEEEVFRLAGHSFNLNSRDQLERVLFDELGLPPIGKTEKTGKRSTSAAVLEALREVHPIVDKILQYRELAKLKGTYIDPLPALVHPKTGRLHTRFNQTATATGRLSSSDPNLQNIPVRTPLGQKIRKAFVAEEGWRLVALDYSQIELRVLAHLSGDENLIRVFQEGRDIHTQTASWMFGLSAEAIDPLMRRAAKTINFGVLYGMSAHRLSQELGIPYEEAAAFIQRYFQSYPKVKAWIEKTLEEGRTRGYVETLFGRRRYVPDLNARVKSVREAAERMAFNMPVQGTAADLMKLAMVRLFPQLREVGARMLLQVHDELLLEAPKERAEEVAALAKEVMEGVWPLAVPLEVEVGIGEDWLAAKG

SEQ ID NO: 537 - DNA, 2529 bp, synthetic construct
  misc_feature 1..2529: note = Variant of DNA polymerase I from Thermus sp. strain 2.9
  source 1..2529: mol_type = other DNA
atgcaccatcatcatcatcatggcggtagcggcatgttaccgttgttcgaacctaaaggtcgcgtgcttctggttgatggccatcatctcgcgtatcgtaacttctttgccctgaaaggattaaccaccagccgtggcgagccggtacagggtgtctacggctttgcaaagtcgctcctgaaagctctgaaagaagacggtgatgtggtgattgttgtctttgatgcgaaagcgccaagttttcgccacgaagcgtacgaagcttacaaagccgggcgtgctccaacgccggaagactttcctcgccaattggcgcttatgaaggaattagtggatttgcttggcctcgaacgcttggaagttcccggtttcgaggcagacgacgtattagcgactctcgcaaagaaagccgaacgtgagggctatgaagtccagatcttgacagcagatcgcgatcttttccagcttttatctccgcgcatttccgtgttacacccggaagggcatcgtatcaccccggaatggctctgggagaaatatggtttgcgtcccgaacaatgggtggattttcgcgccttagcgggcgatccgagcgacaatattccgggagttaaaggtatcggcgagaagacggcgctcaagctccttaaagaatgggggtcgttggagaacttgcttaagaatttagatcaggtcaaaccagcttcagtgcgtgagaagattcttgcacacctcgaagacctcaaattaagccgcgaattgtcccgtgtacgcaccgatttgccgctcgaagttgatttccgtggccgccgcgaacctgactgggagggtcttaaagcgtttttagagcgtcttgaatttggttcgctcttgcatgaattcggccttttagaaagcccgttaccagccgaagaagcaccttggccaccgcccgaaggcgcgtttttaggttaccgtttgagtcgcccggaaccgatgtgggccgaattattggctcttgcagcgtctgcccagggacgtgtgtatcgcgcggaagaccctcatggtgcgctccgtggcctcaaagaagtccgtggactccttgccaaagacttagctgttgttgcattgcgcgaaggtcttgatttacctccgactgatgatccaatgcttcttgcgtacctcttggacccgtcaaacacgacgcccgaaggcgtagcccgtcgttacggcggcgagtggaccgaagatgcaggtgagcgcgcgttattggccgaacgtttgcacgccaatttattaggacgtttgcaaggcgaggaacgtctcctctggctttacgaagaagtggagaaaccattgagtcgcgtgctcgcgcatatggaagctaccggtgtcaaattagacgtggcgtatttggaggcactcagccttgaagttgctgccgaaatgcgccgcttggaggaagaagtattccgtttagcaggccactcctttaaccttaattctcgcgatcagttagaacgtgtgttgttcgatgaacttggtctccctcctatcggcaagacagagaagaccggtaaacgtagcacttcagcggcggttttagaagctcttcgcgaagtccatcccattgtggacaagatcttgcagtaccgcgaactcgcgaaattgaaaggcacctatattgaccctcttccggcattagtccacccgaaaacgggacgcctccatacccgcttcaaccaaacagccacggcgaccggtcgtttgtcctcctctgatccaaaccttcagaatattccagtacgtaccccattgggccagcacatccgcaaagcgtttgtagctgaggagggttggcgtttagtggccctcgattatagccaaattgaattacgtgtccttgcccatctttctggcgatgagaacctcatccgcgtgtttcaggaaggccgcgacattcacactcaaacggcaagctggatgtttggattatcagctgaagcgatcgatcctttgatgcgtcgtgcagcgaagaccatcaatttcggtgttctctacggtatgagtgcccatcgtttgtcgcaggaattaggcattccctatgaagaagctgcggcgttcattcggcgctactttcaaagctatcccaaagttaaagcatggatcgagaagactctcgaagaaggccgcacacgtggttacgtagagaccttatttggacgtcgccgctatgttcccgatttaaacgctcgcgtgaaatctgtccgtgaagccgccgaacgcatggcgttcaacatgcctgtacagggcacggcagctgacctcatgaaacttgcaatggtgcgcctttttccacaattgcgtgaagttggtgcccgcatgctcttgcaggtccacgatgaactcttgttagaagcgccaaaagagcgtgcggaagaggtggcagccctcgcgaaagaggttatggaaggcgtgtggcccttagcggtgcctcttgaagtcgaagttggtattggcgaggattggttggctgccaaaggataatga

SEQ ID NO: 538 - protein, 841 aa, synthetic construct
  REGION 1..841: note = Variant of DNA polymerase I from Thermus sp. strain 2.9
MHHHHHHGGSGMLPLFEPKGRVLLVDGHHLAYRNFFALKGLTTSRGEPVQGVYGFAKSLLKALKEDGDVVIVVFDAKAPSFRHEAYEAYKAGRAPTPEDFPRQLALMKELVDLLGLERLEVPGFEADDVLATLAKKAEREGYEVQILTADRDLFQLLSPRISVLHPEGHRITPEWLWEKYGLRPEQWVDFRALAGDPSDNIPGVKGIGEKTALKLLKEWGSLENLLKNLDQVKPASVREKILAHLEDLKLSRELSRVRTDLPLEVDFRGRREPDWEGLKAFLERLEFGSLLHEFGLLESPLPAEEAPWPPPEGAFLGYRLSRPEPMWAELLALAASAQGRVYRAEDPHGALRGLKEVRGLLAKDLAVVALREGLDLPPTDDPMLLAYLLDPSNTTPEGVARRYGGEWTEDAGERALLAERLHANLLGRLQGEERLLWLYEEVEKPLSRVLAHMEATGVKLDVAYLEALSLEVAAEMRRLEEEVFRLAGHSFNLNSRDQLERVLFDELGLPPIGKTEKTGKRSTSAAVLEALREVHPIVDKILQYRELAKLKGTYIDPLPALVHPKTGRLHTRFNQTATATGRLSSSDPNLQNIPVRTPLGQHIRKAFVAEEGWRLVALDYSQIELRVLAHLSGDENLIRVFQEGRDIHTQTASWMFGLSAEAIDPLMRRAAKTINFGVLYGMSAHRLSQELGIPYEEAAAFIRRYFQSYPKVKAWIEKTLEEGRTRGYVETLFGRRRYVPDLNARVKSVREAAERMAFNMPVQGTAADLMKLAMVRLFPQLREVGARMLLQVHDELLLEAPKERAEEVAALAKEVMEGVWPLAVPLEVEVGIGEDWLAAKG

SEQ ID NO: 539 - DNA, 2529 bp, synthetic construct
  misc_feature 1..2529: note = Variant of DNA polymerase I from Thermus sp. strain 2.9
  source 1..2529: mol_type = other DNA
atgcaccatcatcatcatcatggcggtagcggcatgttaccgttgttcgaacctaaaggtcgcgtgcttctggttgatggccatcatctcgcgtatcgtaacttctttgccctgaaaggattaaccaccagccgtggcgagccggtacagggtgtctacggctttgcaaagtcgctcctgaaagctctgaaagaagacggtgatgtggtgattgttgtctttgatgcgaaagcgccaagttttcgccacgaagcgtacgaagcttacaaagccgggcgtgctccaacgccggaagactttcctcgccaattggcgcttatgaaggaattagtggatttgcttggcctcgaacgcttggaagttcccggtttcgaggcagacgacgtattagcgactctcgcaaagaaagccgaacgtgagggctatgaagtccagatcttgacagcagatcgcgatcttttccagcttttatctccgcgcatttccgtgttacacccggaagggcatcgtatcaccccggaatggctctgggagaaatatggtttgcgtcccgaacaatgggtggattttcgcgccttagcgggcgatccgagcgacaatattccgggagttaaaggtatcggcgagaagacggcgctcaagctccttaaagaatgggggtcgttggagaacttgcttaagaatttagatcaggtcaaaccagcttcagtgcgtgagaagattcttgcacacctcgaagacctcaaattaagccgcgaattggtccgtgtacgcaccgatttgccgctcgaagttgatttccgtggccgccgcgaacctgactgggagggtcttaaagcgtttttagagcgtcttgaatttggttcgctcttgcatgaattcggccttttagaaagcccgttaccagccgaagaagcaccttggccaccgcccgaaggcgcgtttttaggttaccgtttgagtcgcccggaaccgatgtgggccgaattattggctcttgcagcgtctgcccagggacgtgtgtatcgcgcggaagaccctcatggtgcgctccgtggcctcaaagaagtccgtggactccttgccaaagacttagctgttgttgcattgcgcgaaggtcttgatttacctccgactgatgatccaatgcttcttgcgtacctcttggactcgtcaaacacgacgcccgaaggcgtagcccgtcgttacggcggcgagtggaccgaagatgcaggtgagcgcgcgttattggccgaacgtttgcacgccaatttattaggacgtttgcaaggcgaggaacgtctcctctggctttacgaagaagtggagaaaccattgagtcgcgtgctcgcgcatatggaagctaccggtgtcaaattagacgtggcgtatttggaggcactcagccttgaagtcgctgccgaaatgcgccgcttggaggaagaagtattccgtttagcaggccactcctttaaccttaattctcgcgatcagttagaacgtgtgttgttcgatgaacttggtctccctcctatcggcaagacagagaagaccggtaaacgtagcacttcagcggcggttttagaagctcttcgcgaagtccatcccattgtggacaagatcttgcagtaccgcgaactcgcgaaattgaaaggcacctatattgaccctcttccggcattagtccacccgaaaacgggacgcctccatacccgcttcaaccaaacagccacggcgaccggtcgtttgtcctcctctgatccaaaccttcagaatattccagtacgtaccccattgggccagaagatccgcaaagcgtttgtagctgaggagggttggcgtttagtggccctcgattatagccaaattgaattacgtgtccttgcccatctttctggcgatgagaacctcatccgcgtgtttcaggaaggccgcgacattcacactcaaacggcaagctggatgtttggattatcagctgaagcgatcgatcctttgatgcgtcgtgcagcgaagaccatcaatttcggtgttctctacggtatgagtgcccatcgtttgtcgcaggaattaggcattccctatgaagaagctgcggcgttcattcagcgctactttcaaagctatcccaaagttaaagcatggatcgagaagactctcgaagaaggccgcacacgtggttacgtagagaccttatttggacgtcgccgctatgttcccgatttaactgctcgcgtgaaatctgtccgtgaagccgccgaacgcatggcgtttaacatgcctgtacagggcacggcagctgacctcatgaaacttgcaatggtgcgcctttttccacaattgcgtgaagttggtgcccgcatgctcttgcaggtccacgatgaactcttgttagaagcgccaaaagagcgtgcggaagaggtggcagccctcgcgaaagaggttatggaaggcgtgtggcccttagcggtgcctcttgaagtcgaagttggtattggcgaggattggttggctgccaaaggataatga

SEQ ID NO: 540 - protein, 841 aa, synthetic construct
  REGION 1..841: note = Variant of DNA polymerase I from Thermus sp. strain 2.9
MHHHHHHGGSGMLPLFEPKGRVLLVDGHHLAYRNFFALKGLTTSRGEPVQGVYGFAKSLLKALKEDGDVVIVVFDAKAPSFRHEAYEAYKAGRAPTPEDFPRQLALMKELVDLLGLERLEVPGFEADDVLATLAKKAEREGYEVQILTADRDLFQLLSPRISVLHPEGHRITPEWLWEKYGLRPEQWVDFRALAGDPSDNIPGVKGIGEKTALKLLKEWGSLENLLKNLDQVKPASVREKILAHLEDLKLSRELVRVRTDLPLEVDFRGRREPDWEGLKAFLERLEFGSLLHEFGLLESPLPAEEAPWPPPEGAFLGYRLSRPEPMWAELLALAASAQGRVYRAEDPHGALRGLKEVRGLLAKDLAVVALREGLDLPPTDDPMLLAYLLDSSNTTPEGVARRYGGEWTEDAGERALLAERLHANLLGRLQGEERLLWLYEEVEKPLSRVLAHMEATGVKLDVAYLEALSLEVAAEMRRLEEEVFRLAGHSFNLNSRDQLERVLFDELGLPPIGKTEKTGKRSTSAAVLEALREVHPIVDKILQYRELAKLKGTYIDPLPALVHPKTGRLHTRFNQTATATGRLSSSDPNLQNIPVRTPLGQKIRKAFVAEEGWRLVALDYSQIELRVLAHLSGDENLIRVFQEGRDIHTQTASWMFGLSAEAIDPLMRRAAKTINFGVLYGMSAHRLSQELGIPYEEAAAFIQRYFQSYPKVKAWIEKTLEEGRTRGYVETLFGRRRYVPDLTARVKSVREAAERMAFNMPVQGTAADLMKLAMVRLFPQLREVGARMLLQVHDELLLEAPKERAEEVAALAKEVMEGVWPLAVPLEVEVGIGEDWLAAKG

SEQ ID NO: 541 - DNA, 2529 bp, synthetic construct
  misc_feature 1..2529: note = Variant of DNA polymerase I from Thermus sp. strain 2.9
  source 1..2529: mol_type = other DNA
atgcaccatcatcatcatcatggcggtagcggcatgttaccgttgttcgaacctaaaggtcgcgtgcttctggttgatggccatcatctcgcgtatcgtaacttctttgccctgaaaggattaaccaccagccgtggcgagccggtacagggtgtctacggctttgcaaagtcgctcctgaaagctctgaaagaagacggtgatgtggtgattgttgtctttgatgcgaaagcgccaagttttcgccacgaagcgtacgaagcttacaaagccgggcgtgctccaacgccggaagactttcctcgccaattggcgcttatgaaggaattagtggatttgcttggcctcgaacgcttggaagttcccggtttcgaggcagacgacgtattagcgactctcgcaaagaaagccgaacgtgagggctatgaagtccagatcttgacagcagatcgcgatcttttccagcttttatctccgcgcatctcggtgttacacccggaagggcatcgtatcaccccggaatggctctgggagaaatatggtttgcgtcccgaacaatgggtggattttcgcgccttagcaggcgatccgagcgacaatattccgggagttaaaggtatcggcgagaagacggcgctcaagctccttaaagaatgggggtcgttggagaacttgcttaagaatttagatcaggtcaaaccagcttcagtgcgtgagaagattcttgcacacctcgaagacctcaaattaagccgcgaattgtcccgtgtacgcaccgatttgccgctcgaagttgatttccgtggccgccgcgaacctgactgggagggtcttaaagcgtttttagagcgtcttgaatttggttcgctcttgcatgaattcggccttttagaaagcccgttaccagccgaagaagcaccttggccaccgcccgaaggcgcgtttttaggttaccgtttgagtcgcccggaaccgatgtgggccgaattattggctcttgcagcgtctgcccagggacgtgtgtatcgcgcggaagaccctcatggtgcgctccgtggcctcaaagaagtccgtggactccttgccaaagacttagctgttgttgcattgcgcgaaggtcttgatttacctccgactgatgatccaatgcttcttgcgtacctcttggacccgtcaaacacgacgcccgaaggcgtagcccgtcgttacggcggcgagtggaccgaagatgcaggtgagcgcgcgttattggccgaacgtttgcacgccaatttattaggacgtttgcaaggcgaggaacgtctcctctggctttacgaagaagtggagaaaccattgagtcgcgtgctcgcgcatatggaagctaccggtgtcaaattagacgtggcgtatttggaggcactcagccttgaagttgctgccgaaatgcgccgcttggaggaagaagtattccgtttagcaggccactcctttaaccttaattctcgcgatcagttagaacgtgtgttgttcgatgaacttggtctccctcctatcggcaagacagagaagaccggtaaacgtagcacttcagcggcggttttagaagctcttcgcgaagtccatcccattgtggacaagatcttgcagtaccgcgaactcgcgaaattgaaaggcacctatattgaccctcttccggcattagtccacccgaaaacgggacgcctccatacccgcttcaaccaaacagccacggcgaccggtcgtttgtcctcctctgatccaaaccttcagaatattccagtacgtaccccattgggccagaagatccgcaaagcgtttgtagctgaggagggttggcgtttagtggccctcgattatagccaaattgaattacgtgtccttgcccatctttctggcgatgagaacctcatccgcgtgtttcaggaaggcaaagacattcacactcaaacggcaagctggatgtttggattatcagctgaagcgatcgatcctttgatgcgtcgtgcagcgaagaccatcaatttcggtgttctctacggtatgagtgcccatcgtttgtcgcaggaattaggcattccctatgaagaagctgcggcgttcattcagcgctactttcaaagctatcccaaagttaaagcatggatcgagaagactctcgaagaaggccgcacacgtggttacgtagagaccttatttggacgtcgccgctatgttcccgatttaaacgctcgcgtgaaatctgtccgtgaagccgccgaacgcatggcgttcaacatgcctgtacagggcacggcagctgacctcatgaaacttgcaatggtgcgcctttttccacaattgcgtgaagttggtgcccgcatgctcttgcaggtccacgatgaactcttgttagaagcgccaaaagagcgtgcggaagaggtggcagccctcgcgaaagaggttatggaaggcgtgtggcccttagcggtgcctcttgaagtcgaagttggtattggcgaggattggttggctgccaaaggataatga

SEQ ID NO: 542 - protein, 841 aa, synthetic construct
  REGION 1..841: note = Variant of DNA polymerase I from Thermus sp. strain 2.9
MHHHHHHGGSGMLPLFEPKGRVLLVDGHHLAYRNFFALKGLTTSRGEPVQGVYGFAKSLLKALKEDGDVVIVVFDAKAPSFRHEAYEAYKAGRAPTPEDFPRQLALMKELVDLLGLERLEVPGFEADDVLATLAKKAEREGYEVQILTADRDLFQLLSPRISVLHPEGHRITPEWLWEKYGLRPEQWVDFRALAGDPSDNIPGVKGIGEKTALKLLKEWGSLENLLKNLDQVKPASVREKILAHLEDLKLSRELSRVRTDLPLEVDFRGRREPDWEGLKAFLERLEFGSLLHEFGLLESPLPAEEAPWPPPEGAFLGYRLSRPEPMWAELLALAASAQGRVYRAEDPHGALRGLKEVRGLLAKDLAVVALREGLDLPPTDDPMLLAYLLDPSNTTPEGVARRYGGEWTEDAGERALLAERLHANLLGRLQGEERLLWLYEEVEKPLSRVLAHMEATGVKLDVAYLEALSLEVAAEMRRLEEEVFRLAGHSFNLNSRDQLERVLFDELGLPPIGKTEKTGKRSTSAAVLEALREVHPIVDKILQYRELAKLKGTYIDPLPALVHPKTGRLHTRFNQTATATGRLSSSDPNLQNIPVRTPLGQKIRKAFVAEEGWRLVALDYSQIELRVLAHLSGDENLIRVFQEGKDIHTQTASWMFGLSAEAIDPLMRRAAKTINFGVLYGMSAHRLSQELGIPYEEAAAFIQRYFQSYPKVKAWIEKTLEEGRTRGYVETLFGRRRYVPDLNARVKSVREAAERMAFNMPVQGTAADLMKLAMVRLFPQLREVGARMLLQVHDELLLEAPKERAEEVAALAKEVMEGVWPLAVPLEVEVGIGEDWLAAKG

SEQ ID NO: 543 - DNA, 2529 bp, synthetic construct
  misc_feature 1..2529: note = Variant of DNA polymerase I from Thermus sp. strain 2.9
  source 1..2529: mol_type = other DNA
atgcaccatcatcatcatcatggcggtagcggcatgttaccgttgttcgaacctaaaggtcgcgtgcttctggttgatggccatcatctcgcgtatcgtaacttctttgccctgaaaggattaaccaccagccgtggcgagccggtacagggtgtctacggctttgcaaagtcgctcctgaaagctctgaaagaagacggtgatgtggtgattgttgtctttgatgcgaaagcgccaagttttcgccacgaagcgtacgaagcttacaaagccgggcgtgctccaacgccggaagactttcctcgccaattggcgcttatgaaggaattagtggatttgcttggcctcgaacgcttggaagttcccggtttcgaggcagacgacgtattagcgactctcgcaaagaaagccgaacgtgagggctatgaagtccagatcttgacagcagatcgcgatcttttccagcttttatctccgcgcatttccgtgttacacccggaagggcatcgcatcaccccggaatggctctgggagaaatatggtttgcgtcccgaacaatgggtggattttcgcgccttagcgggcgatccgagcgacaatattccgggagttaaaggtatcggcgagaagacggcgctcaagctccttaaagaatgggggtcgttggagaacttgcttaagaatttagatcaggtcaaaccagcttcagtgcgtgagaagattcttgcacacctcgaagacctcaaattaagccgcgaattgtcccgtgtacgcaccgatttgccgctcgaagttgatttccgtggccgccgcgaacctgactgggagggtcttaaagcgtttttagagcgtcttgaatttggttcgctcttgcatgaattcggccttttagaaagcccgttaccagccgaagaagcaccttggccaccgcccgaaggcgcgtttttaggttaccgtttgagtcgcccggaaccgatgtgggccgaattattggctcttgcagcgtctgcccagggacgtgtgtatcgcgcggaagaccctcatggtgcgctccgtggcctcaaagaagtccgtggactccttgccaaagacttagctgttgttgcattgcgcgaaggtcttgatttacctccgactgatgatccaatgcttcttgcgtacctcttggacccgtcaaacacgacgcccgaaggcgtagcccgtcgttacggcggcgagtggaccgaagatgcaggtgagcgcgcgttattggccgaacgtttgcaccagaatttattaggacgtttgcaaggcgaggaacgtctcctctggctttacgaagaagtggagaaaccattgagtcgcgtgctcgcgcatatggaagctaccggtgtcaaattagacgtggcgtatttggaggcactcagccttgaagttgctgccgaaatgcgccgcttggaggaagaagtattccgtttagcaggccactcctttaaccttaattctcgcgatcagttagaacgtgtgttgttcgatgaacttggtctccctcctatcggcaagacagagaagaccggtaaacgtagcacttcagcggcggttttagaagctcttcgcgaagtccatcccattgtggacaagatcttgcagtaccgcgaactcgcgaaattgaaaggcacctatattgaccctcttccggcattagtccacccgaaaacgggacgcctccatacccgcttcaaccaaacagccacggcgaccggtcgtttgtcctcctctgatccaaaccttcagaatattccagtacgtaccccattgggccagaagatccgcaaagcgtttgtagctgaggagggttggcgtttagtggccctcgattatagccaaattgaattacgtgtccttgcccatctttctggcgatgagaacctcatccgcgtgtttcaggaaggccgcgacattcacactcaaacggcaagctggatgtttggattatcagctgaagcgatcgatcctttgatgcgtcgtgcagcgaagaccatcaatttcggtgttctctacggtatgagtgcccatcgtttgtcgcaggaattaggcattccctatgaagaagctgtggcgttcattcagcgctactttcaaagctatcccaaagttaaagcatggatcgagaagactctcgaagaaggccgcacacgtggttacgtagagaccttatttggacgtcgccgctatgttcccgatttaaacgctcgcgtgaaatctgtccgtgaagccgccgaacgcatggcgttcaacatgcctgtacagggcacggcagctgacctcatgaaacttgcaatggtgcgcctttttccacaattgcgtgaagttggtgcccgcatgctcttgcaggtccacgatgaactcttgttagaagcgccaaaagagcgtgcggaagaggtggcagccctcgcgaaagaggttatggaaggcgtgtggcccttagcggtgcctcttgaagtcgaagttggtattggcgaggattggttggctgccaaaggataatga

SEQ ID NO: 544 - protein, 841 aa, synthetic construct
  REGION 1..841: note = Variant of DNA polymerase I from Thermus sp. strain 2.9
MHHHHHHGGSGMLPLFEPKGRVLLVDGHHLAYRNFFALKGLTTSRGEPVQGVYGFAKSLLKALKEDGDVVIVVFDAKAPSFRHEAYEAYKAGRAPTPEDFPRQLALMKELVDLLGLERLEVPGFEADDVLATLAKKAEREGYEVQILTADRDLFQLLSPRISVLHPEGHRITPEWLWEKYGLRPEQWVDFRALAGDPSDNIPGVKGIGEKTALKLLKEWGSLENLLKNLDQVKPASVREKILAHLEDLKLSRELSRVRTDLPLEVDFRGRREPDWEGLKAFLERLEFGSLLHEFGLLESPLPAEEAPWPPPEGAFLGYRLSRPEPMWAELLALAASAQGRVYRAEDPHGALRGLKEVRGLLAKDLAVVALREGLDLPPTDDPMLLAYLLDPSNTTPEGVARRYGGEWTEDAGERALLAERLHQNLLGRLQGEERLLWLYEEVEKPLSRVLAHMEATGVKLDVAYLEALSLEVAAEMRRLEEEVFRLAGHSFNLNSRDQLERVLFDELGLPPIGKTEKTGKRSTSAAVLEALREVHPIVDKILQYRELAKLKGTYIDPLPALVHPKTGRLHTRFNQTATATGRLSSSDPNLQNIPVRTPLGQKIRKAFVAEEGWRLVALDYSQIELRVLAHLSGDENLIRVFQEGRDIHTQTASWMFGLSAEAIDPLMRRAAKTINFGVLYGMSAHRLSQELGIPYEEAVAFIQRYFQSYPKVKAWIEKTLEEGRTRGYVETLFGRRRYVPDLNARVKSVREAAERMAFNMPVQGTAADLMKLAMVRLFPQLREVGARMLLQVHDELLLEAPKERAEEVAALAKEVMEGVWPLAVPLEVEVGIGEDWLAAKG

SEQ ID NO: 545 - DNA, 2529 bp, synthetic construct
  misc_feature 1..2529: note = Variant of DNA polymerase I from Thermus sp. strain 2.9
  source 1..2529: mol_type = other DNA
atgcaccatcatcatcatcatggcggtagcggcatgttaccgttgttcgaacctaaaggtcgcgtgcttctggttgatggccatcatctcgcgtatcgtaacttctttgccctgaaaggattaaccaccagccgtggcgagccggtacagggtgtctacggctttgcaaagtcgctcctgaaagctctgaaagaagacggtgatgtggtgattgttgtctttgatgcgaaagcgccaagttttcgccacgaagcgtacgaagcttacaaagccgggcgtgctccaacgccggaagactttcctcgccaattggcgcttatgaaggaattagtggatttgcttggcctcgaacgcttggaagttcccggtttcgaggcagacgacgtattagcgactctcgcaaagaaagccgaacgtgagggctatgaagtccagatcttgacagcagatcgcgatcttttccagcttttatctccgcgcatttccgtgttacacccggaagggcatcgtatcaccccggaatggctctgggagaaatatggtttgcgtcccgaacaatgggtggattttcgcgccttagcaggcgatccgagcgacaatattccgggagttaaaggtatcggcgagaagacggcgctcaagctccttaaagaatgggggtcgttggagaacttgcttaagaatttagatcaggtcaaaccagcttcagtgcgtgagaagattcttgcacacctcgaagacctcaaattaagccgcgaattgtcccgtgtacgcaccgatttgccgctcgaagttgatttccgtggccgccgcgaacctgactgggagggtcttaaagcgtttttagagcgtcttgaatttggttcgctcttgcatgaattcggccttttagaaagcccgttaccagccgaagaagcaccttggccaccgcccgaaggcgcgtttttaggttaccgtttgagtcgcccggaaccgatgtgggccgaattattggctcttgcagcgtctgcccagggacgtgtgtatcgcgcggaagaccctcatggtgcgctcaaaggcctcaaagaagtccgtggactccttgccaaagacttagctgttgttgcattgcgcgaaggtcttgatttacctccgactgatgatccaatgcttcttgcgtacctcttggacccgtcaaacacgacgcccgaaggcgtagcccgtcgttacggcggcgagtggaccgaagatgcaggtgagcgcgcgttattggccgaacgtttgcacgccaatttattaggacgtttgcaaggcgaggaacgtctcctctggctttacgaagaagtggagaaaccattgagtcgcgtgctcgcgcatatggaagctaccggtgtcaaattagacgtggcgtatttggaggcactcagccttgaagttgctgccgaaatgcgccgcttggaggaagaagtattccgtttagcaggccactcctttaaccttaattctcgcgatcagttagaacgtgtgttgttcgatgaacttggtctccctcctatcggcaagacagagaagaccggtaaacgtagcacttcagcggcggttttagaagctcttcgcgaagtccatcccattgtggacaagatcttgcagtaccgcgaactcgcgaaattgaaaggcacctatattgaccctcttccggcattagtccacccgaaaacgggacgcctccatacccgcttcaaccaaacagccacggcgaccggtcgtttgtcctcctctgatccaaaccttcagaatattccagtacgtaccccattgggccagaagatccgcaaagcgtttgtagctgaggagggttggcgtttagtggccctcgattatagccaaattgaattacgtgtccttgcccatctttctggcgatgagaacctcatccgcgtgtttcaggaaggccgcgacattcacactcaaacggcaagctggatgtttggattatcagctgaagcgatcgatcctttgatgcgtcgtgcagcgaagaccatcaatttcggtgttctctacggtatgagtgcccatcgtttgtcgcaggaattaggcattccctatgaagaagctgcggcgttcattcagcgctactttcaaagctatcccaaagttaaagcatggatcgagaagactctcgaagaaggccgcacacgtggttacgtagagaccttatttggacgtcgccgctatgttcccgatttaaacgctcgcgtgaaatctgtccgtgaagccgccgaacgcatggcgttcaacatgcctgtacagggcacggcagctgacctcatgaaacttgcaatggtgcgcctttttccacaattgcgtgaagttggtgcccgcatgctcttgcaggtccacgatgaactcttgttagaagcgccaaaagagcgtgcggaagaggtggcagccctcgcgaaagaggttatggaaggcgtgtggcccttagcggtgcctcttgaagtcgaagttggtattggcgaggattggttggctgccaaaggataatga

SEQ ID NO: 546 - protein, 841 aa, synthetic construct
  REGION 1..841: note = Variant of DNA polymerase I from Thermus sp. strain 2.9
MHHHHHHGGSGMLPLFEPKGRVLLVDGHHLAYRNFFALKGLTTSRGEPVQGVYGFAKSLLKALKEDGDVVIVVFDAKAPSFRHEAYEAYKAGRAPTPEDFPRQLALMKELVDLLGLERLEVPGFEADDVLATLAKKAEREGYEVQILTADRDLFQLLSPRISVLHPEGHRITPEWLWEKYGLRPEQWVDFRALAGDPSDNIPGVKGIGEKTALKLLKEWGSLENLLKNLDQVKPASVREKILAHLEDLKLSRELSRVRTDLPLEVDFRGRREPDWEGLKAFLERLEFGSLLHEFGLLESPLPAEEAPWPPPEGAFLGYRLSRPEPMWAELLALAASAQGRVYRAEDPHGALKGLKEVRGLLAKDLAVVALREGLDLPPTDDPMLLAYLLDPSNTTPEGVARRYGGEWTEDAGERALLAERLHANLLGRLQGEERLLWLYEEVEKPLSRVLAHMEATGVKLDVAYLEALSLEVAAEMRRLEEEVFRLAGHSFNLNSRDQLERVLFDELGLPPIGKTEKTGKRSTSAAVLEALREVHPIVDKILQYRELAKLKGTYIDPLPALVHPKTGRLHTRFNQTATATGRLSSSDPNLQNIPVRTPLGQKIRKAFVAEEGWRLVALDYSQIELRVLAHLSGDENLIRVFQEGRDIHTQTASWMFGLSAEAIDPLMRRAAKTINFGVLYGMSAHRLSQELGIPYEEAAAFIQRYFQSYPKVKAWIEKTLEEGRTRGYVETLFGRRRYVPDLNARVKSVREAAERMAFNMPVQGTAADLMKLAMVRLFPQLREVGARMLLQVHDELLLEAPKERAEEVAALAKEVMEGVWPLAVPLEVEVGIGEDWLAAKG

SEQ ID NO: 547 - DNA, 2529 bp, synthetic construct
  misc_feature 1..2529: note = Variant of DNA polymerase I from Thermus sp. strain 2.9
  source 1..2529: mol_type = other DNA
atgcaccatcatcatcatcatggcggtagcggcatgttaccgttgttcgaacctaaaggtcgcgtgcttctggttgatggccatcatctcgcgtatcgtaacttctttgccctgaaaggattaaccaccagccgtggcgagccggtacagggtgtctacggctttgcaaagtcgctcctgaaagctctgaaagaagacggtgatgtggtgattgttgtctttgatgcgaaagcgccaagttttcgccacgaagcgtacgaagcttacaaagccgggcgtgctccaacgccggaagactttcctcgccaattggcgcttatgaaggaattagtggatttgcttggcctcgaacgcttggaagttcccggtttcgaggcagacgacgtattagcgactctcgcaaagaaagccgaacgtgagggctatgaagtccagatcttgacagcagatcgcgatcttttccagcttttatctccgcgcatttccgtgttacacccggaagggcatcgtatcaccccggaatggctctgggagaaatatggtttgcgtcccgaacaatgggtggattttcgcgccttagcgggcgatccgagcgacaatattccgggagttaaaggtatcggcgagaagacggcgctcaagctccttaaagaatgggggtcgttggagaacttgcttaagaatttagatcaggtcaaaccagcttcagtgcgtgagaagattcttgcacacctcgaagacctcaaattaagccgcgaattgtcgcgtgtacgcaccgatttgccgctcgaagttgatttccgtggccgccgcgaacctgactgggagggtcttaaagcgtttttagagcgtcttgaatttggttcgctcttgcatgaattcggccttttagaaagcccgttaccagccgaagaagcaccttggccaccgcccgaaggcgcgtttttaggttaccgtttgagtcgcccggaaccgatgtgggccgaattattggctcttgcagcgtctgcccagggacgtgtgtatcgcgcggaagaccctcatggtgcgctccgtggcctcaaagaagtccgtggactccttgccaaagacttagctgttgttgcattgcgcgaaggtcttgatttacctccgactgatgatccaatgcttcttgcgtacctcttggacccgtcaaacacgacgcccgaaggcgtagcccgtcgttacggcggcgagtggaccgaagatgcaggtgagcgcgcgttattggccgaacgtttgcacgccaatttattaggacgtttgcaaggcgaggaacgtctcctctggctttacgaagaagtggagaaaccattgagtcgcgtgctcgcgcatatggaagctaccggtgtcaaattagacgtggcgtatttggaggcactcagccttgaagccgctgccgaaatgcgccgcttggaggaagaagtattccgtttagcaggccactcctttaaccttaattctcgcgatcagttagaacgtgtgttgttcgatgaacttggtctccctcctatcaccaagacagagaagaccggtaaacgtagcacttcagcggcggttttagaagctcttcgcgaagtccatcccattgtggacaagatcttgcagtaccgcgaactcgcgaaattgaaaggcacctatattgaccctcttccggcattagtccacccgaaaacgggacgcctccatacccgcttcaaccaaacagccacggcgaccggtcgtttgtcctcctctgatccaaaccttcagaatattccagtacgtaccccattgggccagaagatccgcaaagcgtttgtagctgaggagggttggcgtttagtggccctcgattatagccaaattgaattacgtgtccttgcccatctttctggcgatgagaacctcatccgcgtgtttcaggaaggccgcgacattcacactcaaacggcaagctggatgtttggagtgtcatcggaagcgatcgatcctttgatgcgtcgtgcagcgaagaccatcaatttcggtgttctctacggtatgagtgcccatcgtttgtcgcaggaattaggcattccctatgaagaagctgcggcgttcattcagcgctactttcaaagctatcccaaagttaaagcatggatcgagaagactctcgaagaaggccgcacacgtggttacgtagagaccttatttggacgtcgccgctatgttcccgatttaactgctcgcgtgaaatctgtccgtgaagccgccgaacgcatggcgtttaacatgcctgtacagggcacggcagctgacctcatgaaacttgcaatggtgcgcctttttccacaattgcgtgaagttggtgcccgcatgctcttgcaggtccacgatgaactcttgttagaagcgccaaaagagcgtgcggaagaggtggcagccctcgcgaaagaggttatggaaggcgtgtggcccttagcggtgcctcttgaagtcgaagttggtattggcgaggattggttggctgccaaaggataatga

SEQ ID NO: 548 - protein, 841 aa, synthetic construct
  REGION 1..841: note = Variant of DNA polymerase I from Thermus sp. strain 2.9
MHHHHHHGGSGMLPLFEPKGRVLLVDGHHLAYRNFFALKGLTTSRGEPVQGVYGFAKSLLKALKEDGDVVIVVFDAKAPSFRHEAYEAYKAGRAPTPEDFPRQLALMKELVDLLGLERLEVPGFEADDVLATLAKKAEREGYEVQILTADRDLFQLLSPRISVLHPEGHRITPEWLWEKYGLRPEQWVDFRALAGDPSDNIPGVKGIGEKTALKLLKEWGSLENLLKNLDQVKPASVREKILAHLEDLKLSRELSRVRTDLPLEVDFRGRREPDWEGLKAFLERLEFGSLLHEFGLLESPLPAEEAPWPPPEGAFLGYRLSRPEPMWAELLALAASAQGRVYRAEDPHGALRGLKEVRGLLAKDLAVVALREGLDLPPTDDPMLLAYLLDPSNTTPEGVARRYGGEWTEDAGERALLAERLHANLLGRLQGEERLLWLYEEVEKPLSRVLAHMEATGVKLDVAYLEALSLEAAAEMRRLEEEVFRLAGHSFNLNSRDQLERVLFDELGLPPITKTEKTGKRSTSAAVLEALREVHPIVDKILQYRELAKLKGTYIDPLPALVHPKTGRLHTRFNQTATATGRLSSSDPNLQNIPVRTPLGQKIRKAFVAEEGWRLVALDYSQIELRVLAHLSGDENLIRVFQEGRDIHTQTASWMFGVSSEAIDPLMRRAAKTINFGVLYGMSAHRLSQELGIPYEEAAAFIQRYFQSYPKVKAWIEKTLEEGRTRGYVETLFGRRRYVPDLTARVKSVREAAERMAFNMPVQGTAADLMKLAMVRLFPQLREVGARMLLQVHDELLLEAPKERAEEVAALAKEVMEGVWPLAVPLEVEVGIGEDWLAAKG

SEQ ID NO: 549 - DNA, 2529 bp, synthetic construct
  misc_feature 1..2529: note = Variant of DNA polymerase I from Thermus sp. strain 2.9
  source 1..2529: mol_type = other DNA
atgcaccatcatcatcatcatggcggtagcggcatgttaccgttgttcgaacctaaaggtcgcgtgcttctggttgatggccatcatctcgcgtatcgtaacttctttgccctgaaaggattaaccaccagccgtggcgagccggtacagggtgtctacggctttgcaaagtcgctcctgaaagctctgaaagaagacggtgatgtggtgattgttgtctttgatgcgaaagcgccaagttttcgccacgaagcgtacgaagcttacaaagccgggcgtgctccaacgccggaagactttcctcgccaattggcgcttatgaaggaattagtggatttgcttggcctcgaacgcttggaagttcccggtttcgaggcagacgacgtattagcgactctcgcaaagaaagccgaacgtgagggctatgaagtccagatcttgacagcagatcgcgatcttttccagcttttatctccgcgcatttccgtgttacacccggaagggcatcgtatcaccccggaatggctctgggagaaatatggtttgcgtcccgaacaatgggtggattttcgcgccttagcgggcgatccgagcgacaatattccgggagttaaaggtatcggcgagaagacggcgctcaagctccttaaagaatgggggtcgttggagaacttgcttaagaatttagatcaggtcaaaccagcttcagtgcgtgagaagattcttgcacacctcgaagacctcaaattaagccgcgaattgtcccgtgtacgcaccgatttgccgctcgaagttgatttccgtggccgccgcgaacctgactgggagggtcttaaagcgtttttagagcgtcttgaatttggttcgctcttgcatgaattcggccttttagaaagcccgttaccagccgaagaagcaccttggccaccgcccgaaggcgcgtttttaggttaccgtttgagtcgcccggaaccgatgtgggccgaattattggctcttgcagcgtctgcccagggacgtgtgtatcgcgcggaagaccctcatggtgcgctccgtggcctcaaagaagtccgtggactccttgccaaagacttagctgttgttgcattgcgcgaaggtcttgatttacctccgactgatgatccaatgcttcttgcgtacctcttggacccgtcaaacacgacgcccgaaggcgtagcccgtcgttacggcggcgagtggaccgaagatgcaggtgagcgcgcgttattggccgaacgtttgcacgccaatttattaggacgtttgcaaggcgaggaacgtctcctctggctttacgaagaagtggagaaaccattgagtcgcgtgctcgcgcatatggaagctaccggtgtcaaattagacgtggcgtatttggaggcactcagccttgaagttgctgccgaaatgcgccgcatggaggaagaagtattccgtttagcaggccactcctttaaccttaattctcgcgatcagttagaacgtgtgttgttcgatgaacttggtctccctcctatcggcaagacagagaagaccggtaaacgtagcacttcagcggcggttttagaagctcttcgcgaagtccatcccattgtggacaagatcttgcagtaccgcgaactcgcgaaattgaaaggcacctatattgaccctcttccggcattagtccacccgaaaacgggacgcctccatacccgcttcaaccaaacagccacggcgaccggtcgtttgtcctcctctgatccaaaccttcagaatattccagtacgtaccccattgggccagaagatccgcaaagcgtttgtagctgaggagggttggcgtttagtggccctcgattatagccaaattgaattacgtgtccttgcccatctttctggcgatgagaacctcatccgcgtgtttcaggaaggccgcgacattcacactcaaacggcaagctggatgtttggattatcagctgaagcgatcgatcctttgatgcgtcgtgcagcgaagaccatcaatttcggtgttctctacggtatgagtgcccatcgtttgtcgcaggaattaggcattccctatgaagaagctgcggcgttcattcagcgctactttcaaagctatcccaaagttaaagcatggatcgagaagactctcgaagaaggccgcacacgtggttacgtagagaccttatttggacgtcgccgctatgttcccgatttaaacgctcgcgtgaaatctgtccgtgaagccgccgaacgcatggcgttcaacatgcctgtacagggcacggcagctgacctcatgaaacttgcaatggtgcgcctttttccacaattgcgtgaagttggtgcccgcatgctcttgcaggtccacgatgaactcttgttagaagcgccaaaagagcgtgcggaagaggtggcagccctcgcgaaagaggttatggaaggcgtgtggcccttagcggtgcctcttgaagtcgaagttggtattggcgaggattggttggctgccaaaggataatga

SEQ ID NO: 550 - protein, 841 aa, synthetic construct
  REGION 1..841: note = Variant of DNA polymerase I from Thermus sp. strain 2.9
MHHHHHHGGSGMLPLFEPKGRVLLVDGHHLAYRNFFALKGLTTSRGEPVQGVYGFAKSLLKALKEDGDVVIVVFDAKAPSFRHEAYEAYKAGRAPTPEDFPRQLALMKELVDLLGLERLEVPGFEADDVLATLAKKAEREGYEVQILTADRDLFQLLSPRISVLHPEGHRITPEWLWEKYGLRPEQWVDFRALAGDPSDNIPGVKGIGEKTALKLLKEWGSLENLLKNLDQVKPASVREKILAHLEDLKLSRELSRVRTDLPLEVDFRGRREPDWEGLKAFLERLEFGSLLHEFGLLESPLPAEEAPWPPPEGAFLGYRLSRPEPMWAELLALAASAQGRVYRAEDPHGALRGLKEVRGLLAKDLAVVALREGLDLPPTDDPMLLAYLLDPSNTTPEGVARRYGGEWTEDAGERALLAERLHANLLGRLQGEERLLWLYEEVEKPLSRVLAHMEATGVKLDVAYLEALSLEVAAEMRRMEEEVFRLAGHSFNLNSRDQLERVLFDELGLPPIGKTEKTGKRSTSAAVLEALREVHPIVDKILQYRELAKLKGTYIDPLPALVHPKTGRLHTRFNQTATATGRLSSSDPNLQNIPVRTPLGQKIRKAFVAEEGWRLVALDYSQIELRVLAHLSGDENLIRVFQEGRDIHTQTASWMFGLSAEAIDPLMRRAAKTINFGVLYGMSAHRLSQELGIPYEEAAAFIQRYFQSYPKVKAWIEKTLEEGRTRGYVETLFGRRRYVPDLNARVKSVREAAERMAFNMPVQGTAADLMKLAMVRLFPQLREVGARMLLQVHDELLLEAPKERAEEVAALAKEVMEGVWPLAVPLEVEVGIGEDWLAAKG

SEQ ID NO: 551 - DNA, 2529 bp, synthetic construct
  misc_feature 1..2529: note = Variant of DNA polymerase I from Thermus sp. strain 2.9
  source 1..2529: mol_type = other DNA
atgcaccatcatcatcatcatggcggtagcggcatgttaccgttgttcgaacctaaaggtcgcgtgcttctggttgatggccatcatctcgcgtatcgtaacttctttgccctgaaaggattaaccaccagccgtggcgagccggtacagggtgtctacggctttgcaaagtcgctcctgaaagctctgaaagaagacggtgatgtggtgattgttgtctttgatgcgaaagcgccaagttttcgccacgaagcgtacgaagcttacaaagccgggcgtgctccaacgccggaagactttcctcgccaattggcgcttatgaaggaattagtggatttgcttggcctcgaacgcttggaagttcccggtttcgaggcagacgacgtattagcgactctcgcaaagaaagccgaacgtgagggctatgaagtccagatcttgacagcagatcgcgatcttttccagcttttatctccgcgcatctcggtgttacacccggaagggcatcgcatcaccccggaatggctctgggagaaatatggtttgcgtcccgaacaatgggtggattttcgcgccttagcaggcgatccgagcgacaatattccgggagttaaaggtatcggcgagaagacggcgctcaagctccttaaagaatgggggtcgttggagaacttgcttaagaatttagatcaggtcaaaccagcttcagtgcgtgagaagattcttgcacacctcgaagacctcaaattaagccgcgaattgtcccgtgtacgcaccgatttgccgctcgaagttgatttccgtggccgccgcgaacctgactgggagggtcttaaagcgtttttagagcgtcttgaatttggttcgctcttgcatgaattcggccttttagaaagcccgttaccagccgaagaagcaccttggccaccgcccgaaggcgcgtttttaggttaccgtttgagtcgcccggaaccgatgtgggccgaattattggctcttgcagcgtctgcccagggacgtgtgtatcgcgcggaagaccctcatggtgcgctccgtggcctcaaagaagtccgtggactccttgccaaagacttagctgttgttgcattgcgcgaaggtcttgatttacctccgactgatgatccaatgcttcttgcgtacctcttggacccgtcaaacacgacgcccgaaggcgtagcccgtcgttacggcggcgagtggaccgaagatgcaggtgagcgcgcgttattggccgaacgtttgcacgccaatttattaggacgtttgcaaggcgaggaacgtctcctctggctttacgaagaagtggagaaaccattgagtcgcgtgctcgcgcatatggaagctaccggtgtcaaattagacgtggcgtatttggaggcactcagccttgaagttgctgccgaaattcgccgcttggaggaagaagtattccgtttagcaggccactcctttaaccttaattctcgcgatcagttagaacgtgtgttgttcgatgaacttggtctccctcctatcggcaagacagagaagaccggtaaacgtagcacttcagcggcggttttagaagctcttcgcgaagtccatcccattgtggacaagatcttgcagtaccgcgaactcgcgaaattgaaaggcacctatattgaccctcttccggcattagtccacccgaaaacgggacgcctccatacccgcttcaaccaaacagccacggcgaccggtcgtttgtcctcctctgatccaaaccttcagaatattccagtacgtaccccattgggccagaagatccgcaaagcgtttgtagctgaggagggttggcgtttagtggccctcgattatagccaaattgaattacgtgtccttgcccatctttctggcgatgagaacctcatccgcgtgtttcaggaaggccgcgacattcacactcaaacggcaagctggatgtttggattatcagctgaagcgatcgatcctttgatgcgtcgtgcagcgaagaccatcaatttcggtgttctctacggtatgagtgcccatcgtttgtcgcaggaattaggcattccctatgaagaagctgcggcgttcattcagcgctactttcaaagctatcccaaagttaaagcatggatcgagaagactctcgaagaaggccgcacacgtggttacgtagagaccttatttggacgtcgccgctatgttcccgatttaaacgctcgcgtgaaatctgtccgtgaagccgccgaacgcatggcgttcaacatgcctgtacagggcacggcagctgacctcatgaaacttgcaatggtgcgcctttttccacaattgcgtgaagttggtgcccgcatgctcttgcaggtccacgatgaactcttgttagaagcgccaaaagagcgtgcggaagaggtggcagccctcgcgaaagaggttatggaaggcgtgtggcccttagcggtgcctcttgaagtcgaagttggtattggcgaggattggttggctgccaaaggataatga

SEQ ID NO: 552 - protein, 841 aa, synthetic construct
  REGION 1..841: note = Variant of DNA polymerase I from Thermus sp. strain 2.9
MHHHHHHGGSGMLPLFEPKGRVLLVDGHHLAYRNFFALKGLTTSRGEPVQGVYGFAKSLLKALKEDGDVVIVVFDAKAPSFRHEAYEAYKAGRAPTPEDFPRQLALMKELVDLLGLERLEVPGFEADDVLATLAKKAEREGYEVQILTADRDLFQLLSPRISVLHPEGHRITPEWLWEKYGLRPEQWVDFRALAGDPSDNIPGVKGIGEKTALKLLKEWGSLENLLKNLDQVKPASVREKILAHLEDLKLSRELSRVRTDLPLEVDFRGRREPDWEGLKAFLERLEFGSLLHEFGLLESPLPAEEAPWPPPEGAFLGYRLSRPEPMWAELLALAASAQGRVYRAEDPHGALRGLKEVRGLLAKDLAVVALREGLDLPPTDDPMLLAYLLDPSNTTPEGVARRYGGEWTEDAGERALLAERLHANLLGRLQGEERLLWLYEEVEKPLSRVLAHMEATGVKLDVAYLEALSLEVAAEIRRLEEEVFRLAGHSFNLNSRDQLERVLFDELGLPPIGKTEKTGKRSTSAAVLEALREVHPIVDKILQYRELAKLKGTYIDPLPALVHPKTGRLHTRFNQTATATGRLSSSDPNLQNIPVRTPLGQKIRKAFVAEEGWRLVALDYSQIELRVLAHLSGDENLIRVFQEGRDIHTQTASWMFGLSAEAIDPLMRRAAKTINFGVLYGMSAHRLSQELGIPYEEAAAFIQRYFQSYPKVKAWIEKTLEEGRTRGYVETLFGRRRYVPDLNARVKSVREAAERMAFNMPVQGTAADLMKLAMVRLFPQLREVGARMLLQVHDELLLEAPKERAEEVAALAKEVMEGVWPLAVPLEVEVGIGEDWLAAKG

SEQ ID NO: 553 - DNA, 2529 bp, synthetic construct
  misc_feature 1..2529: note = Variant of DNA polymerase I from Thermus sp. strain 2.9
  source 1..2529: mol_type = other DNA
atgcaccatcatcatcatcatggcggtagcggcatgttaccgttgttcgaacctaaaggtcgcgtgcttctggttgatggccatcatctcgcgtatcgtaacttctttgccctgaaaggattaaccaccagccgtggcgagccggtacagggtgtctacggctttgcaaagtcgctcctgaaagctctgaaagaagacggtgatgtggtgattgttgtctttgatgcgaaagcgccaagttttcgccacgaagcgtacgaagcttacaaagccgggcgtgctccaacgccggaagactttcctcgccaattggcgcttatgaaggaattagtggatttgcttggcctcgaacgcttggaagttcccggtttcgaggcagacgacgtattagcgactctcgcaaagaaagccgaacgtgagggctatgaagtccagatcttgacagcagatcgcgatcttttccagcttttatctccgcgcatttccgtgttacacccggaagggcatcgtatcaccccggaatggctctgggagaaatatggtttgcgtcccgaacaatgggtggattttcgcgccttagcgggcgatccgagcgacaatattccgggagttaaaggtatcggcgagaagacggcgctcaagctccttaaagaatgggggtcgttggagaacttgcttaagaatttagatcaggtcaaaccagcttcagtgcgtgagaagattcttgcacacctcgaagacctcaaattaagccgcgaattgtcccgtgtacgcaccgatttgccgctcgaagttgatttccgtcgccgccgcgaacctgactgggagggtcttaaagcgtttttagagcgtcttgaatttggttcgctcttgcatgaattcggccttttagaaagcccgttaccagccgaagaagcaccttggccaccgcccgaaggcgcgtttttaggttaccgtttgagtcgcccggaaccgatgtgggccgaattattggctcttgcagcgtctgcccagggacgtgtgtatcgcgcggaagaccctcatggtgcgctccgtggcctcaaagaagtccgtggactccttgccaaagacttagctgttgttgcattgcgcgaaggtcttgatttacctccgactgatgatccaatgcttcttgcgtacctcttggacccgtcaaacacgacgcccgaaggcgtagcccgtcgttacggcggcgagtggaccgaagatgcaggtgagcgcgcgttattggccgaacgtttgcacgccaatttattaggacgtttgcaaggcgaggaacgtctcctctggctttacgaagaagtggagaaaccattgagtcgcgtgctcgcgcatatggaagctaccggtgtcaaattagacgtggcgtatttggaggcactcagccttgaagttgctgccgaaatgcgccgcttggaggaagaagtattccgtttagcaggccactcctttaaccttaattctcgcgatcagttagaacgtgtgttgttcgatgaacttggtctccctcctatcggcaagacagagaagaccggtaaacgtagcacttcagcggcggttttagaagctcttcgcgaagtccatcccattgtggacaagatcttgcagtaccgcgaactcgcgaaattgaaaggcacctatattgaccctcttccggcattagtccacccgaaaacgggacgcctccatacccgcttcaaccaaacagccacggcgaccggtcgtttgtcctcctctgatccaaaccttcagaatattccagtacgtaccccattgggccagaagatccgccgcgcgtttgtagctgaggagggttggcgtttagtggccctcgattatagccaaattgaattacgtgtccttgcccatctttctggcgatgagaacctcatccgcgtgtttcaggaaggccgcgacattcacactcaaacggcaagctggatgtttggattatcagctgaagcgatcgatcctttgatgcgtcgtgcagcgaagaccatcaatttcggtgttctctacggtatgagtgcccatcgtttgtcgcaggaattaggcattccctatgaagaagctgcggcgttcattcagcgctactttcaaagctatcccaaagttaaagcatggatcgagaagactctcgaagaaggccgcacacgtggttacgtagagaccttatttggacgtcgccgctatgttcccgatttaaacgctcgcgtgaaatctgtccgtgaagccgccgaacgcatggcgttcaacatgcctgtacagggcacggcagctgacctcatgaaacttgcaatggtgcgcctttttccacaattgcgtgaagttggtgcccgcatgctcttgcaggtccacgatgaactcttgttagaagcgccaaaagagcgtgcggaagaggtggcagccctcgcgaaagaggttatggaaggcgtgtggcccttagcggtgcctcttgaagtcgaagttggtattggcgaggattggttggctgccaaaggataatga

SEQ ID NO: 554 - protein, 841 aa, synthetic construct
  REGION 1..841: note = Variant of DNA polymerase I from Thermus sp. strain 2.9
MHHHHHHGGSGMLPLFEPKGRVLLVDGHHLAYRNFFALKGLTTSRGEPVQGVYGFAKSLLKALKEDGDVVIVVFDAKAPSFRHEAYEAYKAGRAPTPEDFPRQLALMKELVDLLGLERLEVPGFEADDVLATLAKKAEREGYEVQILTADRDLFQLLSPRISVLHPEGHRITPEWLWEKYGLRPEQWVDFRALAGDPSDNIPGVKGIGEKTALKLLKEWGSLENLLKNLDQVKPASVREKILAHLEDLKLSRELSRVRTDLPLEVDFRRRREPDWEGLKAFLERLEFGSLLHEFGLLESPLPAEEAPWPPPEGAFLGYRLSRPEPMWAELLALAASAQGRVYRAEDPHGALRGLKEVRGLLAKDLAVVALREGLDLPPTDDPMLLAYLLDPSNTTPEGVARRYGGEWTEDAGERALLAERLHANLLGRLQGEERLLWLYEEVEKPLSRVLAHMEATGVKLDVAYLEALSLEVAAEMRRLEEEVFRLAGHSFNLNSRDQLERVLFDELGLPPIGKTEKTGKRSTSAAVLEALREVHPIVDKILQYRELAKLKGTYIDPLPALVHPKTGRLHTRFNQTATATGRLSSSDPNLQNIPVRTPLGQKIRRAFVAEEGWRLVALDYSQIELRVLAHLSGDENLIRVFQEGRDIHTQTASWMFGLSAEAIDPLMRRAAKTINFGVLYGMSAHRLSQELGIPYEEAAAFIQRYFQSYPKVKAWIEKTLEEGRTRGYVETLFGRRRYVPDLNARVKSVREAAERMAFNMPVQGTAADLMKLAMVRLFPQLREVGARMLLQVHDELLLEAPKERAEEVAALAKEVMEGVWPLAVPLEVEVGIGEDWLAAKG

SEQ ID NO: 555 - DNA, 2529 bp, synthetic construct
  misc_feature 1..2529: note = Variant of DNA polymerase I from Thermus sp. strain 2.9
  source 1..2529: mol_type = other DNA
atgcaccatcatcatcatcatggcggtagcggcatgttaccgttgttcgaacctaaaggtcgcgtgcttctggttgatggccatcatctcgcgtatcgtaacttctttgccctgaaaggattaaccaccagccgtggcgagccggtacagggtgtctacggctttgcaaagtcgctcctgaaagctctgaaagaagacggtgatgtggtgattgttgtctttgatgcgaaagcgccaagttttcgccacgaagcgtacgaagcttacaaagccgggcgtgctccaacgccggaagactttcctcgccaattggcgcttatgaaggaattagtggatttgcttggcctcgaacgcttggaagttcccggtttcgaggcagacgacgtattagcgactctcgcaaagaaagccgaacgtgagggctatgaagtccagatcttgacagcagatcgcgatcttttccagcttttatctccgcgcatttccgtgttacacccggaagggcatctgatcaccccggaatggctctgggagaaatatggtttgcgtcccgaacaatgggtggattttcgcgccttagcgggcgatccgagcgacaatattccgggagttaaaggtatcggcgagaagacggcgctcaagctccttaaagaatgggggtcgttggagaacttgcttaagaatttagatcaggtcaaaccagcttcagtgcgtgagaagattcttgcacacctcgaagacctcaaattaagccgcgaattgtcccgtgtacgcaccgatttgccgctcgaagttgatttccgtggccgccgcgaacctgactgggagggtcttaaagcgtttttagagcgtcttgaatttggttcgctcttgcatgaattcggccttttagaaagcccgttaccagccgaagaagcaccttggccaccgcccgaaggcgcgtttttaggttaccgtttgagtcgcccggaaccgatgtgggccgaattattggctcttgcagcgtctgcccagggacgtgtgtatcgcgcggaagaccctcatggtgcgctccgcggcctcaaagaagtccgtggactccttgccaaagacttagctgttgttgcattgcgcgaaggtcttgatttacctccgactgatgatccaatgcttcttgcgtacctcttggacccgtcaaacacgacgcccgaaggcgtagcccgtcgttacggcggcgagtggaccgaagatgcagccgagcgcgcgttattggccgaacgtttgcaccagaatttattaggacgtttgcaaggcgaggaacgtctcctctggctttacgaagaagtggagaaaccattgagtcgcgtgctcgcgcatatggaagctaccggtgtcaaattagacgtggcgtatttggaggcactcagccttgaagttgctgccgaaattcgccgcttggaggaagaagtattccgtttagcaggccactcctttaaccttaattctcgcgatcagttagaacgtgtgttgttcgatgaacttggtctccctcctatcggcaagacagagaagaccggtaaacgtagcacttcagcggcggttttagaagctcttcgcgaagtccatcccattgtggacaagatcttgcagtaccgcgaactcgcgaaattgaaaggcacctatattgaccctcttccggcattagtccacccgaaaacgggacgcctccatacccgcttcaaccaaacagccacggcgaccggtcgtttgtcctcctctgatccaaaccttcagaatattccagtacgtaccccattgggccagaagatccgccgcgcgtttgtagctgaggagggttggcgtttagtggccctcgattatagccaaattgaattacgtgtccttgcccatctttctggcgatgagaacctcatccgcgtgtttcaggaaggcaaagacattcacactcaaacggcaagctggatgtttggattatcgccggaagcgatcgatcctttgatgcgtcgtgcagcgaagaccgttaatttcggtgttctctacggtatgagtgcccatcgtttgtcgcaggaattaggcattccctatgaagaagctgcggcgttcattcagcgctactttcaaagctatcccaaagttaaagcatggatcgagaagactctcgaagaaggccgcacacgtggttacgtagagaccttatttggacgtcgccgctatgttcccgatttaaacgctcgcgtgaaatctgtccgtgaagccgccgaacgcatggcgttcaacatgcctgtacagggcacggcagctgacctcatgaaacttgcaatggtgcgcctttttccacaattgcgtgaagttggtgcccgcatgctcttgcaggtccacgatgaactcttgttagaagcgccaaaagagcgtgcggaagaggtggcagccctcgcgaaagaggttatggaaggcgtgtggcccttagcggtgcctcttgaagtcgaagttggtattggcgaggattggttggctgccaaaggataatga

SEQ ID NO: 556 - protein, 841 aa, synthetic construct
  REGION 1..841: note = Variant of DNA polymerase I from Thermus sp. strain 2.9
MHHHHHHGGSGMLPLFEPKGRVLLVDGHHLAYRNFFALKGLTTSRGEPVQGVYGFAKSLLKALKEDGDVVIVVFDAKAPSFRHEAYEAYKAGRAPTPEDFPRQLALMKELVDLLGLERLEVPGFEADDVLATLAKKAEREGYEVQILTADRDLFQLLSPRISVLHPEGHLITPEWLWEKYGLRPEQWVDFRALAGDPSDNIPGVKGIGEKTALKLLKEWGSLENLLKNLDQVKPASVREKILAHLEDLKLSRELSRVRTDLPLEVDFRGRREPDWEGLKAFLERLEFGSLLHEFGLLESPLPAEEAPWPPPEGAFLGYRLSRPEPMWAELLALAASAQGRVYRAEDPHGALRGLKEVRGLLAKDLAVVALREGLDLPPTDDPMLLAYLLDPSNTTPEGVARRYGGEWTEDAAERALLAERLHQNLLGRLQGEERLLWLYEEVEKPLSRVLAHMEATGVKLDVAYLEALSLEVAAEIRRLEEEVFRLAGHSFNLNSRDQLERVLFDELGLPPIGKTEKTGKRSTSAAVLEALREVHPIVDKILQYRELAKLKGTYIDPLPALVHPKTGRLHTRFNQTATATGRLSSSDPNLQNIPVRTPLGQKIRRAFVAEEGWRLVALDYSQIELRVLAHLSGDENLIRVFQEGKDIHTQTASWMFGLSPEAIDPLMRRAAKTVNFGVLYGMSAHRLSQELGIPYEEAAAFIQRYFQSYPKVKAWIEKTLEEGRTRGYVETLFGRRRYVPDLNARVKSVREAAERMAFNMPVQGTAADLMKLAMVRLFPQLREVGARMLLQVHDELLLEAPKERAEEVAALAKEVMEGVWPLAVPLEVEVGIGEDWLAAKG

SEQ ID NO: 557 - DNA, 2529 bp, synthetic construct
  misc_feature 1..2529: note = Variant of DNA polymerase I from Thermus sp. strain 2.9
  source 1..2529: mol_type = other DNA
atgcaccatcatcatcatcatggcggtagcggcatgttaccgttgttcgaacctaaaggtcgcgtgcttctggttgatggccatcatctcgcgtatcgtaacttctttgccctgaaaggattaaccaccagccgtggcgagccggtacagggtgtctacggctttgcaaagtcgctcctgaaagctctgaaagaagacggtgatgtggtgattgttgtctttgatgcgaaagcgccaagttttcgccacgaagcgtacgaagcttacaaagccgggcgtgctccaacgccggaagactttcctcgccaattggcgcttatgaaggaattagtggatttgcttggcctcgaacgcttggaagttcccggtttcgaggcagacgacgtattagcgactctcgcaaagaaagccgaacgtgagggctatgaagtccagatcttgacagcagatcgcgatcttttccagcttttatctccgcgcatttccgtgttacacccggaagggcatcgtatcaccccggaatggctctgggagaaatatggtttgcgtcccgaacaatgggtggattttcgcgccttagcgggcgatccgagcgacaatattccgggagttaaaggtatcggcgagaagacggcgctcaagctccttaaagaatgggggtcgttggagaacttgcttaagaatttagatcaggtcaaaccagcttcagtgcgtgagaagattcttgcacacctcgaagacctcaaattaagccgcgaattgtcccgtgtacgcaccgatttgccgctcgaagttgatttccgtggccgccgcgaacctgactgggagggtcttaaagcgtttttagagcgtcttgaatttggttcgctcttgcatgaattcggccttttagaaagcccgttaccagccgaagaagcaccttggccaccgcccgaaggcgcgtttttaggttaccgtttgagtcgcccggaaccgatgtgggccgaattattggctcttgcagcgtctgcccagggacgtgtgtatcgcgcggaagaccctcatggtgcgctccgtggcctcaaagaagtccgtggactccttgccaaagacttagctgttgttgcattgcgcgaaggtcttgatttacctccgactgatgatccaatgcttcttgcgtacctcttggacccgtcaaacacgacgcccgaaggcgtagcccgtcgttacggcggcgagtggaccgaagatgcaggtgagcgcgcgttattggccgaacgtttgcacgccaatttattaggacgtttgcaaggcgaggaacgtctcctctggctttacgaagaagtggagaaaccattgagtcgcgtgctcgcgcatatggaagctaccggtgtcaaattagacgtggcgtatttggaggcactcagccttgaagttgctgccgaaatgcgccgcttggaggaagaagtattccgtttagcaggccactcctttaaccttaattctcgcgatcagttagaacgtgtgttgttcgatgaacttggtctccctcctatcggcaagacagagaagaccggtaaacgtagcacttcagcggcggttttagaagctcttcgcgaagtccatcccattgtggacaagatcttgcagtaccgcgaactcgcgaaattgaaaggcacctatattgaccctcttccggcattagtccacgagaaaacgggacgcctccatacccgcttcaaccaaacagccacggcgaccggtcgtttgtcctcctctgatccaaaccttcagaatattccagtacgtaccccattgggccagaagatccgcaaagcgtttgtagctgaggagggttggcgtttagtggccctcgattatagccaaattgaattacgtgtccttgcccatctttctggcgatgagaacctcatccgcgtgtttcaggaaggccgcgacattcacactcaaacggcaagctggatgtttggattatcagctgaagcgatcgatcctttgatgcgtcgtgcagcgaagaccatcaatttcggtgttctctacggtatgagtgcccatcgtttgtcgcaggaattaggcattccctatgaagaagctgcggcgttcattcagcgctactttcaaagctatcccaaagttaaagcatggatcgagaagactctcgaagaaggccgcacacgtggttacgtagagaccttatttggacgtcgccgctatgttcccgatttaaacgctcgcgtgaaatctgtccgtgaagccgccgaacgcatggcgttcaacatgcctgtacagggcacggcagctgacctcatgaaacttgcaatggtgcgcctttttccacaattgcgtgaagttggtgcccgcatgctcttgcaggtccacgatgaactcttgttagaagcgccaaaagagcgtgcggaagaggtggcagccctcgcgaaagaggttatggaaggcgtgtggcccttagcggtgcctcttgaagtcgaagttggtattggcgaggattggttggctgccaaaggataatga

SEQ ID NO: 558 - protein, 841 aa, synthetic construct
  REGION 1..841: note = Variant of DNA polymerase I from Thermus sp. strain 2.9
MHHHHHHGGSGMLPLFEPKGRVLLVDGHHLAYRNFFALKGLTTSRGEPVQGVYGFAKSLLKALKEDGDVVIVVFDAKAPSFRHEAYEAYKAGRAPTPEDFPRQLALMKELVDLLGLERLEVPGFEADDVLATLAKKAEREGYEVQILTADRDLFQLLSPRISVLHPEGHRITPEWLWEKYGLRPEQWVDFRALAGDPSDNIPGVKGIGEKTALKLLKEWGSLENLLKNLDQVKPASVREKILAHLEDLKLSRELSRVRTDLPLEVDFRGRREPDWEGLKAFLERLEFGSLLHEFGLLESPLPAEEAPWPPPEGAFLGYRLSRPEPMWAELLALAASAQGRVYRAEDPHGALRGLKEVRGLLAKDLAVVALREGLDLPPTDDPMLLAYLLDPSNTTPEGVARRYGGEWTEDAGERALLAERLHANLLGRLQGEERLLWLYEEVEKPLSRVLAHMEATGVKLDVAYLEALSLEVAAEMRRLEEEVFRLAGHSFNLNSRDQLERVLFDELGLPPIGKTEKTGKRSTSAAVLEALREVHPIVDKILQYRELAKLKGTYIDPLPALVHEKTGRLHTRFNQTATATGRLSSSDPNLQNIPVRTPLGQKIRKAFVAEEGWRLVALDYSQIELRVLAHLSGDENLIRVFQEGRDIHTQTASWMFGLSAEAIDPLMRRAAKTINFGVLYGMSAHRLSQELGIPYEEAAAFIQRYFQSYPKVKAWIEKTLEEGRTRGYVETLFGRRRYVPDLNARVKSVREAAERMAFNMPVQGTAADLMKLAMVRLFPQLREVGARMLLQVHDELLLEAPKERAEEVAALAKEVMEGVWPLAVPLEVEVGIGEDWLAAKG

SEQ ID NO: 559 - DNA, 2529 bp, synthetic construct
  misc_feature 1..2529: note = Variant of DNA polymerase I from Thermus sp. strain 2.9
  source 1..2529: mol_type = other DNA
atgcaccatcatcatcatcatggcggtagcggcatgttaccgttgttcgaacctaaaggtcgcgtgcttctggttgatggccatcatctcgcgtatcgtaacttctttgccctgaaaggattaaccaccagccgtggcgagccggtacagggtgtctacggctttgcaaagtcgctcctgaaagctctgaaagaagacggtgatgtggtgattgttgtctttgatgcgaaagcgccaagttttcgccacgaagcgtacgaagcttacaaagccgggcgtgctccaacgccggaagactttcctcgccaattggcgcttatgaaggaattagtggatttgcttggcctcgaacgcttggaagttcccggtttcgaggcagacgacgtattagcgactctcgcaaagaaagccgaacgtgagggctatgaagtccagatcttgacagcagatcgcgatcttttccagcttttatctccgcgcatttccgtgttacacccggaagggcatcgtatcaccccggaatggctctgggagaaatatggtttgcgtcccgaacaatgggtggattttcgcgccttagcgggcgatccgagcgacaatattccgggagttaaaggtatcggcgagaagacggcgctcaagctccttaaagaatgggggtcgttggagaacttgcttaagaatttagatcaggtcaaaccagcttcagtgcgtgagaagattcttgcacacctcgaagacctcaaattaagccgcgaattgtcccgtgtacgcaccgatttgccgctcgaagttgatttccgtggccgccgcgaacctgactgggagggtcttaaagcgtttttagagcgtcttgaatttggttcgctcttgcatgaattcggccttttagaaagcccgttaccagccgaagaagcaccttggccaccgcccgaaggcgcgtttttaggttaccgtttgagtcgcccggaaccgatgtgggccgaattattggctcttgcagcgtctgcccagggacgtgtgtatcgcgcggaagaccctcatggtgcgctccgtggcctcaaagaagtccgtggactccttgccaaagacttagctgttgttgcattgcgcgaaggtcttgatttacctccgactgatgatccaatgcttcttgcgtacctcttggacccgtcaaacacgacgcccgaaggcgtagcccgtcgttacggcggcgagtggaccgaagatgcaggtgagcgcgcgttattggccgaacgtttgcacgccaatttattaggacgtttgcaaggcgaggaacgtctcctctggctttacgaagaagtggagaaaccattgagtcgcgtgctcgcgcatatggaagctaccggtgtcaaattagacgtggcgtatttggaggcactcagccttgaagttgctgccgaaatgcgccgcttggaggaagaagtattccgtttagcaggccactcctttaaccttaattctcgcgatcagttagaacgtgtgttgttcgatgaacttggtctccctcctatcggcaagacagagaagaccggtaaacgtagcacttcagcggcggttttagaagctcttatggaagtccatcccattgtggacaagatcttgcagtaccgcgaactcgcgaaattgaaaggcacctatattgaccctcttccggcattagtccacccgaaaacgggacgcctccatacccgcttcaaccaaacagccacggcgaccggtcgtttgtcctcctctgatccaaaccttcagaatattccagtacgtaccccattgggccagaagatccgcaaagcgtttgtagctgaggagggttggcgtttagtggccctcgattatagccaaattgaattacgtgtccttgcccatctttctggcgatgagaacctcatccgcgtgtttcaggaaggccgcgacattcacactcaaacggcaagctggatgtttggattatcagctgaagcgatcgatcctttgatgcgtcgtgcagcgaagaccatcaatttcggtgttctctacggtatgagtgcccatcgtttgtcgcaggaattaggcattccctatgaagaagctgcggcgttcattcagcgctactttcaaagctatcccaaagttaaagcatggatcgagaagactctcgaagaaggccgcacacgtggttacgtagagaccttatttggacgtcgccgctatgttcccgatttaaacgctcgcgtgaaatctgtccgtgaagccgccgaacgcatggcgttcaacatgcctgtacagggcacggcagctgacctcatgaaacttgcaatggtgcgcctttttccacaattgcgtgaagttggtgcccgcatgctcttgcaggtccacgatgaactcttgttagaagcgccaaaagagcgtgcggaagaggtggcagccctcgcgaaagaggttatggaaggcgtgtggcccttagcggtgcctcttgaagtcgaagttggtattggcgaggattggttggctgccaaaggataatga

SEQ ID NO: 560 - protein, 841 aa, synthetic construct
  REGION 1..841: note = Variant of DNA polymerase I from Thermus sp. strain 2.9
MHHHHHHGGSGMLPLFEPKGRVLLVDGHHLAYRNFFALKGLTTSRGEPVQGVYGFAKSLLKALKEDGDVVIVVFDAKAPSFRHEAYEAYKAGRAPTPEDFPRQLALMKELVDLLGLERLEVPGFEADDVLATLAKKAEREGYEVQILTADRDLFQLLSPRISVLHPEGHRITPEWLWEKYGLRPEQWVDFRALAGDPSDNIPGVKGIGEKTALKLLKEWGSLENLLKNLDQVKPASVREKILAHLEDLKLSRELSRVRTDLPLEVDFRGRREPDWEGLKAFLERLEFGSLLHEFGLLESPLPAEEAPWPPPEGAFLGYRLSRPEPMWAELLALAASAQGRVYRAEDPHGALRGLKEVRGLLAKDLAVVALREGLDLPPTDDPMLLAYLLDPSNTTPEGVARRYGGEWTEDAGERALLAERLHANLLGRLQGEERLLWLYEEVEKPLSRVLAHMEATGVKLDVAYLEALSLEVAAEMRRLEEEVFRLAGHSFNLNSRDQLERVLFDELGLPPIGKTEKTGKRSTSAAVLEALMEVHPIVDKILQYRELAKLKGTYIDPLPALVHPKTGRLHTRFNQTATATGRLSSSDPNLQNIPVRTPLGQKIRKAFVAEEGWRLVALDYSQIELRVLAHLSGDENLIRVFQEGRDIHTQTASWMFGLSAEAIDPLMRRAAKTINFGVLYGMSAHRLSQELGIPYEEAAAFIQRYFQSYPKVKAWIEKTLEEGRTRGYVETLFGRRRYVPDLNARVKSVREAAERMAFNMPVQGTAADLMKLAMVRLFPQLREVGARMLLQVHDELLLEAPKERAEEVAALAKEVMEGVWPLAVPLEVEVGIGEDWLAAKG

SEQ ID NO: 561 - DNA, 2529 bp, synthetic construct
  misc_feature 1..2529: note = Variant of DNA polymerase I from Thermus sp. strain 2.9
  source 1..2529: mol_type = other DNA
atgcaccatcatcatcatcatggcggtagcggcatgttaccgttgttcgaacctaaaggtcgcgtgcttctggttgatggccatcatctcgcgtatcgtaacttctttgccctgaaaggattaaccaccagccgtggcgagccggtacagggtgtctacggctttgcaaagtcgctcctgaaagctctgaaagaagacggtgatgtggtgattgttgtctttgatgcgaaagcgccaagttttcgccacgaagcgtacgaagcttacaaagccgggcgtgctccaacgccggaagactttcctcgccaattggcgcttatgaaggaattagtggatttgcttggcctcgaacgcttggaagttcccggtttcgaggcagacgacgtattagcgactctcgcaaagaaagccgaacgtgagggctatgaagtccagatcttgacagcagatcgcgatcttttccagcttttatctccgcgcatcgcggtgttacacccggaagggcatcgcatcaccccggaatggctctgggagaaatatggtttgcgtcccgaacaatgggtggattttcgcgccttagtaggcgatccgagcgacaatattccgggagttaaaggtatcggcgagaagacggcgctcaagctccttaaagaatgggggtcgttggagaacttgcttaagaatttagatcaggtcaaaccagcttcagtgcgtgagaagattcttgcacacctcgaagacctccgtttaagccgcgaattgtcccgtgtacgcaccgatttgccgctcgaagttgatttccgtggccgccgcgaacctgactgggagggtcttaaagcgtttttagagcgtcttgaatttggttcgctcttgcatgaattcggccttttagaaagcccgttaccagccgaagaagcaccttggccaccgcccgaaggcgcgtttttaggttaccgtttgagtcgcccggaaccgatgtgggccgaattattggctcttgcagcgtctgcccagggacgtgtgtatcgcgcggaagaccctcatggtgcgctccgcggcctcaaagaagtccgtggactccttgccaaagacttagctgttgttgcattgcgcgaaggtcttgatttacctccgactgatgatccaatgcttcttgcgtacctcttggacccgtcaaacacgacgcccgaaggcgtagcccgtcgttacggcggcgagtggaccgaagatgcaggtgagcgcgcgttattggccgaacgtttgcacgccaatttattaggacgtttgcaaggcgaggaacgtctcctctggctttacgaagaagtggagaaaccattgagtcgcgtgctcgcgcatatggaagctaccggtgtcaaattagacgtggcgtatttggaggcactcagccttgaagttgctgccgaaatgcgccgcttggaggaagaagtattccgtttagcaggccactcctttaaccttaattctcgcgatcagttagaacgtgtgttgttcgatgaacttggtctccctcctatcggcaagacagagaagaccggtaaacgtagcacttcagcggcggttttagaagctcttcgcgaagtccatcccattgtggacaagatcttgcagtaccgcgaactcgcgaaattgaaaggcacctatattgaccctcttccggcattagtccacccgaaaacgggacgcctccatacccgcttcaaccaaacagccacggcgaccggtcgtttgtcctcctctgatccaaaccttcagaatattccagtacgtaccccattgggccagaagatccgcaaagcgtttgtagctgaggagggttggcgtttagtggccctcgattatagccaaattgaattacgtgtccttgcccatctttctggcgatgagaacctcatccgcgtgtttcaggaaggcaaagacattcacactcaaacggcaagctggatgtttggattaccggcggaagcgatcgatcctttgatgcgtcgtgcagcgaagaccatcaatttcggtgttctctacggtatgagtgcccatcgtttgtcgcaggaattaggcattccctatgaagaagctgcggcgttcattcagcgctactttcaaagctatcccaaagttaaagcatggatcgagaagactctcgaagaaggccgcacacgtggttacgtagagaccttatttggacgtcgccgctatgttcccgatttaaacgctcgcgtgaaatctgtccgtgaagccgccgaacgcatggcgttcaacatgcctgtacagggcacggcagctgacctcatgaaacttgcaatggtgcgcctttttccacaattgcgtgaagttggtgcccgcatgctcttgcaggtccacgatgaactcttgttagaagcgccaaaagagcgtgcggaagaggtggcagccctcgcgaaagaggttatggaaggcgtgtggcccttagcggtgcctcttgaagtcgaagttggtattggcgaggattggttggctgccaaaggataatga

SEQ ID NO: 562 - protein, 841 aa, synthetic construct
  REGION 1..841: note = Variant of DNA polymerase I from Thermus sp. strain 2.9
MHHHHHHGGSGMLPLFEPKGRVLLVDGHHLAYRNFFALKGLTTSRGEPVQGVYGFAKSLLKALKEDGDVVIVVFDAKAPSFRHEAYEAYKAGRAPTPEDFPRQLALMKELVDLLGLERLEVPGFEADDVLATLAKKAEREGYEVQILTADRDLFQLLSPRIAVLHPEGHRITPEWLWEKYGLRPEQWVDFRALVGDPSDNIPGVKGIGEKTALKLLKEWGSLENLLKNLDQVKPASVREKILAHLEDLRLSRELSRVRTDLPLEVDFRGRREPDWEGLKAFLERLEFGSLLHEFGLLESPLPAEEAPWPPPEGAFLGYRLSRPEPMWAELLALAASAQGRVYRAEDPHGALRGLKEVRGLLAKDLAVVALREGLDLPPTDDPMLLAYLLDPSNTTPEGVARRYGGEWTEDAGERALLAERLHANLLGRLQGEERLLWLYEEVEKPLSRVLAHMEATGVKLDVAYLEALSLEVAAEMRRLEEEVFRLAGHSFNLNSRDQLERVLFDELGLPPIGKTEKTGKRSTSAAVLEALREVHPIVDKILQYRELAKLKGTYIDPLPALVHPKTGRLHTRFNQTATATGRLSSSDPNLQNIPVRTPLGQKIRKAFVAEEGWRLVALDYSQIELRVLAHLSGDENLIRVFQEGKDIHTQTASWMFGLPAEAIDPLMRRAAKTINFGVLYGMSAHRLSQELGIPYEEAAAFIQRYFQSYPKVKAWIEKTLEEGRTRGYVETLFGRRRYVPDLNARVKSVREAAERMAFNMPVQGTAADLMKLAMVRLFPQLREVGARMLLQVHDELLLEAPKERAEEVAALAKEVMEGVWPLAVPLEVEVGIGEDWLAAKG

SEQ ID NO: 563 - DNA, 2529 bp, synthetic construct
  misc_feature 1..2529: note = Variant of DNA polymerase I from Thermus sp. strain 2.9
  source 1..2529: mol_type = other DNA
atgcaccatcatcatcatcatggcggtagcggcatgttaccgttgttcgaacctaaaggtcgcgtgcttctggttgatggccatcatctcgcgtatcgtaacttctttgccctgaaaggattaaccaccagccgtggcgagccggtacagggtgtctacggctttgcaaagtcgctcctgaaagctctgaaagaagacggtgatgtggtgattgttgtctttgatgcgaaagcgccaagttttcgccacgaagcgtacgaagcttacaaagccgggcgtgctccaacgccggaagactttcctcgccaattggcgcttatgaaggaattagtggatttgcttggcctcgaacgcttggaagttcccggtttcgaggcagacgacgtattagcgactctcgcaaagaaagccgaacgtgagggctatgaagtccagatcttgacagcagatcgcgatcttttccagcttttatctccgcgcatttccgtgttacacccggaagggcatctgatcaccccggaatggctctgggagaaatatggtttgcgtcccgaacaatgggtggattttcgcgccttagcgggcgatccgagcgacaatattccgggagttaaaggtatcggcgagaagacggcgctcaagctccttaaagaatgggggtcgttggagaacttgcttaagaatttagatcaggtcaaaccagcttcagtgcgtgagaagattcttgcacacctcgaagacctcaaattaagccgcgaattgtcccgtgtacgcaccgatttgccgctcgaagttgatttccgtggccgccgcgaacctgactgggagggtcttaaagcgtttttagagcgtcttgaatttggttcgctcttgcatgaattcggccttttagaaagcccgttaccagccgaagaagcaccttggccaccgcccgaaggcgcgtttttaggttaccgtttgagtcgcccggaaccgatgtgggccgaattattggctcttgcagcgtctgcccagggacgtgtgtatcgcgcggaagaccctcatggtgcgctccgtggcctcaaagaagtccgtggactccttgccaaagacttagctgttgttgcattgcgcgaaggtcttgatttacctccgactgatgatccaatgcttcttgcgtacctcttggacccgtcaaacacgacgcccgaaggcgtagcccgtcgttacggcggcgagtggaccgaagatgcaggtgagcgcgcgttattggccgaacgtttgcacgccaatttattaggacgtttgcaaggcgaggaacgtctcctctggctttacgaagaagtggagaaaccattgagtcgcgtgctcgcgcatatggaagctaccggtgtcaaattagacgtggcgtatttggaggcactcagccttgaagttgctgccgaaatgcgccgcttggaggaagaagtattccgtttagcaggccactcctttaaccttaattctcgcgatcagttagaacgtgtgttgttcgatgaacttggtctccctcctatcggcaagacagagaagaccggtaaacgtagcacttcagcggcggttttagaagctcttcgcgaagtccatcccattgtggacaagatcttgcagtaccgcgaactcgcgaaattgaaaggcacctatattgaccctcttccggcattagtccacccgaaaacgggacgcctccatacccgcttcaaccaaacagccacggcgaccggtcgtttgtcctcctctgatccaaaccttcagaatattccagtacgtaccccattgggccagaagatccgcaaagcgtttgtagctgaggagggttggcgtttagtggccctcgattatagccaaattgaattacgtgtccttgcccatctttctggcgatgagaacctcatccgcgtgtttcaggaaggccgcgacattcacactcaaacggcaagctggatgtttggattatcagctgaagcgatcgatcctttgatgcgtcgtgcagcgaagaccatcaatttcggtgttctctacggtatgagtgcccatcgtttgtcgcaggaattaggcattccctatgaagaagctgcggcgttcattcagcgctactttcaaagctatcccaaagttaaagcatggatcgagaagactctcgaagaaggccgcacacgtggttacgtagagaccttatttggacgtcgccgctatgttcccgatttaaacgctcgcgtgaaatctgtccgtgaagccgccgaacgcatggcgttcaacatgcctgtacagggcacggcagctgacctcatgaaacttgcaatggtgcgcctttttccacaattgcgtgaagttggtgcccgcatgctcttgcaggtccacgatgaactcttgttagaagcgccaaaagagcgtgcggaagaggtggcagccctcgcgaaagaggttatggaaggcgtgtggcccttagcggtgcctcttgaagtcgaagttggtattggcgaggattggttggctgccaaaggataatga

SEQ ID NO: 564 - protein, 841 aa, synthetic construct
  REGION 1..841: note = Variant of DNA polymerase I from Thermus sp. strain 2.9
MHHHHHHGGSGMLPLFEPKGRVLLVDGHHLAYRNFFALKGLTTSRGEPVQGVYGFAKSLLKALKEDGDVVIVVFDAKAPSFRHEAYEAYKAGRAPTPEDFPRQLALMKELVDLLGLERLEVPGFEADDVLATLAKKAEREGYEVQILTADRDLFQLLSPRISVLHPEGHLITPEWLWEKYGLRPEQWVDFRALAGDPSDNIPGVKGIGEKTALKLLKEWGSLENLLKNLDQVKPASVREKILAHLEDLKLSRELSRVRTDLPLEVDFRGRREPDWEGLKAFLERLEFGSLLHEFGLLESPLPAEEAPWPPPEGAFLGYRLSRPEPMWAELLALAASAQGRVYRAEDPHGALRGLKEVRGLLAKDLAVVALREGLDLPPTDDPMLLAYLLDPSNTTPEGVARRYGGEWTEDAGERALLAERLHANLLGRLQGEERLLWLYEEVEKPLSRVLAHMEATGVKLDVAYLEALSLEVAAEMRRLEEEVFRLAGHSFNLNSRDQLERVLFDELGLPPIGKTEKTGKRSTSAAVLEALREVHPIVDKILQYRELAKLKGTYIDPLPALVHPKTGRLHTRFNQTATATGRLSSSDPNLQNIPVRTPLGQKIRKAFVAEEGWRLVALDYSQIELRVLAHLSGDENLIRVFQEGRDIHTQTASWMFGLSAEAIDPLMRRAAKTINFGVLYGMSAHRLSQELGIPYEEAAAFIQRYFQSYPKVKAWIEKTLEEGRTRGYVETLFGRRRYVPDLNARVKSVREAAERMAFNMPVQGTAADLMKLAMVRLFPQLREVGARMLLQVHDELLLEAPKERAEEVAALAKEVMEGVWPLAVPLEVEVGIGEDWLAAKG

SEQ ID NO: 565 - DNA, 2529 bp, synthetic construct
  misc_feature 1..2529: note = Variant of DNA polymerase I from Thermus sp. strain 2.9
  source 1..2529: mol_type = other DNA
atgcaccatcatcatcatcatggcggtagcggcatgttaccgttgttcgaacctaaaggtcgcgtgcttctggttgatggccatcatctcgcgtatcgtaacttctttgccctgaaaggattaaccaccagccgtggcgagccggtacagggtgtctacggctttgcaaagtcgctcctgaaagctctgaaagaagacggtgatgtggtgattgttgtctttgatgcgaaagcgccaagttttcgccacgaagcgtacgaagcttacaaagccgggcgtgctccaacgccggaagactttcctcgccaattggcgcttatgaaggaattagtggatttgcttggcctcgaacgcttggaagttcccggtttcgaggcagacgacgtattagcgactctcgcaaagaaagccgaacgtgagggctatgaagtccagatcttgacagcagatcgcgatcttttccagcttttatctccgcgcatttccgtgttacacccggaagggcatcgtatcaccccggaatggctctgggagaaatatggtttgcgtcccgaacaatgggtggattttcgcgccttagcgggcgatccgagcgacaatattccgggagttaaaggtatcggcgagaagacggcgctcaagctccttaaagaatgggggtcgttggagaacttgcttaagaatttagatcaggtcaaaccagcttcagtgcgtgagaagattcttgcacacctcgaagacctcaaattaagccgcgaattgtcccgtgtacgcaccgatttgccgctcgaagttgatttccgtggccgccgcgaacctgactgggagggtcttaaagcgtttttagagcgtcttgaatttggttcgctcttgcatgaattcggccttttagaaagcccgttaccagccgaagaagcaccttggccaccgcccgaaggcgcgtttttaggttaccgtttgagtcgcccggaaccgatgtgggccgaattattggctcttgcagcgtctgcccagggacgtgtgtatcgcgcggaagaccctcatggtgcgctccgtggcctcaaagaagtccgtggactccttgccaaagacttagctgttgttgcattgcgcgaaggtcttgatttacctccgactgatgatccaatgcttcttgcgtacctcttggacccgtcaaacacgacgcccgaaggcgtagcccgtcgttacggcggcgagtggaccgaagatgcaggtgagcgcgcgttattggccgaacgtttgcacgccaatttattaggacgtttgcaaggcgaggaacgtctcctctggctttacgaagaagtggagaaaccattgagtcgcgtgctcgcgcatatggaagctaccggtgtcaaattagacgtggcgtatttggaggcactcagccttgaagttgctgccgaaatgcgccgcttggaggaagaagtattccgtttagcaggccactcctttaaccttaattctcgcgatcagttagaacgtgtgttgttcgatgaacttggtctccctcctatcggcaagacagagaagaccggtaaacgtagcacttcagcggcggttttagaagctcttcgcgaagtccatcccattgtggacaagatcttgcagtaccgcgaactcgcgaaattgaaaggcacctatattgaccctcttccggcattagtccacccgaaaacgggacgcctccatacccgcttcaaccaaacagccacggcgaccggtcgtttgtcctcctctgatccaaaccttcagaatattccagtacgtaccccattgggccagaagatccgcaaagcgtttgtagctgaggagggttggcgtttagtggccctcgattatagccaaattgaattacgtgtccttgcccatctttctggcgataagaacctcatccgcgtgtttcaggaaggccgcgacattcacactcaaacggcaagctggatgtttggattatcagctgaagcgatcgatcctttgatgcgtcgtgcagcgaagaccatcaatttcggtgttctctacggtatgagtgcccatcgtttgtcgcaggaattaggcattccctatgaagaagctgcggcgttcattcagcgctactttcaaagctatcccaaagttaaagcatggatcgagaagactctcgaagaaggccgcacacgtggttacgtagagaccttatttggacgtcgccgctatgttcccgatttaaacgctcgcgtgaaatctgtccgtgaagccgccgaacgcatggcgttcaacatgcctgtacagggcacggcagctgacctcatgaaacttgcaatggtgcgcctttttccacaattgcgtgaagttggtgcccgcatgctcttgcaggtccacgatgaactcttgttagaagcgccaaaagagcgtgcggaagaggtggcagccctcgcgaaagaggttatggaaggcgtgtggcccttagcggtgcctcttgaagtcgaagttggtattggcgaggattggttggctgccaaaggataatga

SEQ ID NO: 566 - protein, 841 aa, synthetic construct
  REGION 1..841: note = Variant of DNA polymerase I from Thermus sp. strain 2.9
MHHHHHHGGSGMLPLFEPKGRVLLVDGHHLAYRNFFALKGLTTSRGEPVQGVYGFAKSLLKALKEDGDVVIVVFDAKAPSFRHEAYEAYKAGRAPTPEDFPRQLALMKELVDLLGLERLEVPGFEADDVLATLAKKAEREGYEVQILTADRDLFQLLSPRISVLHPEGHRITPEWLWEKYGLRPEQWVDFRALAGDPSDNIPGVKGIGEKTALKLLKEWGSLENLLKNLDQVKPASVREKILAHLEDLKLSRELSRVRTDLPLEVDFRGRREPDWEGLKAFLERLEFGSLLHEFGLLESPLPAEEAPWPPPEGAFLGYRLSRPEPMWAELLALAASAQGRVYRAEDPHGALRGLKEVRGLLAKDLAVVALREGLDLPPTDDPMLLAYLLDPSNTTPEGVARRYGGEWTEDAGERALLAERLHANLLGRLQGEERLLWLYEEVEKPLSRVLAHMEATGVKLDVAYLEALSLEVAAEMRRLEEEVFRLAGHSFNLNSRDQLERVLFDELGLPPIGKTEKTGKRSTSAAVLEALREVHPIVDKILQYRELAKLKGTYIDPLPALVHPKTGRLHTRFNQTATATGRLSSSDPNLQNIPVRTPLGQKIRKAFVAEEGWRLVALDYSQIELRVLAHLSGDKNLIRVFQEGRDIHTQTASWMFGLSAEAIDPLMRRAAKTINFGVLYGMSAHRLSQELGIPYEEAAAFIQRYFQSYPKVKAWIEKTLEEGRTRGYVETLFGRRRYVPDLNARVKSVREAAERMAFNMPVQGTAADLMKLAMVRLFPQLREVGARMLLQVHDELLLEAPKERAEEVAALAKEVMEGVWPLAVPLEVEVGIGEDWLAAKG

SEQ ID NO: 567 - DNA, 2529 bp, synthetic construct
  misc_feature 1..2529: note = Variant of DNA polymerase I from Thermus sp. strain 2.9
  source 1..2529: mol_type = other DNA
atgcaccatcatcatcatcatggcggtagcggcatgttaccgttgttcgaacctaaaggtcgcgtgcttctggttgatggccatcatctcgcgtatcgtaacttctttgccctgaaaggattaaccaccagccgtggcgagccggtacagggtgtctacggctttgcaaagtcgctcctgaaagctctgaaagaagacggtgatgtggtgattgttgtctttgatgcgaaagcgccaagttttcgccacgaagcgtacgaagcttacaaagccgggcgtgctccaacgccggaagactttcctcgccaattggcgcttatgaaggaattagtggatttgcttggcctcgaacgcttggaagttcccggtttcgaggcagacgacgtattagcgactctcgcaaagaaagccgaacgtgagggctatgaagtccagatcttgacagcagatcgcgatcttttccagcttttatctccgcgcatttccgtgttacacccggaagggcatcgtatcaccccggaatggctctgggagaaatatggtttgcgtcccgaacaatgggtggattttcgcgccttagcgggcgatccgagcgacaatattccgggagttaaaggtatcggcgagaagacggcgctcaagctccttaaagaatgggggtcgttggagaacttgcttaagaatttagatcaggtcaaaccagcttcagtgcgtgagaagattcttgcacacctcgaagacctcaaattaagccgcgaattgtcccgtgtacgcaccgatttgccgctcgaagttgatttccgtggccgccgcgaacctgactgggagggtcttaaagcgtttttagagcgtcttgaatttggttcgctcttgcatgaattcggccttttagaaagcccgttaccagccgaagaagcaccttggccaccgcccgaaggcgcgtttttaggttaccgtttgagtcgcccggaaccgatgtgggccgaattattggctcttgcagcgtctgcccagggacgtgtgtatcgcgcggaagaccctcatggtgcgctccgtggcctcaaagaagtccgtggactccttgccaaagacttagctgttgttgcattgcgcgaaggtcttgatttacctccgactgatgatccaatgcttcttgcgtacctcttggacccgtcaaacacgacgcccgaaggcgtagcccgtcgttacggcggcgagtggaccgaagatgcaggtgagcgcgcgttattggccgaacgtttgcacgccaatttattaggacgtttgcaaggcgaggaacgtctcctctggctttacgaagaagtggagaaaccattgagtcgcgtgctcgcgcatatggaagctaccggtgtcaaattagacgtggcgtatttggaggcactcagccttgaagtcgctgccgaaatgcgccgcttggaggaagaagtattccgtttagcaggccactcctttaaccttaattctcgcgatcagttagaacgtgtgttgttcgatgaacttggtctccctcctatcggcaagacagagaagaccggtaaacgtagcacttcagcggcggttttagaagctcttcgcgaagtccatcccattgtggacaagatcttgcagtaccgcgaactcgcgaaattgaaaggcacctatattgaccctcttccggcattagtccacccgaaaacgggacgcctccatacccgcttcaaccaaacagccacggcgaccggtcgtttgtcctcctctgatccaaaccttcagaatattccagtacgtaccccattgggccagaagatccgcaaagcgtttgtagctgaggagggttggcgtttagtggccctcgattatagccaaattgaattacgtgtccttgcccatctttctggcgatgagaacctcatccgcgtgtttcaggaaggccgcgacattcacactcaaacggcaagctggatgtttggagtgtcagcggaagcgatcgatcctttgatgcgtcgtgcagcgaagaccatcaatttcggtgttctctacggtatgagtgccgcgcgtttgtcgcaggaattaggcattccctatgaagaagctgcggcgttcattcagcgctactttcaaagctatcccaaagttaaagcatggatcgagaagactctcgaagaaggccgcacacgtggttacgtagagaccttatttggacgtcgccgctatgttcccgatttaaacgctcgcgtgaaatctgtccgtgaagccgccgaacgcatggcgtggaacatgcctgtacagggcacggcagctgacctcatgaaacttgcaatggtgcgcctttttccacaattgcgtgaagttggtgcccgcatgctcttgcaggtccacgatgaactcttgttagaagcgccaaaagagcgtgcggaagaggtggcagccctcgcgaaagaggttatggaaggcgtgtggcccttagcggtgcctcttgaagtcgaagttggtattggcgaggattggttggctgccaaaggataatga

SEQ ID NO: 568 - protein, 841 aa, synthetic construct
  REGION 1..841: note = Variant of DNA polymerase I from Thermus sp. strain 2.9
MHHHHHHGGSGMLPLFEPKGRVLLVDGHHLAYRNFFALKGLTTSRGEPVQGVYGFAKSLLKALKEDGDVVIVVFDAKAPSFRHEAYEAYKAGRAPTPEDFPRQLALMKELVDLLGLERLEVPGFEADDVLATLAKKAEREGYEVQILTADRDLFQLLSPRISVLHPEGHRITPEWLWEKYGLRPEQWVDFRALAGDPSDNIPGVKGIGEKTALKLLKEWGSLENLLKNLDQVKPASVREKILAHLEDLKLSRELSRVRTDLPLEVDFRGRREPDWEGLKAFLERLEFGSLLHEFGLLESPLPAEEAPWPPPEGAFLGYRLSRPEPMWAELLALAASAQGRVYRAEDPHGALRGLKEVRGLLAKDLAVVALREGLDLPPTDDPMLLAYLLDPSNTTPEGVARRYGGEWTEDAGERALLAERLHANLLGRLQGEERLLWLYEEVEKPLSRVLAHMEATGVKLDVAYLEALSLEVAAEMRRLEEEVFRLAGHSFNLNSRDQLERVLFDELGLPPIGKTEKTGKRSTSAAVLEALREVHPIVDKILQYRELAKLKGTYIDPLPALVHPKTGRLHTRFNQTATATGRLSSSDPNLQNIPVRTPLGQKIRKAFVAEEGWRLVALDYSQIELRVLAHLSGDENLIRVFQEGRDIHTQTASWMFGVSAEAIDPLMRRAAKTINFGVLYGMSAARLSQELGIPYEEAAAFIQRYFQSYPKVKAWIEKTLEEGRTRGYVETLFGRRRYVPDLNARVKSVREAAERMAWNMPVQGTAADLMKLAMVRLFPQLREVGARMLLQVHDELLLEAPKERAEEVAALAKEVMEGVWPLAVPLEVEVGIGEDWLAAKG

SEQ ID NO: 569 - DNA, 2529 bp, synthetic construct
  misc_feature 1..2529: note = Variant of DNA polymerase I from Thermus sp. strain 2.9
  source 1..2529: mol_type = other DNA
atgcaccatcatcatcatcatggcggtagcggcatgttaccgttgttcgaacctaaaggtcgcgtgcttctggttgatggccatcatctcgcgtatcgtaacttctttgccctgaaaggattaaccaccagccgtggcgagccggtacagggtgtctacggctttgcaaagtcgctcctgaaagctctgaaagaagacggtgatgtggtgattgttgtctttgatgcgaaagcgccaagttttcgccacgaagcgtacgaagcttacaaagccgggcgtgctccaacgccggaagactttcctcgccaattggcgcttatgaaggaattagtggatttgcttggcctcgaacgcttggaagttcccggtttcgaggcagacgacgtattagcgactctcgcaaagaaagccgaacgtgagggctatgaagtccagatcttgacagcagatcgcgatcttttccagcttttatctccgcgcatttccgtgttacacccggaagggcatcgtatcaccccggaatggctctgggagaaatatggtttgcgtcccgaacaatgggtggattttcgcgccttagtaggcgatccgagcgacaatattccgggagttaaaggtatcggcgagaagacggcgctcaagctccttaaagaatgggggtcgttggagaacttgcttaagaatttagatcaggtcaaaccagcttcagtgcgtgagaagattcttgcacacctcgaagacctcaaattaagccgcgaattgtcccgtgtacgcaccgatttgccgctcgaagttgatttccgtggccgccgcgaacctgactgggagggtcttaaagcgtttttagagcgtcttgaatttggttcgctcttgcatgaattcggccttttagaaagcccgttaccagccgaagaagcaccttggccaccgcccgaaggcgcgtttttaggttaccgtttgagtcgcccggaaccgatgtgggccgaattattggctcttgcagcgtctgcccagggacgtgtgtatcgcgcggaagaccctcatggtgcgctccgtggcctcaaagaagtccgtggactccttgccaaagacttagctgttgttgcattgcgcgaaggtcttgatttacctccgactgatgatccaatgcttcttgcgtacctcttggacccgtcaaacacgacgcccgaaggcgtagcccgtcgttacggcggcgagtggaccgaagatgcaggtgagcgcgcgttattggccgaacgtttgcacgccaatttattaggacgtttgcaaggcgaggaacgtctcctctggctttacgaagaagtggagaaaccattgagtcgcgtgctcgcgcatatggaagctaccggtgtcaaattagacgtggcgtatttggaggcactcagccttgaagttgctgccgaaatgcgccgcttggaggaagaagtattccgtttagcaggccactcctttaaccttaattctcgcgatcagttagaacgtgtgttgttcgatgaacttggtctccctcctatcggcaagacagagaagaccggtaaacgtagcacttcagcggcggttttagaagctcttcgcgaagtccatcccattgtggacaagatcttgcagtaccgcgaactcgcgaaattgaaaggcacctatattgaccctcttccggcattagtccacccgaaaacgggacgcctccatacccgcttcaaccaaacagccacggcgaccggtcgtttgtcctcctctgatccaaaccttcagaatattccagtacgtaccccattgggccagaagatccgcaaagcgtttgtagctgaggagggttggcgtttagtggccctcgattatagccaaattgaattacgtgtccttgcccatctttctggcgatgagaacctcatccgcgtgtttcaggaaggccgcgacattcacactcaaacggcaagctggatgtttggattatcagctgaagcgatcgatcctttgatgcgtcgtgcagcgaagaccattaatttcggtgttctctacggtatgagtgcccatcgtttgtcgcaggaattaggcattccctatgaagaagctgcggcgttcattcagcgctactttcaaagctatcccaaagttaaagcatggatcgagaagactctcgaagaaggccgcacacgtggttacgtagagaccttatttggacgtcgccgctatgttcccgatttaaacgctcgcgtgaaatctgtccgtgaagccgccgaacgcatggcgttcaacatgcctgtacagggcacggcagctgacctcatgaaacttgcaatggtgcgcctttttccacaattgcgtgaagttggtgcccgcatgctcttgcaggtccacgatgaactcttgttagaagcgccaaaagagcgtgcggaagaggtggcagccctcgcgaaagaggttatggaaggcgtgtggcccttagcggtgcctcttgaagtcgaagttggtattggcgaggattggttggctgccaaaggataatga

SEQ ID NO: 570 - protein, 841 aa, synthetic construct
  REGION 1..841: note = Variant of DNA polymerase I from Thermus sp. strain 2.9
MHHHHHHGGSGMLPLFEPKGRVLLVDGHHLAYRNFFALKGLTTSRGEPVQGVYGFAKSLLKALKEDGDVVIVVFDAKAPSFRHEAYEAYKAGRAPTPEDFPRQLALMKELVDLLGLERLEVPGFEADDVLATLAKKAEREGYEVQILTADRDLFQLLSPRISVLHPEGHRITPEWLWEKYGLRPEQWVDFRALVGDPSDNIPGVKGIGEKTALKLLKEWGSLENLLKNLDQVKPASVREKILAHLEDLKLSRELSRVRTDLPLEVDFRGRREPDWEGLKAFLERLEFGSLLHEFGLLESPLPAEEAPWPPPEGAFLGYRLSRPEPMWAELLALAASAQGRVYRAEDPHGALRGLKEVRGLLAKDLAVVALREGLDLPPTDDPMLLAYLLDPSNTTPEGVARRYGGEWTEDAGERALLAERLHANLLGRLQGEERLLWLYEEVEKPLSRVLAHMEATGVKLDVAYLEALSLEVAAEMRRLEEEVFRLAGHSFNLNSRDQLERVLFDELGLPPIGKTEKTGKRSTSAAVLEALREVHPIVDKILQYRELAKLKGTYIDPLPALVHPKTGRLHTRFNQTATATGRLSSSDPNLQNIPVRTPLGQKIRKAFVAEEGWRLVALDYSQIELRVLAHLSGDENLIRVFQEGRDIHTQTASWMFGLSAEAIDPLMRRAAKTINFGVLYGMSAHRLSQELGIPYEEAAAFIQRYFQSYPKVKAWIEKTLEEGRTRGYVETLFGRRRYVPDLNARVKSVREAAERMAFNMPVQGTAADLMKLAMVRLFPQLREVGARMLLQVHDELLLEAPKERAEEVAALAKEVMEGVWPLAVPLEVEVGIGEDWLAAKG

SEQ ID NO: 571 - DNA, 2529 bp, synthetic construct
  misc_feature 1..2529: note = Variant of DNA polymerase I from Thermus sp. strain 2.9
  source 1..2529: mol_type = other DNA
atgcaccatcatcatcatcatggcggtagcggcatgttaccgttgttcgaacctaaaggtcgcgtgcttctggttgatggccatcatctcgcgtatcgtaacttctttgccctgaaaggattaaccaccagccgtggcgagccggtacagggtgtctacggctttgcaaagtcgctcctgaaagctctgaaagaagacggtgatgtggtgattgttgtctttgatgcgaaagcgccaagttttcgccacgaagcgtacgaagcttacaaagccgggcgtgctccaacgccggaagactttcctcgccaattggcgcttatgaaggaattagtggatttgcttggcctcgaacgcttggaagttcccggtttcgaggcagacgacgtattagcgactctcgcaaagaaagccgaacgtgagggctatgaagtccagatcttgacagcagatcgcgatcttttccagcttttatctccgcgcatttccgtgttacacccggaagggcatcgtatcaccccggaatggctctgggagaaatatggtttgcgtcccgaacaatgggtggattttcgcgccttagcgggcgatccgagcgacaatattccgggagttaaaggtatcggcgagaagacggcgctcaagctccttaaagaatgggggtcgttggagaacttgcttaagaatttagatcaggtcaaaccagcttcagtgcgtgagaagattcttgcacacctcgaagacctcaaattaagccgcgaattgtcccgtgtacgcaccgatttgccgctcgaagttgatttccgtggccgccgcgaacctgactgggagggtcttaaagcgtttttagagcgtcttgaatttggttcgctcttgcatgaattcggccttttagaaagcccgttaccagccgaagaagcaccttggccaccgcccgaaggcgcgtttttaggttaccgtttgagtcgcccggaaccgatgtgggccgaattattggctcttgcagcgtctgcccagggacgtgtgtatcgcgcggaagaccctcatggtgcgctccgtggcctcaaagaagtccgtggactccttgccaaagacttagctgttgttgcattgcgcgaaggtcttgatttacctccgactgatgatccaatgcttcttgcgtacctcttggacccgtcaaacacgacgcccgaaggcgtagcccgtcgttacggcggcgagtggaccgaagatgcaggtgagcgcgcgttattggccgaacgtttgcacgccaatttattaggacgtttgcaaggcgaggaacgtctcctctggctttacgaagaagtggagaaaccattgagtcgcgtgctcgcgcatatggaagctaccggtgtcaaattagacgtggcgtatttggaggcactcagccttgaagttgctgccgaaatgcgccgcttggaggaagaagtattccgtttagcaggccactcctttaaccttaattctcgcgatcagttagaacgtgtgttgttcgatgaacttaatctccctcctatcggcaagacagagaagaccggtaaacgtagcacttcagcggcggttttagaagctcttcgcgaagtccatcccattgtggacaagatcttgcagtaccgcgaactcgcgaaattgaaaggcacctatattgaccctcttccggcattagtccacccgaaaacgggacgcctccatacccgcttcaaccaaacagccacggcgaccggtcgtttgtcctcctctgatccaaaccttcagaatattccagtacgtaccccattgggccagaagatccgcaaagcgtttgtagctgaggagggttggcgtttagtggccctcgattatagccaaattgaattacgtgtccttgcccatctttctggcgatgagaacctcatccgcgtgtttcaggaaggccgcgacattcacactcaaacggcaagctggatgtttggattatcagctgaagcgatcgatcctttgatgcgtcgtgcagcgaagaccatcaatttcggtgttctctacggtatgagtgcccatcgtttgtcgcaggaattaggcattccctatgaagaagctgcggcgttcattcagcgctactttcaaagctatcccaaagttaaagcatggatcgagaagactctcgaagaaggccgcacacgtggttacgtagagaccttatttggacgtcgccgctatgttcccgatttaaacgctcgcgtgaaatctgtccgtgaagccgccgaacgcatggcgttcaacatgcctgtacagggcacggcagctgacctcatgaaacttgcaatggtgcgcctttttccacaattgcgtgaagttggtgcccgcatgctcttgcaggtccacgatgaactcttgttagaagcgccaaaagagcgtgcggaagaggtggcagccctcgcgaaagaggttatggaaggcgtgtggcccttagcggtgcctcttgaagtcgaagttggtattggcgaggattggttggctgccaaaggataatga

SEQ ID NO: 572 - protein, 841 aa, synthetic construct
  REGION 1..841: note = Variant of DNA polymerase I from Thermus sp. strain 2.9
MHHHHHHGGSGMLPLFEPKGRVLLVDGHHLAYRNFFALKGLTTSRGEPVQGVYGFAKSLLKALKEDGDVVIVVFDAKAPSFRHEAYEAYKAGRAPTPEDFPRQLALMKELVDLLGLERLEVPGFEADDVLATLAKKAEREGYEVQILTADRDLFQLLSPRISVLHPEGHRITPEWLWEKYGLRPEQWVDFRALAGDPSDNIPGVKGIGEKTALKLLKEWGSLENLLKNLDQVKPASVREKILAHLEDLKLSRELSRVRTDLPLEVDFRGRREPDWEGLKAFLERLEFGSLLHEFGLLESPLPAEEAPWPPPEGAFLGYRLSRPEPMWAELLALAASAQGRVYRAEDPHGALRGLKEVRGLLAKDLAVVALREGLDLPPTDDPMLLAYLLDPSNTTPEGVARRYGGEWTEDAGERALLAERLHANLLGRLQGEERLLWLYEEVEKPLSRVLAHMEATGVKLDVAYLEALSLEVAAEMRRLEEEVFRLAGHSFNLNSRDQLERVLFDELNLPPIGKTEKTGKRSTSAAVLEALREVHPIVDKILQYRELAKLKGTYIDPLPALVHPKTGRLHTRFNQTATATGRLSSSDPNLQNIPVRTPLGQKIRKAFVAEEGWRLVALDYSQIELRVLAHLSGDENLIRVFQEGRDIHTQTASWMFGLSAEAIDPLMRRAAKTINFGVLYGMSAHRLSQELGIPYEEAAAFIQRYFQSYPKVKAWIEKTLEEGRTRGYVETLFGRRRYVPDLNARVKSVREAAERMAFNMPVQGTAADLMKLAMVRLFPQLREVGARMLLQVHDELLLEAPKERAEEVAALAKEVMEGVWPLAVPLEVEVGIGEDWLAAKG

SEQ ID NO: 573 - DNA, 2529 bp, synthetic construct
  misc_feature 1..2529: note = Variant of DNA polymerase I from Thermus sp. strain 2.9
  source 1..2529: mol_type = other DNA
atgcaccatcatcatcatcatggcggtagcggcatgttaccgttgttcgaacctaaaggtcgcgtgcttctggttgatggccatcatctcgcgtatcgtaacttctttgccctgaaaggattaaccaccagccgtggcgagccggtacagggtgtctacggctttgcaaagtcgctcctgaaagctctgaaagaagacggtgatgtggtgattgttgtctttgatgcgaaagcgccaagttttcgccacgaagcgtacgaagcttacaaagccgggcgtgctccaacgccggaagactttcctcgccaattggcgcttatgaaggaattagtggatttgcttggcctcgaacgcttggaagttcccggtttcgaggcagacgacgtattagcgactctcgcaaagaaagccgaacgtgagggctatgaagtccagatcttgacagcagatcgcgatcttttccagcttttatctccgcgcatttccgtgttacacccggaagggcatcgcatcaccccggaatggctctgggagaaatatggtttgcgtcccgaacaatgggtggattttcgcgccttagcaggcgatccgagcgacaatattccgggagttaaaggtatcggcgagaagacggcgctcaagctccttaaagaatgggggtcgttggagaacttgcttaagaatttagatcaggtcaaaccagagtcagtgcgtgagaagattcttgcacacctcgaagacctccgtttaagcctggaattgtcccgtgtacgcaccgatttgccgctcgaagttgatttccgtggccgccgcgaacctgactgggagggtcttaaagcgtttttagagcgtcttgaatttggttcgctcttgcatgaattcggccttttagaaagcccgttaccagccgaagaagcaccttggccaccgcccgaaggcgcgtttttaggttaccgtttgagtcgcccggaaccgatgtgggccgaattattggctcttgcagcgtctgcccagggacgtgtgtatcgcgcggaagaccctcatggtgcgctccgtggcctcaaagaagtccgtggactccttgccaaagacttagctgttgttgcattgcgcgaaggtcttgatttacctccgactgatgatccaatgcttcttgcgtacctcttggacccgtcaaacacgacgcccgaaggcgtagcccgtcgttacggcggcgagtggaccgaagatgcaggtgagcgcgcgttattggccgaacgtttgcaccagaatttattaggacgtttgcaaggcgaggaacgtctcctctggctttacgaagaagtggagaaaccattgagtcgcgtgctcgcgcatatggaagctaccggtgtcaaattagacgtggcgtatttggaggcactcagccttgaagttgctgccgaaatgcgccgcttggaggaagaagtattccgtttagcaggccactcctttaaccttaattctcgcgatcagttagaacgtgtgttgttcgatgaacttggtctccctcctatcggcaagacagagaagaccggtaaacgtagcacttcagcggcggttttagaagctcttcgcgaagtccatcccattgtggacaagatcttgcagtaccgcgaactcgcgaaattgaaaggcacctatattgaccctcttccggcattagtccacccgaaaacgggacgcctccatacccgcttcaaccaaacagccacggcgaccggtcgtttgtcctcctctgatccaaaccttcagaatattccagtacgtaccccattgggccagaagatccgcaaagcgtttgtagctgaggagggttggcgtttagtggccctcgattatagccaaattgaattacgtgtccttgcccatctttctggcgatgagaacctcatccgcgtgtttcaggaaggccgtgacattcacactcaaacggcaagctggatgtttggattatcagctgaagcgatcgatcctttgatgcgtcgtgcagcgaagaccatcaatttcggtgttctctacggtatgagtgcccatcgtttgtcgcaggaattaggcattccctatgaagaagctgtggcgttcattcagcgctactttcaaagctatcccaaagttaaagcatggatcgagaagactctcgaagaaggccgcacacgtggttacgtagagaccttatttggacgtcgccgctatgttcccgatttaaacgctcgcgtgaaatctgtccgtgaagccgccgaacgcatggcgttcaacatgcctgtacagggcacggcagctgacctcatgaaacttgcaatggtgcgcctttttccacaattgcgtgaagttggtgcccgcatgctcttgcaggtccacgatgaactcttgttagaagcgccaaaagagcgtgcggaagaggtggcagccctcgcgaaagaggttatggaaggcgtgtggcccttagcggtgcctcttgaagtcgaagttggtattggcgaggattggttggctgccaaaggataatga

SEQ ID NO: 574 - protein, 841 aa, synthetic construct
  REGION 1..841: note = Variant of DNA polymerase I from Thermus sp. strain 2.9
MHHHHHHGGSGMLPLFEPKGRVLLVDGHHLAYRNFFALKGLTTSRGEPVQGVYGFAKSLLKALKEDGDVVIVVFDAKAPSFRHEAYEAYKAGRAPTPEDFPRQLALMKELVDLLGLERLEVPGFEADDVLATLAKKAEREGYEVQILTADRDLFQLLSPRISVLHPEGHRITPEWLWEKYGLRPEQWVDFRALAGDPSDNIPGVKGIGEKTALKLLKEWGSLENLLKNLDQVKPESVREKILAHLEDLRLSLELSRVRTDLPLEVDFRGRREPDWEGLKAFLERLEFGSLLHEFGLLESPLPAEEAPWPPPEGAFLGYRLSRPEPMWAELLALAASAQGRVYRAEDPHGALRGLKEVRGLLAKDLAVVALREGLDLPPTDDPMLLAYLLDPSNTTPEGVARRYGGEWTEDAGERALLAERLHQNLLGRLQGEERLLWLYEEVEKPLSRVLAHMEATGVKLDVAYLEALSLEVAAEMRRLEEEVFRLAGHSFNLNSRDQLERVLFDELGLPPIGKTEKTGKRSTSAAVLEALREVHPIVDKILQYRELAKLKGTYIDPLPALVHPKTGRLHTRFNQTATATGRLSSSDPNLQNIPVRTPLGQKIRKAFVAEEGWRLVALDYSQIELRVLAHLSGDENLIRVFQEGRDIHTQTASWMFGLSAEAIDPLMRRAAKTINFGVLYGMSAHRLSQELGIPYEEAVAFIQRYFQSYPKVKAWIEKTLEEGRTRGYVETLFGRRRYVPDLNARVKSVREAAERMAFNMPVQGTAADLMKLAMVRLFPQLREVGARMLLQVHDELLLEAPKERAEEVAALAKEVMEGVWPLAVPLEVEVGIGEDWLAAKG

SEQ ID NO: 575 - DNA, 2529 bp, synthetic construct
  misc_feature 1..2529: note = Variant of DNA polymerase I from Thermus sp. strain 2.9
  source 1..2529: mol_type = other DNA
atgcaccatcatcatcatcatggcggtagcggcatgttaccgttgttcgaacctaaaggtcgcgtgcttctggttgatggccatcatctcgcgtatcgtaacttctttgccctgaaaggattaaccaccagccgtggcgagccggtacagggtgtctacggctttgcaaagtcgctcctgaaagctctgaaagaagacggtgatgtggtgattgttgtctttgatgcgaaagcgccaagttttcgccacgaagcgtacgaagcttacaaagccgggcgtgctccaacgccggaagactttcctcgccaattggcgcttatgaaggaattagtggatttgcttggcctcgaacgcttggaagttcccggtttcgaggcagacgacgtaatggcgactctcgcaaagaaagccgaacgtgagggctatgaagtccagatcttgacagcagatcgcgatcttttccagcttttatctccgcgcatttccgtgttacacccggaagggcatcgtatcaccccggaatggctctgggagaaatatggtttgcgtcccgaacaatgggtggattttcgcgccttagcgggcgatccgagcgacaatattccgggagttaaaggtatcggcgagaagacggcgctcaagctccttaaagaatgggggtcgttggagaacttgcttaagaatttagatcaggtcaaaccagcttcagtgcgtgagaagattcttgcacacctcgaagacctcaaattaagccgcgaattgtcccgtgtacgcaccgatttgccgctcgaagttgatttccgtggccgccgcgaacctgactgggagggtcttaaagcgtttttagagcgtcttgaatttggttcgctcttgcatgaattcggccttttagaaagcccgttaccagccgaagaagcaccttggccaccgcccgaaggcgcgtttttaggttaccgtttgagtcgcccggaaccgatgtgggccgaattattggctcttgcagcgtctgcccagggacgtgtgtatcgcgcggaagaccctcatggtgcgctccgtggcctcaaagaagtccgtggactccttgccaaagacttagctgttgttgcattgcgcgaaggtcttgatttacctccgactgatgatccaatgcttcttgcgtacctcttggacccgtcaaacacgacgcccgaaggcgtagcccgtcgttacggcggcgagtggaccgaagatgcaggtgagcgcgcgttattggccgaacgtttgcacgccaatttattaggacgtttgcaaggcgaggaacgtctcctctggctttacgaagaagtggagaaaccattgagtcgcgtgctcgcgcatatggaagctaccggtgtcaaattagacgtggcgtatttggaggcactcagccttgaagttgctgccgaaatgcgccgcttggaggaagaagtattccgtttagcaggccactcctttaaccttaattctcgcgatcagttagaacgtgtgttgttcgatgaacttggtctccctcctatcggcaagacagagaagaccggtaaacgtagcacttcagcggcggttttagaagctcttcgcgaagtccatcccattgtggacaagatcttgcagtaccgcgaactcgcgaaattgaaaggcacctatattgaccctcttccggcattagtccacccgaaaacgggacgcctccatacccgcttcaaccaaacagccacggcgaccggtcgtttgtcctcctctgatccaaaccttcagaatattccagtacgtaccccattgggccagaagatccgcaaagcgtttgtagctgaggagggttggcgtttagtggccctcgattatagccaaattgaattacgtgtccttgcccatctttctggcgatgagaacctcatccgcgtgtttcaggaaggccgcgacattcacactcaaacggcaagctggatgtttggattatcagctgaagcgatcgatcctttgatgcgtcgtgcagcgaagaccatcaatttcggtgttctctacggtatgagtgcccatcgtttgtcgcaggaattaggcattccctatgaagaagctgcggcgttcattcagcgctactttcaaagctatcccaaagttaaagcatggatcgagaagactctcgaagaaggccgcacacgtggttacgtagagaccttatttggacgtcgccgctatgttcccgatttaaacgctcgcgtgaaatctgtccgtgaagccgccgaacgcatggcgttcaacatgcctgtacagggcacggcagctgacctcatgaaacttgcaatggtgcgcctttttccacaattgcgtgaagttggtgcccgcatgctcttgcaggtccacgatgaactcttgttagaagcgccaaaagagcgtgcggaagaggtggcagccctcgcgaaagaggttatggaaggcgtgtggcccttagcggtgcctcttgaagtcgaagttggtattggcgaggattggttggctgccaaaggataatga

SEQ ID NO: 576 - protein, 841 aa, synthetic construct
  REGION 1..841: note = Variant of DNA polymerase I from Thermus sp. strain 2.9
MHHHHHHGGSGMLPLFEPKGRVLLVDGHHLAYRNFFALKGLTTSRGEPVQGVYGFAKSLLKALKEDGDVVIVVFDAKAPSFRHEAYEAYKAGRAPTPEDFPRQLALMKELVDLLGLERLEVPGFEADDVMATLAKKAEREGYEVQILTADRDLFQLLSPRISVLHPEGHRITPEWLWEKYGLRPEQWVDFRALAGDPSDNIPGVKGIGEKTALKLLKEWGSLENLLKNLDQVKPASVREKILAHLEDLKLSRELSRVRTDLPLEVDFRGRREPDWEGLKAFLERLEFGSLLHEFGLLESPLPAEEAPWPPPEGAFLGYRLSRPEPMWAELLALAASAQGRVYRAEDPHGALRGLKEVRGLLAKDLAVVALREGLDLPPTDDPMLLAYLLDPSNTTPEGVARRYGGEWTEDAGERALLAERLHANLLGRLQGEERLLWLYEEVEKPLSRVLAHMEATGVKLDVAYLEALSLEVAAEMRRLEEEVFRLAGHSFNLNSRDQLERVLFDELGLPPIGKTEKTGKRSTSAAVLEALREVHPIVDKILQYRELAKLKGTYIDPLPALVHPKTGRLHTRFNQTATATGRLSSSDPNLQNIPVRTPLGQKIRKAFVAEEGWRLVALDYSQIELRVLAHLSGDENLIRVFQEGRDIHTQTASWMFGLSAEAIDPLMRRAAKTINFGVLYGMSAHRLSQELGIPYEEAAAFIQRYFQSYPKVKAWIEKTLEEGRTRGYVETLFGRRRYVPDLNARVKSVREAAERMAFNMPVQGTAADLMKLAMVRLFPQLREVGARMLLQVHDELLLEAPKERAEEVAALAKEVMEGVWPLAVPLEVEVGIGEDWLAAKG

SEQ ID NO: 577 - DNA, 2529 bp, synthetic construct
  misc_feature 1..2529: note = Variant of DNA polymerase I from Thermus sp. strain 2.9
  source 1..2529: mol_type = other DNA
atgcaccatcatcatcatcatggcggtagcggcatgttaccgttgttcgaacctaaaggtcgcgtgcttctggttgatggccatcatctcgcgtatcgtaacttctttgccctgaaaggattaaccaccagccgtggcgagccggtacagggtgtctacggctttgcaaagtcgctcctgaaagctctgaaagaagacggtgatgtggtgattgttgtctttgatgcgaaagcgccaagttttcgccacgaagcgtacgaagcttacaaagccgggcgtgctccaacgccggaagactttcctcgccaattggcgcttatgaaggaattagtggatttgcttggcctcgaacgcttggaagttcccggtttcgaggcagacgacgtattagcgactctcgcaaagaaagccgaacgtgagggctatgaagtccagatcttgacagcagatcgcgatcttttccagcttttatctccgcgcatttccgtgttacacccggaagggcatcgtatcaccccggaatggctctgggagaaatatggtttgcgtcccgaacaatgggtggattttcgcgccttagtaggcgatccgggcgacaatattccgggagttaaaggtatcggcgagaagacggcgctcaagctccttaaagaatgggggtcgttggagaacttgcttaagaatttagatcaggtcaaaccagcgtcagtgcgtgagaagattcttgcacacctcgaagacctcaaattaagcctggaattgtcccgtgtacgcaccgatttgccgctcgaagttgatttccgtggccgccgcgaacctgactgggagggtcttaaagcgtttttagagcgtcttgaatttggttcgctcttgcatgaattcggccttttagaaagcccgttaccagccgaagaagcaccttggccaccgcccgaaggcgcgtttttaggttacgttttgagtcgcccggaaccgatgtgggccgaattattggctcttgcagcgtctgcccagggacgtgtgtatcgcgcggaagaccctcatggtgcgctccgcggcctcaaagaagtccgtggactccttgccaaagacttagctgttgttgcattgcgcgaaggtcttgatttacctccgactgatgatccaatgcttcttgcgtacctcttggacccgtcaaacacgacgcccgaaggcgtagcccgtcgttacggcggcgagtggaccgaagatgcaggcgagcgcgcgttattggccgaacgtttgcaccagaatttattaggacgtttgcaaggcgaggaacgcctcctctggctttacgaagaagtggagaaaccattgagtcgcgtgctcgcgcatatggaagctaccggtgtcaaattagacgtggcgtatttggaggcactcagccttgaagttgctgccgaaatgcgccgcttggaggaagaagtattccgtttagcaggccactcctttaaccttaattctcgcgatcagttagaacgtgtgttgttcgatgaacttggtctccctcctatcggcaagacagagaagaccggtaaacgtagcacttcagcggcggttttagaagctcttcgcgaagtccatcccattgtggacaagatcttgcagtaccgcgaactcgcgaaattgaaaggcacctatattgaccctcttccggcattagtccacccgaaaacgggacgcctccatacccgcttcaaccaaacagccacggcgaccggtcgtttgtcctcctctgatccaaaccttcagaatattccagtacgtaccccattgggccagaagatccgcaaagcgtttgtagctgaggagggttggcgtttagtggccctcgattatagccaaattgaattacgtgtccttgcccatctttctggcgatgagaacctcatccgcgtgtttcaggaaggcaaagacattcacactcaaacggcaagctggatgtttggattatcggcggaagcgatcgatcctttgatgcgtcgtgcagcgaagaccgttaatttcggtgttctctacggtatgagtgcccatcgtttgtcgcaggaattaggcattccctatgaagaagctgcggcgttcattcagcgctactttcaaagctatcccaaagttaaagcatggatcgagaagactctcgaagaaggccgcacacgtggttacgtagagaccttatttggacgtcgccgctatgttcccgatttaaacgctcgcgtgaaatctgtccgtgaagccgccgaacgcatggcgttcaacatgcctgtacagggcacggcagctgacctcatgaaacttgcaatggtgcgcctttttccacaattgcgtgaagttggtgcccgcatgctcttgcaggtccacgatgaactcttgttagaagcgccaaaagagcgtgcggaagaggtggcagccctcgcgaaagaggttatggaaggcgtgtggcccttagcggtgcctcttgaagtcgaagttggtattggcgaggattggttggctgccaaaggataatga

SEQ ID NO: 578 - protein, 841 aa, synthetic construct
  REGION 1..841: note = Variant of DNA polymerase I from Thermus sp. strain 2.9
MHHHHHHGGSGMLPLFEPKGRVLLVDGHHLAYRNFFALKGLTTSRGEPVQGVYGFAKSLLKALKEDGDVVIVVFDAKAPSFRHEAYEAYKAGRAPTPEDFPRQLALMKELVDLLGLERLEVPGFEADDVLATLAKKAEREGYEVQILTADRDLFQLLSPRISVLHPEGHRITPEWLWEKYGLRPEQWVDFRALVGDPGDNIPGVKGIGEKTALKLLKEWGSLENLLKNLDQVKPASVREKILAHLEDLKLSLELSRVRTDLPLEVDFRGRREPDWEGLKAFLERLEFGSLLHEFGLLESPLPAEEAPWPPPEGAFLGYVLSRPEPMWAELLALAASAQGRVYRAEDPHGALRGLKEVRGLLAKDLAVVALREGLDLPPTDDPMLLAYLLDPSNTTPEGVARRYGGEWTEDAGERALLAERLHQNLLGRLQGEERLLWLYEEVEKPLSRVLAHMEATGVKLDVAYLEALSLEVAAEMRRLEEEVFRLAGHSFNLNSRDQLERVLFDELGLPPIGKTEKTGKRSTSAAVLEALREVHPIVDKILQYRELAKLKGTYIDPLPALVHPKTGRLHTRFNQTATATGRLSSSDPNLQNIPVRTPLGQKIRKAFVAEEGWRLVALDYSQIELRVLAHLSGDENLIRVFQEGKDIHTQTASWMFGLSAEAIDPLMRRAAKTVNFGVLYGMSAHRLSQELGIPYEEAAAFIQRYFQSYPKVKAWIEKTLEEGRTRGYVETLFGRRRYVPDLNARVKSVREAAERMAFNMPVQGTAADLMKLAMVRLFPQLREVGARMLLQVHDELLLEAPKERAEEVAALAKEVMEGVWPLAVPLEVEVGIGEDWLAAKG

SEQ ID NO: 579 - DNA, 2529 bp, synthetic construct
  misc_feature 1..2529: note = Variant of DNA polymerase I from Thermus sp. strain 2.9
  source 1..2529: mol_type = other DNA
atgcaccatcatcatcatcatggcggtagcggcatgttaccgttgttcgaacctaaaggtcgcgtgcttctggttgatggccatcatctcgcgtatcgtaacttctttgccctgaaaggattaaccaccagccgtggcgagccggtacagggtgtctacggctttgcaaagtcgctcctgaaagctctgaaagaagacggtgatgtggtgattgttgtctttgatgcgaaagcgccaagttttcgccacgaagcgtacgaagcttacaaagccgggcgtgctccaacgccggaagactttcctcgccaattggcgcttatgaaggaattagtggatttgcttggcctcgaacgcttggaagttcccggtttcgaggcagacgacgtattagcgactctcgcaaagaaagccgaacgtgagggctatgaagtccagatcttgacagcagatcgcgatcttttccagcttttatctccgcgcatttccgtgttacacccggaagggcatcgtatcaccccggaatggctctgggagaaatatggtttgcgtcccgaacaatgggtggattttcgcgccttagcgggcgatccgagcgacaatattccgggagttaaaggtatcggcgagaagacggcgctcaagctccttaaagaatgggggtcgttggagaacttgcttaagaatttagatcaggtcaaaccagcttcagtgcgtgagaagattcttgcacacctcgaagacctcaaattaagccgcgaattgtcgcgtgtacgcaccgatttgccgctcgaagttgatttccgtggccgccgcgaacctgactgggagggtcttaaagcgtttttagagcgtcttgaactgggttcgctcttgcatgaattcggccttttagaaagcccgttaccagccgaagaagcaccttggccaccgcccgaaggcgcgtttttaggttaccgtttgagtcgcccggaaccgatgtgggccgaattattggctcttgcagcgtctgcccagggacgtgtgtatcgcgcggaagaccctcatggtgcgctccgtggcctcaaagaagtccgtggactccttgccaaagacttagctgttgttgcattgcgcgaaggtcttgatttacctccgactgatgatccaatgcttcttgcgtacctcttggactcgtcaaacacgacgcccgaaggcgtagcccgtcgttacggcggcgagtggaccgaagatgcaggtgagcgcgcgttattggccgaacgtttgcacgccaatttattaggacgtttgcaaggcgaggaacgtctcctctggctttacgaagaagtggagaaaccattgagtcgcgtgctcgcgcatatggaagctaccggtgtcaaattagacgtggcgtatttggaggcactcagccttgaagtcgctgccgaactgcgccgcttggaggaagaagtattccgtttagcaggccactcctttaaccttaattctcgcgatcagttagaacgtgtgttgttcgatgaacttggtctccctcctatcaccaagacagagaagaccggtaaacgtagcacttcagcggcggttttagaagctcttcgcgaagtccatcccattgtggacaagatcttgcagtaccgcgaactcgcgaaattgaaaggcacctatattgaccctcttccggcattagtccacccgaaaacgggacgcctccatacccgcttcaaccaaacagccacggcgaccggtcgtttgtcctcctctgatccaaaccttcagaatattccagtacgtaccccattgggccagaaaatccgcaaagcgtttgtagctgaggagggttggcgtttagtggccctcgattatagccaaattgaattacgtgtccttgcccatctttctggcgatgagaacctcatccgcgtgtttcaggaaggccgcgacattcacactcaaacggcaagctggatgtttggattatcagctgaagcgatcgatcctttgatgcgtcgtgcagcgaagaccatcaatttcggtgttctctacggtatgagtgcccatcgtttgtcgcaggaattaggcattccctatgaagaagctgcggcgttcattcagcgctactttcaaagctatcccaaagttaaagcatggatcgagaagactctcgaagaaggccgcacacgtggttacgtagagaccttatttggacgtcgccgctatgttcccgatttaaatgctcgcgtgaaatctgtccgtgaagccgccgaacgcatggcgttcaacatgcctgtacagggcacggcagctgacctcatgaaacttgcaatggtgcgcctttttccacaattgcgtgaagttggtgcccgcatgctcttgcaggtccacgatgaactcttgttagaagcgccaaaagagcgtgcggaagaggtggcagccctcgcgaaagaggttatggaaggcgtgtggcccttagcggtgcctcttgaagtcgaagttggtattggcgaggattggttggctgccaaaggataatga

SEQ ID NO: 580 - protein, 841 aa, synthetic construct
  REGION 1..841: note = Variant of DNA polymerase I from Thermus sp. strain 2.9
MHHHHHHGGSGMLPLFEPKGRVLLVDGHHLAYRNFFALKGLTTSRGEPVQGVYGFAKSLLKALKEDGDVVIVVFDAKAPSFRHEAYEAYKAGRAPTPEDFPRQLALMKELVDLLGLERLEVPGFEADDVLATLAKKAEREGYEVQILTADRDLFQLLSPRISVLHPEGHRITPEWLWEKYGLRPEQWVDFRALAGDPSDNIPGVKGIGEKTALKLLKEWGSLENLLKNLDQVKPASVREKILAHLEDLKLSRELSRVRTDLPLEVDFRGRREPDWEGLKAFLERLELGSLLHEFGLLESPLPAEEAPWPPPEGAFLGYRLSRPEPMWAELLALAASAQGRVYRAEDPHGALRGLKEVRGLLAKDLAVVALREGLDLPPTDDPMLLAYLLDSSNTTPEGVARRYGGEWTEDAGERALLAERLHANLLGRLQGEERLLWLYEEVEKPLSRVLAHMEATGVKLDVAYLEALSLEVAAELRRLEEEVFRLAGHSFNLNSRDQLERVLFDELGLPPITKTEKTGKRSTSAAVLEALREVHPIVDKILQYRELAKLKGTYIDPLPALVHPKTGRLHTRFNQTATATGRLSSSDPNLQNIPVRTPLGQKIRKAFVAEEGWRLVALDYSQIELRVLAHLSGDENLIRVFQEGRDIHTQTASWMFGLSAEAIDPLMRRAAKTINFGVLYGMSAHRLSQELGIPYEEAAAFIQRYFQSYPKVKAWIEKTLEEGRTRGYVETLFGRRRYVPDLNARVKSVREAAERMAFNMPVQGTAADLMKLAMVRLFPQLREVGARMLLQVHDELLLEAPKERAEEVAALAKEVMEGVWPLAVPLEVEVGIGEDWLAAKG

SEQ ID NO: 581 - DNA, 2529 bp, synthetic construct
  misc_feature 1..2529: note = Variant of DNA polymerase I from Thermus sp. strain 2.9
  source 1..2529: mol_type = other DNA
atgcaccatcatcatcatcatggcggtagcggcatgttaccgttgttcgaacctaaaggtcgcgtgcttctggttgatggccatcatctcgcgtatcgtaacttctttgccctgaaaggattaaccaccagccgtggcgagccggtacagggtgtctacggctttgcaaagtcgctcctgaaagctctgaaagaagacggtgatgtggtgattgttgtctttgatgcgaaagcgccaagttttcgccacgaagcgtacgaagcttacaaagccgggcgtgctccaacgccggaagactttcctcgccaattggcgcttatgaaggaattagtggatttgcttggcctcgaacgcttggaagttcccggtttcgaggcagacgacgtattagcgactctcgcaaagaaagccgaacgtgagggctatgaagtccagatcttgacagcagatcgcgatcttttccagcttttatctccgcgcatttccgtgttacacccggaagggcatcgtatcaccccggaatggctctgggagaaatatggtttgcgtcccgaacaatgggtggattttcgcgccttagcgggcgatccgagcgacaatattccgggagttaaaggtatcggcgagaagacggcgctcaagctccttaaagaatgggggtcgttggagaacttgcttaagaatttagatcaggtcaaaccagcttcagtgcgtgagaagattcttgcacacctcgaagacctcaaattaagccgcgaattggtccgtgtacgcaccgatttgccgctcgaagttgatttccgtggccgccgcgaacctgactgggagggtcttaaagcgtttttagagcgtcttgaatttggttcgctcttgcatgaattcggccttttagaaagcccgttaccagccgaagaagcaccttggccaccgcccgaaggcgcgtttttaggttaccgtttgagtcgcccggaaccgatgtgggccgaattattggctcttgcagcgtctgcccagggacgtgtgtatcgcgcggaagaccctcatggtgcgctccgtggcctcaaagaagtccgtggactccttgccaaagacttagctgttgttgcattgcgcgaaggtcttgatttacctccgactgatgatccaatgcttcttgcgtacctcttggactcgtcaaacacgacgcccgaaggcgtagcccgtcgttacggcggcgagtggaccgaagatgcaggtgagcgcgcgttattggccgaacgtttgcacgccaatttattaggacgtttgcaaggcgaggaacgtctcctctggctttacgaagaagtggagaaaccattgagtcgcgtgctcgcgcatatggaagctaccggtgtcaaattagacgtggcgtatttggaggcactcagccttgaagccgctgccgaaatgcgccgcttggaggaagaagtattccgtttagcaggccactcctttaaccttaattctcgcgatcagttagaacgtgtgttgttcgatgaacttggtctccctcctatcggtaagacagagaagaccggtaaacgtagcacttcagcggcggttttagaagctcttcgcgaagtccatcccattgtggacaagatcttgcagtaccgcgaactcgcgaaattgaaaggcacctatattgaccctcttccggcattagtccacccgaaaacgggacgcctccatacccgcttcaaccaaacagccacggcgaccggtcgtttgtcctcctctgatccaaaccttcagaatattccagtacgtaccccattgggccagaaaatccgcaaagcgtttgtagctgaggagggttggcgtttagtggccctcgattatagccaaattgaattacgtgtccttgcccatctttctggcgatgagaacctcatccgcgtgtttcaggaaggccgcgacattcacactcaaacggcaagctggatgtttggattatcagctgaagcgatcgatcctttgatgcgtcgtgcagcgaagaccatcaatttcggtgttctctacggtatgagtgccgcgcgtttgtcgcaggaattaggcattccctatgaagaagctgcggcgttcattcagcgctactttcaaagctatcccaaagttaaagcatggatcgagaagactctcgaagaaggccgcacacgtggttacgtagagaccttatttggacgtcgccgctatgttcccgatttaaacgctcgcgtgaaatctgtccgtgaagccgccgaacgcatggcgttcaacatgcctgtacagggcacggcagctgacctcatgaaacttgcaatggtgcgcctttttccacaattgcgtgaagttggtgcccgcatgctcttgcaggtccacgatgaactcttgttagaagcgccaaaagagcgtgcggaagaggtggcagccctcgcgaaagaggttatggaaggcgtgtggcccttagcggtgcctcttgaagtcgaagttggtattggcgaggattggttggctgccaaaggataatga

SEQ ID NO: 582 - protein, 841 aa, synthetic construct
  REGION 1..841: note = Variant of DNA polymerase I from Thermus sp. strain 2.9
MHHHHHHGGSGMLPLFEPKGRVLLVDGHHLAYRNFFALKGLTTSRGEPVQGVYGFAKSLLKALKEDGDVVIVVFDAKAPSFRHEAYEAYKAGRAPTPEDFPRQLALMKELVDLLGLERLEVPGFEADDVLATLAKKAEREGYEVQILTADRDLFQLLSPRISVLHPEGHRITPEWLWEKYGLRPEQWVDFRALAGDPSDNIPGVKGIGEKTALKLLKEWGSLENLLKNLDQVKPASVREKILAHLEDLKLSRELVRVRTDLPLEVDFRGRREPDWEGLKAFLERLEFGSLLHEFGLLESPLPAEEAPWPPPEGAFLGYRLSRPEPMWAELLALAASAQGRVYRAEDPHGALRGLKEVRGLLAKDLAVVALREGLDLPPTDDPMLLAYLLDSSNTTPEGVARRYGGEWTEDAGERALLAERLHANLLGRLQGEERLLWLYEEVEKPLSRVLAHMEATGVKLDVAYLEALSLEAAAEMRRLEEEVFRLAGHSFNLNSRDQLERVLFDELGLPPIGKTEKTGKRSTSAAVLEALREVHPIVDKILQYRELAKLKGTYIDPLPALVHPKTGRLHTRFNQTATATGRLSSSDPNLQNIPVRTPLGQKIRKAFVAEEGWRLVALDYSQIELRVLAHLSGDENLIRVFQEGRDIHTQTASWMFGLSAEAIDPLMRRAAKTINFGVLYGMSAARLSQELGIPYEEAAAFIQRYFQSYPKVKAWIEKTLEEGRTRGYVETLFGRRRYVPDLNARVKSVREAAERMAFNMPVQGTAADLMKLAMVRLFPQLREVGARMLLQVHDELLLEAPKERAEEVAALAKEVMEGVWPLAVPLEVEVGIGEDWLAAKG

SEQ ID NO: 583 - DNA, 2529 bp, synthetic construct
  misc_feature 1..2529: note = Variant of DNA polymerase I from Thermus sp. strain 2.9
  source 1..2529: mol_type = other DNA
atgcaccatcatcatcatcatggcggtagcggcatgttaccgttgttcgaacctaaaggtcgcgtgcttctggttgatggccatcatctcgcgtatcgtaacttctttgccctgaaaggattaaccaccagccgtggcgagccggtacagggtgtctacggctttgcaaagtcgctcctgaaagctctgaaagaagacggtgatgtggtgattgttgtctttgatgcgaaagcgccaagttttcgccacgaagcgtacgaagcttacaaagccgggcgtgctccaacgccggaagactttcctcgccaattggcgcttatgaaggaattagtggatttgcttggcctcgaacgcttggaagttcccggtttcgaggcagacgacgtattagcgactctcgcaaagaaagccgaacgtgagggctatgaagtccagatcttgacagcagatcgcgatcttttccagcttttatctccgcgcatttccgtgttacacccggaagggcatcgtatcaccccggaatggctctgggagaaatatggtttgcgtcccgaacaatgggtggattttcgcgccttagcaggcgatccgggcgacaatattccgggagttaaaggtatcggcgagaagacggcgctcaagctccttaaagaatgggggtcgttggagaacttgcttaagaatttagatcaggtcaaaccagcttcagtgcgtgagaagattcttgcacacctcgaagacctcaaattaagccgcgaattgtcccgtgtacgcaccgatttgccgctcgaagttgatttccgtggccgccgcgaacctgactgggagggtcttaaagcgtttttagagcgtcttgaatttggttcgctcttgcatgaattcggccttttagaaagcccgttaccagccgaagaagcaccttggccaccgcccgaaggcgcgtttttaggttaccgtttgagtcgcccggaaccgatgtgggccgaattattggctcttgcagcgtctgcccagggacgtgtgtatcgcgcggaagaccctcatggtgcgctccgtggcctcaaagaagtccgtggactccttgccaaagacttagctgttgttgcattgcgcgaaggtcttgatttacctccgactgatgatccaatgcttcttgcgtacctcttggacccgtcaaacacgacgcccgaaggcgtagcccgtcgttacggcggcgagtggaccgaagatgcaggtgagcgcgcgttattggccgaacgtttgcacgccaatttattaggacgtttgcaaggcgaggaacgtctcctctggctttacgaagaagtggagaaaccattgagtcgcgtgctcgcgcatatggaagctaccggtgtcaaattagacgtggcgtatttggaggcactcagccttgaagttgctgccgaaatgcgccgcttggaggaagaagtattccgtttagcaggccactcctttaaccttaattctcgcgatcagttagaacgtgtgttgttcgatgaacttggtctccctcctatcggcaagacagagaagaccggtaaacgtagcacttcagcggcggttttagaagctcttcgcgaagtccatcccattgtggacaagatcttgcagtaccgcgaactcgcgaaattgaaaggcacctatattgaccctcttccggcattagtccacccgaaaacgggacgcctccatacccgcttcaaccaaacagccacggcgaccggtcgtttgtcctcctctgatccaaaccttcagaatattccagtacgtaccccattgggccagaagatccgcaaagcgtttgtagctgaggagggttggcgtttagtggccctcgattatagccaaattgaattacgtgtccttgcccatctttctggcgatgagaacctcatccgcgtgtttcaggaaggccgtgacattcacactcaaacggcaagctggatgtttggattatcagctgaagcgatcgatcctttgatgcgtcgtgcagcgaagaccgttaatttcggtgttctctacggtatgagtgcccatcgtttgtcgcaggaattaggcattccctatgaagaagctgtggcgttcattcagcgctactttcaaagctatcccaaagttaaagcatggatcgagaagactctcgaagaaggccgcacacgtggttacgtagagaccttatttggacgtcgccgctatgttcccgatttaaacgctcgcgtgaaatctgtccgtgaagccgccgaacgcatggcgttcaacatgcctgtacagggcacggcagctgacctcatgaaacttgcaatggtgcgcctttttccacaattgcgtgaagttggtgcccgcatgctcttgcaggtccacgatgaactcttgttagaagcgccaaaagagcgtgcggaagaggtggcagccctcgcgaaagaggttatggaaggcgtgtggcccttagcggtgcctcttgaagtcgaagttggtattggcgaggattggttggctgccaaaggataatga

SEQ ID NO: 584 - protein, 841 aa, synthetic construct
  REGION 1..841: note = Variant of DNA polymerase I from Thermus sp. strain 2.9
MHHHHHHGGSGMLPLFEPKGRVLLVDGHHLAYRNFFALKGLTTSRGEPVQGVYGFAKSLLKALKEDGDVVIVVFDAKAPSFRHEAYEAYKAGRAPTPEDFPRQLALMKELVDLLGLERLEVPGFEADDVLATLAKKAEREGYEVQILTADRDLFQLLSPRISVLHPEGHRITPEWLWEKYGLRPEQWVDFRALAGDPGDNIPGVKGIGEKTALKLLKEWGSLENLLKNLDQVKPASVREKILAHLEDLKLSRELSRVRTDLPLEVDFRGRREPDWEGLKAFLERLEFGSLLHEFGLLESPLPAEEAPWPPPEGAFLGYRLSRPEPMWAELLALAASAQGRVYRAEDPHGALRGLKEVRGLLAKDLAVVALREGLDLPPTDDPMLLAYLLDPSNTTPEGVARRYGGEWTEDAGERALLAERLHANLLGRLQGEERLLWLYEEVEKPLSRVLAHMEATGVKLDVAYLEALSLEVAAEMRRLEEEVFRLAGHSFNLNSRDQLERVLFDELGLPPIGKTEKTGKRSTSAAVLEALREVHPIVDKILQYRELAKLKGTYIDPLPALVHPKTGRLHTRFNQTATATGRLSSSDPNLQNIPVRTPLGQKIRKAFVAEEGWRLVALDYSQIELRVLAHLSGDENLIRVFQEGRDIHTQTASWMFGLSAEAIDPLMRRAAKTVNFGVLYGMSAHRLSQELGIPYEEAVAFIQRYFQSYPKVKAWIEKTLEEGRTRGYVETLFGRRRYVPDLNARVKSVREAAERMAFNMPVQGTAADLMKLAMVRLFPQLREVGARMLLQVHDELLLEAPKERAEEVAALAKEVMEGVWPLAVPLEVEVGIGEDWLAAKG

SEQ ID NO: 585 - DNA, 2529 bp, synthetic construct
  misc_feature 1..2529: note = Variant of DNA polymerase I from Thermus sp. strain 2.9
  source 1..2529: mol_type = other DNA
atgcaccatcatcatcatcatggcggtagcggcatgttaccgttgttcgaacctaaaggtcgcgtgcttctggttgatggccatcatctcgcgtatcgtaacttctttgccctgaaaggattaaccaccagccgtggcgagccggtacagggtgtctacggctttgcaaagtcgctcctgaaagctctgaaagaagacggtgatgtggtgattgttgtctttgatgcgaaagcgccaagttttcgccacgaagcgtacgaagcttacaaagccgggcgtgctccaacgccggaagactttcctcgccaattggcgcttatgaaggaattagtggatttgcttggcctcgaacgcttggaagttcccggtttcgaggcagacgacgtattagcgactctcgcaaagaaagccgaacgtgagggctatgaagtccagatcttgacagcagatcgcgatcttttccagcttttatctccgcgcatttccgtgttacacccggaagggcatcgtatcaccccggaatggctctgggagaaatatggtttgcgtcccgaacaatgggtggattttcgcgccttagcgggcgatccgagcgacaatattccgggagttaaaggtatcggcgagaagacggcgctcaagctccttaaagaatgggggtcgttggagaacttgcttaagaatttagatcaggtcaaaccagcttcagtgcgtgagaagattcttgcacacctcgaagacctcaaattaagccgcgaattgtcccgtgtacgcaccgatttgccgctcgaagttgatttccgtggccgccgcgaacctgactgggagggtcttaaagcgtttttagagcgtcttgaactgggttcgctcttgcatgaattcggccttttagaaagcccgttaccagccgaagaagcaccttggccaccgcccgaaggcgcgtttttaggttaccgtttgagtcgcccggaaccgatgtgggccgaattattggctcttgcagcgtctgcccagggacgtgtgtatcgcgcggaagaccctcatggtgcgctccgtggcctcaaagaagtccgtggactccttgccaaagacttagctgttgttgcattgcgcgaaggtcttgatttacctccgactgatgatccaatgcttcttgcgtacctcttggactcgtcaaacacgacgcccgaaggcgtagcccgtcgttacggcggcgagtggaccgaagatgcaggtgagcgcgcgttattggccgaacgtttgcacgccaatttattaggacgtttgcaaggcgaggaacgtctcctctggctttacgaagaagtggagaaaccattgagtcgcgtgctcgcgcatatggaagctaccggtgtcaaattagacgtggcgtatttggaggcactcagccttgaagttgctgccgaaatgcgccgcttggaggaagaagtattccgtttagcaggccactcctttaaccttaattctcgcgatcagttagaacgtgtgttgttcgatgaacttggtctccctcctatcaccaagacagagaagaccggtaaacgtagcacttcagcggcggttttagaagctcttcgcgaagtccatcccattgtggacaagatcttgcagtaccgcgaactcgcgaaattgaaaggcacctatattgaccgtcttccggcattagtccacccgaaaacgggacgcctccatacccgcttcaaccaaacagccacggcgaccggtcgtttgtcctcctctgatccaaaccttcagaatattccagtacgtaccccattgggccagaaaatccgcaaagcgtttgtagctgaggagggttggcgtttagtggccctcgattatagccaaattgaattacgtgtccttgcccatctttctggcgatgagaacctcatccgcgtgtttcaggaaggccgcgacattcacactcaaacggcaagctggatgtttggactgtcatcggaagcgatcgatcctttgatgcgtcgtgcagcgaagaccatcaatttcggtgttctctacggtatgagtgccgcgcgtttgtcgcaggaattaggcattccctatgaagaagctgcggcgttcattcagcgctactttcaaagctatcccaaagttaaagcatggatcgagaagactctcgaagaaggccgcacacgtggttacgtagagaccttatttggacgtcgccgctatgttcccgatttaactgctcgcgtgaaatctgtccgtgaagccgccgaacgcatggcgtggaacatgcctgtacagggcacggcagctgacctcatgaaacttgcaatggtgcgcctttttccacaattgcgtgaagttggtgcccgcatgctcttgcaggtccacgatgaactcttgttagaagcgccaaaagagcgtgcggaagaggtggcagccctcgcgaaagaggttatggaaggcgtgtggcccttagcggtgcctcttgaagtcgaagttggtattggcgaggattggttggctgccaaaggataatga

SEQ ID NO: 586 - protein, 841 aa, synthetic construct
  REGION 1..841: note = Variant of DNA polymerase I from Thermus sp. strain 2.9
MHHHHHHGGSGMLPLFEPKGRVLLVDGHHLAYRNFFALKGLTTSRGEPVQGVYGFAKSLLKALKEDGDVVIVVFDAKAPSFRHEAYEAYKAGRAPTPEDFPRQLALMKELVDLLGLERLEVPGFEADDVLATLAKKAEREGYEVQILTADRDLFQLLSPRISVLHPEGHRITPEWLWEKYGLRPEQWVDFRALAGDPSDNIPGVKGIGEKTALKLLKEWGSLENLLKNLDQVKPASVREKILAHLEDLKLSRELSRVRTDLPLEVDFRGRREPDWEGLKAFLERLELGSLLHEFGLLESPLPAEEAPWPPPEGAFLGYRLSRPEPMWAELLALAASAQGRVYRAEDPHGALRGLKEVRGLLAKDLAVVALREGLDLPPTDDPMLLAYLLDSSNTTPEGVARRYGGEWTEDAGERALLAERLHANLLGRLQGEERLLWLYEEVEKPLSRVLAHMEATGVKLDVAYLEALSLEVAAEMRRLEEEVFRLAGHSFNLNSRDQLERVLFDELGLPPITKTEKTGKRSTSAAVLEALREVHPIVDKILQYRELAKLKGTYIDRLPALVHPKTGRLHTRFNQTATATGRLSSSDPNLQNIPVRTPLGQKIRKAFVAEEGWRLVALDYSQIELRVLAHLSGDENLIRVFQEGRDIHTQTASWMFGLSSEAIDPLMRRAAKTINFGVLYGMSAARLSQELGIPYEEAAAFIQRYFQSYPKVKAWIEKTLEEGRTRGYVETLFGRRRYVPDLTARVKSVREAAERMAWNMPVQGTAADLMKLAMVRLFPQLREVGARMLLQVHDELLLEAPKERAEEVAALAKEVMEGVWPLAVPLEVEVGIGEDWLAAKG

SEQ ID NO: 587 - DNA, 2529 bp, synthetic construct
  misc_feature 1..2529: note = Variant of DNA polymerase I from Thermus sp. strain 2.9
  source 1..2529: mol_type = other DNA
atgcaccatcatcatcatcatggcggtagcggcatgttaccgttgttcgaacctaaaggtcgcgtgcttctggttgatggccatcatctcgcgtatcgtaacttctttgccctgaaaggattaaccaccagccgtggcgagccggtacagggtgtctacggctttgcaaagtcgctcctgaaagctctgaaagaagacggtgatgtggtgattgttgtctttgatgcgaaagcgccaagttttcgccacgaagcgtacgaagcttacaaagccgggcgtgctccaacgccggaagactttcctcgccaattggcgcttatgaaggaattagtggatttgcttggcctcgaacgcttggaagttcccggtttcgaggcagacgacgtattagcgactctcgcaaagaaagccgaacgtgagggctatgaagtccatatcttgacagcagatcgcgatcttttccagcttttatctccgcgcatttccgtgttacacccggaagggcatcgtatcaccccggaatggctctgggagaaatatggtttgcgtcccgaacaatgggtggattttcgcgccttagcgggcgatccgagcgacaatattccgggagttaaaggtatcggcgagaagacggcgctcaagctccttaaagaatgggggtcgttggagaacttgcttaagaatttagatcaggtcaaaccagcttcagtgcgtgagaagattcttgcacacctcgaagacctcaaattaagccgcgaattggtccgtgtacgcaccgatttgccgctcgaagttgatttccgtggccgccgcgaacctgactgggagggtcttaaagcgtttttagagcgtcttgaatttggttcgctcttgcatgaattcggccttttagaaagcccgttaccagccgaagaagcaccttggccaccgcccgaaggcgcgtttttaggttaccgtttgagtcgcccggaaccgatgtgggccgaattattggctcttgcagcgtctgcccagggacgtgtgtatcgcgcggaagaccctcatggtgcgctccgtggcctcaaagaagtccgtggactccttgccaaagacttagctgttgttgcattgcgcgaaggtcttgatttacctccgactgatgatccaatgcttcttgcgtacctcttggacccgtcaaacacgacgcccgaaggcgtagcccgtcgttacggcggcgagtggaccgaagatgcaggtgagcgcgcgttattggccgaacgtttgcacgccaatttattaggacgtttgcaaggcgaggaacgtctcctctggctttacgaagaagtggagaaaccattgagtcgcgtgctcgcgcatatggaagctaccggtgtcaaattagacgtggcgtatttggaggcactcagccttgaagtcgctgccgaaatgcgccgcttggaggaagaagtattccgtttagcaggccactcctttaaccttaattctcgcgatcagttagaacgtgtgttgttcgatgaacttggtctccctcctatcaccaagacagagaagaccggtaaacgtagcacttcagcggcggttttagaagctcttcgcgaagtccatcccattgtggacaagatcttgcagtaccgcgaactcgcgaaattgaaaggcacctatattgaccctcttccggcattagtccacccgaaaacgggacgcctccatacccgcttcaaccaaacagccacggcgaccggtcgtttgtcctcctctgatccaaaccttcagaatattccagtacgtaccccattgggccagcatatccgcaaagcgtttgtagctgaggagggttggcgtttagtggccctcgattatagccaaattgaattacgtgtccttgcccatctttctggcgatgagaacctcatccgcgtgtttcaggaaggccgcgacattcacactcaaacggcaagctggatgtttggattatcagctgaagcgatcgatcctttgatgcgtcgtgcagcgaagaccatcaatttcggtgttctctacggtatgagtgcccatcgtttgtcgcaggaattaggcattccctatgaagaagctgcggcgttcattcagcgctactttcaaagctatcccaaagttaaagcatggatcgagaagactctcgaagaaggccgcacacgtggttacgtagagaccttatttggacgtcgccgctatgttcccgatttaaacgctcgcgtgaaatctgtccgtgaagccgccgaacgcatggcgttcaacatgcctgtacagggcacggcagctgacctcatgaaacttgcaatggtgcgcctttttccacaattgcgtgaagttggtgcccgcatgctcttgcaggtccacgatgaactcttgttagaagcgccaaaagagcgtgcggaagaggtggcagccctcgcgaaagaggttatggaaggcgtgtggcccttagcggtgcctcttgaagtcgaagttggtattggcgaggattggttggctgccaaaggataatga

SEQ ID NO: 588 - protein, 841 aa, synthetic construct
  REGION 1..841: note = Variant of DNA polymerase I from Thermus sp. strain 2.9
MHHHHHHGGSGMLPLFEPKGRVLLVDGHHLAYRNFFALKGLTTSRGEPVQGVYGFAKSLLKALKEDGDVVIVVFDAKAPSFRHEAYEAYKAGRAPTPEDFPRQLALMKELVDLLGLERLEVPGFEADDVLATLAKKAEREGYEVHILTADRDLFQLLSPRISVLHPEGHRITPEWLWEKYGLRPEQWVDFRALAGDPSDNIPGVKGIGEKTALKLLKEWGSLENLLKNLDQVKPASVREKILAHLEDLKLSRELVRVRTDLPLEVDFRGRREPDWEGLKAFLERLEFGSLLHEFGLLESPLPAEEAPWPPPEGAFLGYRLSRPEPMWAELLALAASAQGRVYRAEDPHGALRGLKEVRGLLAKDLAVVALREGLDLPPTDDPMLLAYLLDPSNTTPEGVARRYGGEWTEDAGERALLAERLHANLLGRLQGEERLLWLYEEVEKPLSRVLAHMEATGVKLDVAYLEALSLEVAAEMRRLEEEVFRLAGHSFNLNSRDQLERVLFDELGLPPITKTEKTGKRSTSAAVLEALREVHPIVDKILQYRELAKLKGTYIDPLPALVHPKTGRLHTRFNQTATATGRLSSSDPNLQNIPVRTPLGQHIRKAFVAEEGWRLVALDYSQIELRVLAHLSGDENLIRVFQEGRDIHTQTASWMFGLSAEAIDPLMRRAAKTINFGVLYGMSAHRLSQELGIPYEEAAAFIQRYFQSYPKVKAWIEKTLEEGRTRGYVETLFGRRRYVPDLNARVKSVREAAERMAFNMPVQGTAADLMKLAMVRLFPQLREVGARMLLQVHDELLLEAPKERAEEVAALAKEVMEGVWPLAVPLEVEVGIGEDWLAAKG

SEQ ID NO: 589 - DNA, 2529 bp, synthetic construct
  misc_feature 1..2529: note = Variant of DNA polymerase I from Thermus sp. strain 2.9
  source 1..2529: mol_type = other DNA
atgcaccatcatcatcatcatggcggtagcggcatgttaccgtcgttcgaacctaaaggtcgcgtgcttctggttgatggccatcatctcgcgtatcgtaacttctttgccctgaaaggattaaccaccagccgtggcgagccggtacagggtgtctacggctttgcaaagtcgctcctgaaagctctgaaagaagacggtgatgtggtgattgttgtctttgatgcgaaagcgccaagttttcgccacgaagcgtacgaagcttacaaagccgggcgtgctccaacgccggaagactttcctcgccaattggcgcttatgaaggaattagtggatttgcttggcctcgaacgcttggaagttcccggtttcgaggcagacgacgtattagcgactctcgcaaagaaagccgaacgtgagggctatgaagtccagatcttgacagcagatcgcgatcttttccagcttttatctccgcgcatttccgtgttacacccggaagggcatcgtatcaccccggaatggctctgggagaaatatggtttgcgtcccgaacaatgggtggattttcgcgccttagcgggcgatccgagcgacaatattccgggagttaaaggtatcggcgagaagacggcgctcaagctccttaaagaatgggggtcgttggagaacttgcttaagaatttagatcaggtcaaaccagcttcagtgcgtgagaagattcttgcacacctcgaagacctcaaattaagccgcgaattgtcccgtgtacgcaccgatttgccgctcgaagttgatttccgtggccgccgcgaacccgactgggagggtcttaaagcgtttttagagcgtcttgaatttggttcgctcttgcatgaattcggccttttagaaagcccgttaccagccgaagaagcaccttggccaccgcccgaaggcgcgtttttaggttaccgtttgagtcgcccggaaccgatgtgggccgaattattggctcttgcagcgtctgcccagggacgtgtgtatcgcgcggaagaccctcatggtgcgctccgtggcctcaaagaagtccgtggactccttgccaaagacttagctgttgttgcattgcgcgaaggtcttgatttacctccgactgatgatccaatgcttcttgcgtacctcttggacccgtcaaacacgacgcccgaaggcgtagcccgtcgttacggcggcgagtggaccgaagatgcaggtgagcgcgcgttattggccgaacgtttgcacgccaatttattaggacgtttgcaaggcgaggaacgtctcctctggctttacgaagaagtggagaaaccattgagtcgcgtgctcgcgcatatggaagctaccggtgtcaaattagacgtggcgtatttggaggcactcagccttgaagttgctgccgaaatgcgccgcttggaggaagaagtattccgtttagcaggccactcctttaaccttaattctcgcgatcagttagaacgtgtgttgttcgatgaacttggtctccctcctatcggcaagacagagaagaccggtaaacgtagcacttcagcggcggttttagaagctcttcgcgaagtccatcccattgtggacaagatcttgcagtaccgcgaactcgcgaaattgaaaggcacctatattgaccctcttccggcattagtccacccgaaaacgggacgcctccatacccgcttcaaccaaacagccacggcgaccggtcgtttgtcctcctctgatccaaaccttcagaatattccagtacgtaccccattgggccagaagatccgcaaagcgtttgtagctgaggagggttggcgtttagtggccctcgattatagccaaattgaattacgtgtccttgcccatctttctaatgatgagaacctcatccgcgtgtttcaggaaggccgcgacattcacactcaaacggcaagctggatgtttggattatcagctgaagcgatcgatcctttgatgcgtcgtgcagcgaagaccatcaatttcggtgttctctacggtatgagtgcccatcgtttgtcgcaggaattaggcattccctatgaagaagctgcggcgttcattcagcgctactttcaaagctatcccaaagttaaagcatggatcgagaagactctcgaagaaggccgcacacgtggttacgtagagaccttatttggacgtcgccgctatgttcccgatttaaacgctcgcgtgaaatctgtccgtgaagccgccgaacgcatggcgttcaacatgcctgtacagggcacggcagctgacctcatgaaacttgcaatggtgcgcctttttccacaattgcgtgaagttggtgcccgcatgctcttgcaggtccacgatgaactcttgttagaagcgccaaaagagcgtgcggaagaggtggcagccctcgcgaaagaggttatggaaggcgtgtggcccttagcggtgcctcttgaagtcgaagttggtattggcgaggattggttggctgccaaaggataatga

SEQ ID NO: 590 - protein, 841 aa, synthetic construct
  REGION 1..841: note = Variant of DNA polymerase I from Thermus sp. strain 2.9
MHHHHHHGGSGMLPSFEPKGRVLLVDGHHLAYRNFFALKGLTTSRGEPVQGVYGFAKSLLKALKEDGDVVIVVFDAKAPSFRHEAYEAYKAGRAPTPEDFPRQLALMKELVDLLGLERLEVPGFEADDVLATLAKKAEREGYEVQILTADRDLFQLLSPRISVLHPEGHRITPEWLWEKYGLRPEQWVDFRALAGDPSDNIPGVKGIGEKTALKLLKEWGSLENLLKNLDQVKPASVREKILAHLEDLKLSRELSRVRTDLPLEVDFRGRREPDWEGLKAFLERLEFGSLLHEFGLLESPLPAEEAPWPPPEGAFLGYRLSRPEPMWAELLALAASAQGRVYRAEDPHGALRGLKEVRGLLAKDLAVVALREGLDLPPTDDPMLLAYLLDPSNTTPEGVARRYGGEWTEDAGERALLAERLHANLLGRLQGEERLLWLYEEVEKPLSRVLAHMEATGVKLDVAYLEALSLEVAAEMRRLEEEVFRLAGHSFNLNSRDQLERVLFDELGLPPIGKTEKTGKRSTSAAVLEALREVHPIVDKILQYRELAKLKGTYIDPLPALVHPKTGRLHTRFNQTATATGRLSSSDPNLQNIPVRTPLGQKIRKAFVAEEGWRLVALDYSQIELRVLAHLSNDENLIRVFQEGRDIHTQTASWMFGLSAEAIDPLMRRAAKTINFGVLYGMSAHRLSQELGIPYEEAAAFIQRYFQSYPKVKAWIEKTLEEGRTRGYVETLFGRRRYVPDLNARVKSVREAAERMAFNMPVQGTAADLMKLAMVRLFPQLREVGARMLLQVHDELLLEAPKERAEEVAALAKEVMEGVWPLAVPLEVEVGIGEDWLAAKG

SEQ ID NO: 591 - DNA, 2529 bp, synthetic construct
  misc_feature 1..2529: note = Variant of DNA polymerase I from Thermus sp. strain 2.9
  source 1..2529: mol_type = other DNA
atgcaccatcatcatcatcatggcggtagcggcatgttaccgttgttcgaacctaaaggtcgcgtgcttctggttgatggccatcatctcgcgtatcgtaacttctttgccctgaaaggattaaccaccagccgtggcgagccggtacagggtgtctacggctttgcaaagtcgctcctgaaagctctgaaagaagacggtgatgtggtgattgttgtctttgatgcgaaagcgccaagttttcgccacgaagcgtacgaagcttacaaagccgggcgtgctccaacgccggaagactttcctcgccaattggcgcttatgaaggaattagtggatttgcttggcctcgaacgcttggaagttcccggtttcgaggcagacgacgtattagcgactctcgcaaagaaagccgaacgtgagggctatgaagtccagatcttgacagcagatcgcgatcttttccagcttttatctccgcgcatttccgtgttacacccggaagggcatcgtatcaccccggaatggctctgggagaaatatggtttgcgtcccgaacaatgggtggattttcgcgccttagcgggcgatccgagcgacaatattccgggagttaaaggtatcggcgagaagacggcgctcaagctccttaaagaatgggggtcgttggagaacttgcttaagaatttagatcaggtcaaaccagcttcagtgcgtgagaagattcttgcacacctcgaagacctcaaattaagccgcgaattggtccgtgtacgcaccgatttgccgctcgaagttgatttccgtggccgccgcgaacctgactgggagggtcttaaagcgtttttagagcgtcttgaactgggttcgctcttgcatgaattcggccttttagaaagcccgttaccagccgaagaagcaccttggccaccgcccgaaggcgcgtttttaggttaccgtttgagtcgcccggaaccgatgtgggccgaattattggctcttgcagcgtctgcccagggacgtgtgtatcgcgcggaagaccctcatggtgcgctccgtggcctcaaagaagtccgtggactccttgccaaagacttagctgttgttgcattgcgcgaaggtcttgatttacctccgactgatgatccaatgcttcttgcgtacctcttggactcgtcaaacacgacgcccgaaggcgtagcccgtcgttacggcggcgagtggaccgaagatgcaggtgagcgcgcgttattggccgaacgtttgcacgccaatttattaggacgtttgcaaggcgaggaacgtctcctctggctttacgaagaagtggagaaaccattgagtcgcgtgctcgcgcatatggaagctaccggtgtcaaattagacgtggcgtatttggaggcactcagccttgaagttgctgccgaaatgcgccgcttggaggaagaagtattccgtttagcaggccactcctttaaccttaattctcgcgatcagttagaacgtgtgttgttcgatgaacttggtctccctcctatcggcaagacagagaagaccggtaaacgtagcacttcagcggcggttttagaagctcttcgcgaagtccatcccattgtggacaagatcttgcagtaccgcgaactcgcgaaattgaaaggcacctatattgaccctcttccggcattagtccacccgaaaacgggacgcctccatacccgcttcaaccaaacagccacggcgaccggtcgtttgtcctcctctgatccaaaccttcagaatattccagtacgtaccccattgggccagaaaatccgcaaagcgtttgtagctgaggagggttggcgtttagtggccctcgattatagccaaattgaattacgtgtccttgcccatctttctggcgatgagaacctcatccgcgtgtttcaggaaggccgcgacattcacactcaaacggcaagctggatgtttggagtgtcagcggaagcgatcgatcctttgatgcgtcgtgcagcgaagaccatcaatttcggtgttctctacggtatgagtgcccatcgtttgtcgcaggaattaggcattccctatgaagaagctgcggcgttcattcagcgctactttcaaagctatcccaaagttaaagcatggatcgagaagactctcgaagaaggccgcacacgtggttacgtagagaccttatttggacgtcgccgctatgttcccgatttaaatgctcgcgtgaaatctgtccgtgaagccgccgaacgcatggcgtttaacatgcctgtacagggcacggcagctgacctcatgaaacttgcaatggtgcgcctttttccacaattgcgtgaagttggtgcccgcatgctcttgcaggtccacgatgaactcttgttagaagcgccaaaagagcgtgcggaagaggtggcagccctcgcgaaagaggttatggaaggcgtgtggcccttagcggtgcctcttgaagtcgaagttggtattggcgaggattggttggctgccaaaggataatga

SEQ ID NO: 592 - protein, 841 aa, synthetic construct
  REGION 1..841: note = Variant of DNA polymerase I from Thermus sp. strain 2.9
MHHHHHHGGSGMLPLFEPKGRVLLVDGHHLAYRNFFALKGLTTSRGEPVQGVYGFAKSLLKALKEDGDVVIVVFDAKAPSFRHEAYEAYKAGRAPTPEDFPRQLALMKELVDLLGLERLEVPGFEADDVLATLAKKAEREGYEVQILTADRDLFQLLSPRISVLHPEGHRITPEWLWEKYGLRPEQWVDFRALAGDPSDNIPGVKGIGEKTALKLLKEWGSLENLLKNLDQVKPASVREKILAHLEDLKLSRELVRVRTDLPLEVDFRGRREPDWEGLKAFLERLELGSLLHEFGLLESPLPAEEAPWPPPEGAFLGYRLSRPEPMWAELLALAASAQGRVYRAEDPHGALRGLKEVRGLLAKDLAVVALREGLDLPPTDDPMLLAYLLDSSNTTPEGVARRYGGEWTEDAGERALLAERLHANLLGRLQGEERLLWLYEEVEKPLSRVLAHMEATGVKLDVAYLEALSLEVAAEMRRLEEEVFRLAGHSFNLNSRDQLERVLFDELGLPPIGKTEKTGKRSTSAAVLEALREVHPIVDKILQYRELAKLKGTYIDPLPALVHPKTGRLHTRFNQTATATGRLSSSDPNLQNIPVRTPLGQKIRKAFVAEEGWRLVALDYSQIELRVLAHLSGDENLIRVFQEGRDIHTQTASWMFGVSAEAIDPLMRRAAKTINFGVLYGMSAHRLSQELGIPYEEAAAFIQRYFQSYPKVKAWIEKTLEEGRTRGYVETLFGRRRYVPDLNARVKSVREAAERMAFNMPVQGTAADLMKLAMVRLFPQLREVGARMLLQVHDELLLEAPKERAEEVAALAKEVMEGVWPLAVPLEVEVGIGEDWLAAKG

SEQ ID NO: 593 - DNA, 2529 bp, synthetic construct
  misc_feature 1..2529: note = Variant of DNA polymerase I from Thermus sp. strain 2.9
  source 1..2529: mol_type = other DNA
atgcaccatcatcatcatcatggcggtagcggcatgttaccgttgttcgaacctaaaggtcgcgtgcttctggttgatggccatcatctcgcgtatcgtaacttctttgccctgaaaggattaaccaccagccgtggcgagccggtacagggtgtctacggctttgcaaagtcgctcctgaaagctctgaaagaagacggtgatgtggtgattgttgtctttgatgcgaaagcgccaagttttcgccacgaagcgtacgaagcttacaaagccgggcgtgctccaacgccggaagactttcctcgccaattggcgcttatgaaggaattagtggatttgcttggcctcgaacgcttggaagttcccggtttcgaggcagacgacgtattagcgactctcgcaaagaaagccgaacgtgagggctatgaagtccagatcttgacagcagatcgcgatcttttccagcttttatctccgcgcatttccgtgttacacccggaagggcatcgtatcaccccggaatggctctgggagaaatatggtttgcgtcccgaacaatgggtggattttcgcgccttagcgggcgatccgagcgacaatattccgggagttaaaggtatcggcgagaagacggcgctcaagctccttaaagaatgggggtcgttggagaacttgcttaagaatttagatcaggtcaaaccagcttcagtgcgtgagaagattcttgcacacctcgaagacctcaaattaagccgcgaattgtcccgtgtacgcaccgatttgccgctcgaagttgatttccgtggccgccgcgaacctgactgggagggtcttaaagcgtttttagagcgtcttgaatttggttcgctcttgcatgaattcggccttttagaaagcccgttaccagccgaagaagcaccttggccaccgcccgaaggcgcgtttttaggttaccgtttgagtcgcccggaaccgatgtgggccgaattattggctcttgcagcgtctgcccagggacgtgtgtatcgcgcggaagaccctcatggtgcgctccgtggcctcaaagaagtccgtggactccttgccaaagacttagctgttgttgcattgcgcgaaggtcttgatttacctccgactgatgatccaatgcttcttgcgtacctcttggacccgtcaaacacgacgcccgaaggcgtagcccgtcgttacggcggcgagtggaccgaagatgcaggtgagcgcgcgttattggccgaacgtttgcacgccaatttattaggacgtttgcaaggcgaggaacgtctcctctggctttacgaagaagtggagaaaccattgagtcgcgtgctcgcgcatatggaagctaccggtgtcaaattagacgtggcgtatttggaggcactcagccttgaagttgctgccgaaatgcgccgcttggaggaagaagtattccgtttagcaggccactcctttaaccttaattctcgcgatcagttagaacgtgtgttgttcgatgaacttggtctccctcctatcggcaagacagagaagaccggtaaacgtagcacttcagcggcggttttagaagctcttcgcgaagtccatcccattgtggacaagatcttgcagtaccgcgaactcgcgaaattgaaaggcacctatattgaccctcttccggcattagtccacccgaaaacgggacgcctccatacccgcttcaaccaaacagccacggcgaccggtcgtttgtcctcctctgatccaaaccttcagaatattccagtacgtaccccattgggccagaagatccgcaaagcgtttgtagctgaggagggttggcgtttagtggccctcgattatagccaaattgaattacgtgtccttgcccatctttctggcgatgagaacctcatccgcgtgtttcaggaaggccgcgacattcacactcaaacggcaagctggatgtttggagtgtcatcggaagcgatcgatcctttgatgcgtcgtgcagcgaagaccatcaatttcggtgttctctacggtatgagtgcccatcgtttgtcgcaggaattaggcattccctatgaagaagctgcggcgttcattcagcgctactttcaaagctatcccaaagttaaagcatggatcgagaagactctcgaagaaggccgcacacgtggttacgtagagaccttatttggacgtcgccgctatgttcccgatttaaacgctcgcgtgaaatctgtccgtgaagccgccgaacgcatggcgtttaacatgcctgtacagggcacggcagctgacctcatgaaacttgcaatggtgcgcctttttccacaattgcgtgaagttggtgcccgcatgctcttgcaggtccacgatgaactcttgttagaagcgccaaaagagcgtgcggaagaggtggcagccctcgcgaaagaggttatggaaggcgtgtggcccttagcggtgcctcttgaagtcgaagttggtattggcgaggattggttggctgccaaaggataatga

SEQ ID NO: 594 - protein, 841 aa, synthetic construct
  REGION 1..841: note = Variant of DNA polymerase I from Thermus sp. strain 2.9
MHHHHHHGGSGMLPLFEPKGRVLLVDGHHLAYRNFFALKGLTTSRGEPVQGVYGFAKSLLKALKEDGDVVIVVFDAKAPSFRHEAYEAYKAGRAPTPEDFPRQLALMKELVDLLGLERLEVPGFEADDVLATLAKKAEREGYEVQILTADRDLFQLLSPRISVLHPEGHRITPEWLWEKYGLRPEQWVDFRALAGDPSDNIPGVKGIGEKTALKLLKEWGSLENLLKNLDQVKPASVREKILAHLEDLKLSRELSRVRTDLPLEVDFRGRREPDWEGLKAFLERLEFGSLLHEFGLLESPLPAEEAPWPPPEGAFLGYRLSRPEPMWAELLALAASAQGRVYRAEDPHGALRGLKEVRGLLAKDLAVVALREGLDLPPTDDPMLLAYLLDPSNTTPEGVARRYGGEWTEDAGERALLAERLHANLLGRLQGEERLLWLYEEVEKPLSRVLAHMEATGVKLDVAYLEALSLEVAAEMRRLEEEVFRLAGHSFNLNSRDQLERVLFDELGLPPIGKTEKTGKRSTSAAVLEALREVHPIVDKILQYRELAKLKGTYIDPLPALVHPKTGRLHTRFNQTATATGRLSSSDPNLQNIPVRTPLGQKIRKAFVAEEGWRLVALDYSQIELRVLAHLSGDENLIRVFQEGRDIHTQTASWMFGVSSEAIDPLMRRAAKTINFGVLYGMSAHRLSQELGIPYEEAAAFIQRYFQSYPKVKAWIEKTLEEGRTRGYVETLFGRRRYVPDLNARVKSVREAAERMAFNMPVQGTAADLMKLAMVRLFPQLREVGARMLLQVHDELLLEAPKERAEEVAALAKEVMEGVWPLAVPLEVEVGIGEDWLAAKG

SEQ ID NO: 595 - DNA, 2529 bp, synthetic construct
  misc_feature 1..2529: note = Variant of DNA polymerase I from Thermus sp. strain 2.9
  source 1..2529: mol_type = other DNA
atgcaccatcatcatcatcatggcggtagcggcatgttaccgttgttcgaacctaaaggtcgcgtgcttctggttgatggccatcatctcgcgtatcgtaacttctttgccctgaaaggattaaccaccagccgtggcgagccggtacagggtgtctacggctttgcaaagtcgctcctgaaagctctgaaagaagacggtgatgtggtgattgttgtctttgatgcgaaagcgccaagttttcgccacgaagcgtacgaagcttacaaagccgggcgtgctccaacgccggaagactttcctcgccaattggcgcttatgaaggaattagtggatttgcttggcctcgaacgcttggaagttcccggtttcgaggcagacgacgtattagcgactctcgcaaagaaagccgaacgtgagggctatgaagtccagatcttgacagcagatcgcgatcttttccagcttttatctccgcgcatttccgtgttacacccggaagggcatcgcatcaccccggaatggctctgggagaaatatggtttgcgtcccgaacaatgggtggattttcgcgccttagcaggcgatccgagcgacaatattccgggagttaaaggtatcggcgagaagacggcgctcaagctccttaaagaatgggggtcgttggagaacttgcttaagaatttagatcaggtcaaaccagcttcagtgcgtgagaagattcttgcacacctcgaagacctcaaattaagccgcgaattgtcccgtgtacgcaccgatttgccgctcgaagttgatttccgtggccgccgcgaacctgactgggagggtcttaaagcgtttttagagcgtcttgaatttggttcgctcttgcatgaattcggccttttagaaagcccgttaccagccgaagaagcaccttggccaccgcccgaaggcgcgtttttaggttaccgtttgagtcgcccggaaccgatgtgggccgaattattggctcttgcagcgtctgcccagggacgtgtgtatcgcgcggaagaccctcatggtgcgctccgtggcctcaaagaagtccgtggactccttgccaaagacttagctgttgttgcattgcgcgaaggtcttgatttacctccgactgatgatccaatgcttcttgcgtacctcttggacccgtcaaacacgacgcccgaaggcgtagcccgtcgttacggcggcgagtggaccgaagatgcagccgagcgcgcgttattggccgaacgtttgcacgccaatttattaggacgtttgcaaggcgaggaacgtctcctctggctttacgaagaagtggagaaaccattgagtcgcgtgctcgcgcatatggaagctaccggtgtcaaattagacgtggcgtatttggaggcactcagccttgaagttgctgccgaaatgcgccgcttggaggaagaagtattccgtttagcaggccactcctttaaccttaattctcgcgatcagttagaacgtgtgttgttcgatgaacttggtctccctcctatcggcaagacagagaagaccggtaaacgtagcacttcagcggcggttttagaagctcttcgcgaagtccatcccattgtggacaagatcttgcagtaccgcgaactcgcgaaattgaaaggcacctatattgaccctcttccggcattagtccacccgaaaacgggacgcctccatacccgcttcaaccaaacagccacggcgaccggtcgtttgtcctcctctgatccaaaccttcagaatattccagtacgtaccccattgggccagaagatccgcaaagcgtttgtagctgaggagggttggcgtttagtggccctcgattatagccaaattgaattacgtgtccttgcccatctttctggcgatgagaacctcatccgcgtgtttcaggaaggccgtgacattcacactcaaacggcaagctggatgtttggattatcagctgaagcgatcgatcctttgatgcgtcgtgcagcgaagaccgttaatttcggtgttctctacggtatgagtgcccatcgtttgtcgcaggaattaggcattccctatgaagaagctgcggcgttcattcagcgctactttcaaagctatcccaaagttaaagcatggatcgagaagactctcgaagaaggccgcacacgtggttacgtagagaccttatttggacgtcgccgctatgttcccgatttaaacgctcgcgtgaaatctgtccgtgaagccgccgaacgcatggcgttcaacatgcctgtacagggcacggcagctgacctcatgaaacttgcaatggtgcgcctttttccacaattgcgtgaagttggtgcccgcatgctcttgcaggtccacgatgaactcttgttagaagcgccaaaagagcgtgcggaagaggtggcagccctcgcgaaagaggttatggaaggcgtgtggcccttagcggtgcctcttgaagtcgaagttggtattggcgaggattggttggctgccaaaggataatga

SEQ ID NO: 596 - protein, 841 aa, synthetic construct
  REGION 1..841: note = Variant of DNA polymerase I from Thermus sp. strain 2.9
MHHHHHHGGSGMLPLFEPKGRVLLVDGHHLAYRNFFALKGLTTSRGEPVQGVYGFAKSLLKALKEDGDVVIVVFDAKAPSFRHEAYEAYKAGRAPTPEDFPRQLALMKELVDLLGLERLEVPGFEADDVLATLAKKAEREGYEVQILTADRDLFQLLSPRISVLHPEGHRITPEWLWEKYGLRPEQWVDFRALAGDPSDNIPGVKGIGEKTALKLLKEWGSLENLLKNLDQVKPASVREKILAHLEDLKLSRELSRVRTDLPLEVDFRGRREPDWEGLKAFLERLEFGSLLHEFGLLESPLPAEEAPWPPPEGAFLGYRLSRPEPMWAELLALAASAQGRVYRAEDPHGALRGLKEVRGLLAKDLAVVALREGLDLPPTDDPMLLAYLLDPSNTTPEGVARRYGGEWTEDAAERALLAERLHANLLGRLQGEERLLWLYEEVEKPLSRVLAHMEATGVKLDVAYLEALSLEVAAEMRRLEEEVFRLAGHSFNLNSRDQLERVLFDELGLPPIGKTEKTGKRSTSAAVLEALREVHPIVDKILQYRELAKLKGTYIDPLPALVHPKTGRLHTRFNQTATATGRLSSSDPNLQNIPVRTPLGQKIRKAFVAEEGWRLVALDYSQIELRVLAHLSGDENLIRVFQEGRDIHTQTASWMFGLSAEAIDPLMRRAAKTVNFGVLYGMSAHRLSQELGIPYEEAAAFIQRYFQSYPKVKAWIEKTLEEGRTRGYVETLFGRRRYVPDLNARVKSVREAAERMAFNMPVQGTAADLMKLAMVRLFPQLREVGARMLLQVHDELLLEAPKERAEEVAALAKEVMEGVWPLAVPLEVEVGIGEDWLAAKG

SEQ ID NO: 597 - DNA, 2529 bp, synthetic construct
  misc_feature 1..2529: note = Variant of DNA polymerase I from Thermus sp. strain 2.9
  source 1..2529: mol_type = other DNA
atgcaccatcatcatcatcatggcggtagcggcatgttaccgttgttcgaacctaaaggtcgcgtgcttctggttgatggccatcatctcgcgtatcgtaacttctttgccctgaaaggattaaccaccagccgtggcgagccggtacagggtgtctacggctttgcaaagtcgctcctgaaagctctgaaagaagacggtgatgtggtgattgttgtctttgatgcgaaagcgccaagttttcgccacgaagcgtacgaagcttacaaagccgggcgtgctccaacgccggaagactttcctcgccaattggcgcttatgaaggaattagtggatttgcttggcctcgaacgcttggaagttcccggtttcgaggcagacgacgtattagcgactctcgcaaagaaagccgaacgtgagggctatgaagtccagatcttgacagcagatcgcgatcttttccagcttttatctccgcgcatttccgtgttacacccggaagggcatcgtatcaccccggaatggctctgggagaaatatggtttgcgtcccgaacaatgggtggattttcgcgccttagcgggcgatccgagcgacaatattccgggagttaaaggtatcggcgagaagacggcgctcaagctccttaaagaatgggggtcgttggagaacttgcttaagaatttagatcaggtcaaaccagcttcagtgcgtgagaagattcttgcacacctcgaagacctcaaattaagccgcgaattggtccgtgtacgcaccgatttgccgctcgaagttgatttccgtggccgccgcgaacctgactgggagggtcttaaagcgtttttagagcgtcttgaatttggttcgctcttgcatgaattcggccttttagaaagcccgttaccagccgaagaagcaccttggccaccgcccgaaggcgcgtttttaggttaccgtttgagtcgcccggaaccgatgtgggccgaattattggctcttgcagcgtctgcccagggacgtgtgtatcgcgcggaagaccctcatggtgcgctccgtggcctcaaagaagtccgtggactccttgccaaagacttagctgttgttgcattgcgcgaaggtcttgatttacctccgactgatgatccaatgcttcttgcgtacctcttggactcgtcaaacacgacgcccgaaggcgtagcccgtcgttacggcggcgagtggaccgaagatgcaggtgagcgcgcgttattggccgaacgtttgcacgccaatttattaggacgtttgcaaggcgaggaacgtctcctctggctttacgaagaagtggagaaaccattgagtcgcgtgctcgcgcatatggaagctaccggtgtcaaattagacgtggcgtatttggaggcactcagccttgaagtcgctgccgaaatgcgccgcttggaggaagaagtattccgtttagcaggccactcctttaaccttaattctcgcgatcagttagaacgtgtgttgttcgatgaacttggtctccctcctatcaccaagacagagaagaccggtaaacgtagcacttcagcggcggttttagaagctcttcgcgaagtccatcccattgtggacaagatcttgcagtaccgcgaactcgcgaaattgaaaggcacctatattgaccctcttccggcattagtccacccgaaaacgggacgcctccatacccgcttcaaccaaacagccacggcgaccggtcgtttgtcctcctctgatccaaaccttcagaatattccagtacgtaccccattgggccagcatatccgcaaagcgtttgtagctgaggagggttggcgtttagtggccctcgattatagccaaattgaattacgtgtccttgcccatctttctggcgatgagaacctcatccgcgtgtttcaggaaggccgcgacattcacactcaaacggcaagctggatgtttggagtgtcatcggaagcgatcgatcctttgatgcgtcgtgcagcgaagaccatcaatttcggtgttctctacggtatgagtgcccatcgtttgtcgcaggaattaggcattccctatgaagaagctgcggcgttcattcagcgctactttcaaagctatcccaaagttaaagcatggatcgagaagactctcgaagaaggccgcacacgtggttacgtagagaccttatttggacgtcgccgctatgttcccgatttaaatgctcgcgtgaaatctgtccgtgaagccgccgaacgcatggcgttcaacatgcctgtacagggcacggcagctgacctcatgaaacttgcaatggtgcgcctttttccacaattgcgtgaagttggtgcccgcatgctcttgcaggtccacgatgaactcttgttagaagcgccaaaagagcgtgcggaagaggtggcagccctcgcgaaagaggttatggaaggcgtgtggcccttagcggtgcctcttgaagtcgaagttggtattggcgaggattggttggctgccaaaggataatga

SEQ ID NO: 598 - protein, 841 aa, synthetic construct
  REGION 1..841: note = Variant of DNA polymerase I from Thermus sp. strain 2.9
MHHHHHHGGSGMLPLFEPKGRVLLVDGHHLAYRNFFALKGLTTSRGEPVQGVYGFAKSLLKALKEDGDVVIVVFDAKAPSFRHEAYEAYKAGRAPTPEDFPRQLALMKELVDLLGLERLEVPGFEADDVLATLAKKAEREGYEVQILTADRDLFQLLSPRISVLHPEGHRITPEWLWEKYGLRPEQWVDFRALAGDPSDNIPGVKGIGEKTALKLLKEWGSLENLLKNLDQVKPASVREKILAHLEDLKLSRELVRVRTDLPLEVDFRGRREPDWEGLKAFLERLEFGSLLHEFGLLESPLPAEEAPWPPPEGAFLGYRLSRPEPMWAELLALAASAQGRVYRAEDPHGALRGLKEVRGLLAKDLAVVALREGLDLPPTDDPMLLAYLLDSSNTTPEGVARRYGGEWTEDAGERALLAERLHANLLGRLQGEERLLWLYEEVEKPLSRVLAHMEATGVKLDVAYLEALSLEVAAEMRRLEEEVFRLAGHSFNLNSRDQLERVLFDELGLPPITKTEKTGKRSTSAAVLEALREVHPIVDKILQYRELAKLKGTYIDPLPALVHPKTGRLHTRFNQTATATGRLSSSDPNLQNIPVRTPLGQHIRKAFVAEEGWRLVALDYSQIELRVLAHLSGDENLIRVFQEGRDIHTQTASWMFGVSSEAIDPLMRRAAKTINFGVLYGMSAHRLSQELGIPYEEAAAFIQRYFQSYPKVKAWIEKTLEEGRTRGYVETLFGRRRYVPDLNARVKSVREAAERMAFNMPVQGTAADLMKLAMVRLFPQLREVGARMLLQVHDELLLEAPKERAEEVAALAKEVMEGVWPLAVPLEVEVGIGEDWLAAKG

SEQ ID NO: 599 - DNA, 2529 bp, synthetic construct
  misc_feature 1..2529: note = Variant of DNA polymerase I from Thermus sp. strain 2.9
  source 1..2529: mol_type = other DNA
atgcaccatcatcatcatcatggcggtagcggcatgttaccgttgttcgaacctaaaggtcgcgtgcttctggttgatggccatcatctcgcgtatcgtaacttctttgccctgaaaggattaaccaccagccgtggcgagccggtacagggtgtctacggctttgcaaagtcgctcctgaaagctctgaaagaagacggtgatgtggtgattgttgtctttgatgcgaaagcgccaagttttcgccacgaagcgtacgaagcttacaaagccgggcgtgctccaacgccggaagactttcctcgccaattggcgcttatgaaggaattagtggatttgcttggcctcgaacgcttggaagttcccggtttcgaggcagacgacgtattagcgactctcgcaaagaaagccgaacgtgagggctatgaagtccagatcttgacagcagatcgcgatcttttccagcttttatctccgcgcatttccgtgttacacccggaagggcatcgtatcaccccggaatggctctgggagaaatatggtttgcgtcccgaacaatgggtggattttcgcgccttagcgggcgatccgagcgacaatattccgggagttaaaggtatcggcgagaagacggcgctcaagctccttaaagaatgggggtcgttggagaacttgcttaagaatttagatcaggtcaaaccagcttcagtgcgtgagaagattcttgcacacctcgaagacctcaaattaagcctggaattgtcccgtgtacgcaccgatttgccgctcgaagttgatttccgtggccgccgcgaacctgactgggagggtcttaaagcgtttttagagcgtcttgaatttggttcgctcttgcatgaattcggccttttagaaagcccgttaccagccgaagaagcaccttggccaccgcccgaaggcgcgtttttaggttaccgtttgagtcgcccggaaccgatgtgggccgaattattggctcttgcagcgtctgcccagggacgtgtgtatcgcgcggaagaccctcatggtgcgctccgtggcctcaaagaagtccgtggactccttgccaaagacttagctgttgttgcattgcgcgaaggtcttgatttacctccgactgatgatccaatgcttcttgcgtacctcttggacccgtcaaacacgacgcccgaaggcgtagcccgtcgttacggcggcgagtggaccgaagatgcaggtgagcgcgcgttattggccgaacgtttgcacgccaatttattaggacgtttgcaaggcgaggaacgcctcctctggctttacgaagaagtggagaaaccattgagtcgcgtgctcgcgcatatggaagctaccggtgtcaaattagacgtggcgtatttggaggcactcagccttgaagttgctgccgaaatgcgccgcttggaggaagaagtattccgtttagcaggccactcctttaaccttaattctcgcgatcagttagaacgtgtgttgttcgatgaacttggtctccctcctatcggcaagacagagaagaccggtaaacgtagcacttcagcggcggttttagaagctcttcgcgaagtccatcccattgtggacaagatcttgcagtaccgcgaactcgcgaaattgaaaggcacctatattgaccctcttccggcattagtccacccgaaaacgggacgcctccatacccgcttcaaccaaacagccacggcgaccggtcgtttgtcctcctctgatccaaaccttcagaatattccagtacgtaccccattgggccagaagatccgcaaagcgtttgtagctgaggagggttggcgtttagtggccctcgattatagccaaattgaattacgtgtccttgcccatctttctggcgatgagaacctcatccgcgtgtttcaggaaggcaaagacattcacactcaaacggcaagctggatgtttggattatcagctgaagcgatcgatcctttgatgcgtcgtgcagcgaagaccatcaatttcggtgttctctacggtatgagtgcccatcgtttgtcgcaggaattaggcattccctatgaagaagctgcggcgttcattcagcgctactttcaaagctatcccaaagttaaagcatggatcgagaagactctcgaagaaggccgcacacgtggttacgtagagaccttatttggacgtcgccgctatgttcccgatttaaacgctcgcgtgaaatctgtccgtgaagccgccgaacgcatggcgttcaacatgcctgtacagggcacggcagctgacctcatgaaacttgcaatggtgcgcctttttccacaattgcgtgaagttggtgcccgcatgctcttgcaggtccacgatgaactcttgttagaagcgccaaaagagcgtgcggaagaggtggcagccctcgcgaaagaggttatggaaggcgtgtggcccttagcggtgcctcttgaagtcgaagttggtattggcgaggattggttggctgccaaaggataatga

SEQ ID NO: 600 - protein, 841 aa, synthetic construct
  REGION 1..841: note = Variant of DNA polymerase I from Thermus sp. strain 2.9
MHHHHHHGGSGMLPLFEPKGRVLLVDGHHLAYRNFFALKGLTTSRGEPVQGVYGFAKSLLKALKEDGDVVIVVFDAKAPSFRHEAYEAYKAGRAPTPEDFPRQLALMKELVDLLGLERLEVPGFEADDVLATLAKKAEREGYEVQILTADRDLFQLLSPRISVLHPEGHRITPEWLWEKYGLRPEQWVDFRALAGDPSDNIPGVKGIGEKTALKLLKEWGSLENLLKNLDQVKPASVREKILAHLEDLKLSLELSRVRTDLPLEVDFRGRREPDWEGLKAFLERLEFGSLLHEFGLLESPLPAEEAPWPPPEGAFLGYRLSRPEPMWAELLALAASAQGRVYRAEDPHGALRGLKEVRGLLAKDLAVVALREGLDLPPTDDPMLLAYLLDPSNTTPEGVARRYGGEWTEDAGERALLAERLHANLLGRLQGEERLLWLYEEVEKPLSRVLAHMEATGVKLDVAYLEALSLEVAAEMRRLEEEVFRLAGHSFNLNSRDQLERVLFDELGLPPIGKTEKTGKRSTSAAVLEALREVHPIVDKILQYRELAKLKGTYIDPLPALVHPKTGRLHTRFNQTATATGRLSSSDPNLQNIPVRTPLGQKIRKAFVAEEGWRLVALDYSQIELRVLAHLSGDENLIRVFQEGKDIHTQTASWMFGLSAEAIDPLMRRAAKTINFGVLYGMSAHRLSQELGIPYEEAAAFIQRYFQSYPKVKAWIEKTLEEGRTRGYVETLFGRRRYVPDLNARVKSVREAAERMAFNMPVQGTAADLMKLAMVRLFPQLREVGARMLLQVHDELLLEAPKERAEEVAALAKEVMEGVWPLAVPLEVEVGIGEDWLAAKG

SEQ ID NO: 601 - DNA, 2529 bp, synthetic construct
  misc_feature 1..2529: note = Variant of DNA polymerase I from Thermus sp. strain 2.9
  source 1..2529: mol_type = other DNA
atgcaccatcatcatcatcatggcggtagcggcatgttaccgttgttcgaacctaaaggtcgcgtgcttctggttgatggccatcatctcgcgtatcgtaacttctttgccctgaaaggattaaccaccagccgtggcgagccggtacagggtgtctacggctttgcaaagtcgctcctgaaagctctgaaagaagacggtgatgtggtgattgttgtctttgatgcgaaagcgccaagttttcgccacgaagcgtacgaagcttacaaagccgggcgtgctccaacgccggaagactttcctcgccaattggcgcttatgaaggaattagtggatttgcttggcctcgaacgcttggaagttcccggtttcgaggcagacgacgtattagcgactctcgcaaagaaagccgaacgtgagggctatgaagtccagatcttgacagcagatcgcgatcttttccagcttttatctccgcgcatttccgtgttacacccggaagggcatcgtatcaccccggaatggctctgggagaaatatggtttgcgtcccgaacaatgggtggattttcgcgccttagcgggcgatccgagcgacaatattccgggagttaaaggtatcggcgagaagacggcgctcaagctccttaaagaatgggggtcgttggagaacttgcttaagaatttagatcaggtcaaaccagcttcagtgcgtgagaagattcttgcacacctcgaagacctcaaattaagccgcgaattgtcccgtgtacgcaccgatttgccgctcgaagttgatttccgtggccgccgcgaacctgactgggagggtcttaaagcgtttttagagcgtcttgaatttggttcgctcttgcatgaattcggccttttagaaagcccgttaccagccgaagaagcaccttggccaccgcccgaaggcgcgtttttaggttaccgtttgagtcgcccggaaccgatgtgggccgaattattggctcttgcagcgtctgcccagggacgtgtgtatcgcgcggaagaccctcatggtgcgctccgtggcctcaaagaagtccgtggactccttgccaaagacttagctgttgttgcattgcgcgaaggtcttgatttacctccgactgatgatccaatgcttcttgcgtacctcttggacccgtcaaacacgacgcccgaaggcgtagcccgtcgttacggcggcgagtggaccgaagatgcaggtgagcgcgcgttattggccgaacgtttgcacgccaatttattaggacgtttgcaaggcgaggaacgtctcctctggctttacgaagaagtggagaaaccattgagtcgcgtgctcgcgcatatggaagctaccggtgtcaaattagacgtggcgtatttggaggcactcagccttgaagttgctgccgaaatgcgccgcttggaggaagaagtattccgtttagcaggccactcctttaaccttaattctcgcgatcagttagaacgtgtgttgttcgatgaacttggtctccctcctatcggcaagacagagaagaccggtaaacgtagcacttcagcggcggttttagaagctcttcgcgaagtccatcccattgtggacaagatcttgcagtaccgcgaactcgcgaaattgaaaggcacctatattgaccctcttccggcattagtccacccgaaaacgggacgcctccatacccgcttcaaccaaacagccacggcgaccggtcgtttgtcctcctctgatccaaaccttcagaatattccagtacgtaccccattgggccagaagatccgcaaagcgtttgtagctgaggagggttggcgtttagtggccctcgattatagccaaattgaattacgtgtccttgcccatctttctggcgatgagaacctcatccgcgtgtttcaggaaggccgcgacattcacactcaaacggcaagctggatgtttggattatcagctgaagcgatcgatcctttgatgcgtcgtgcagcgaagaccatcaatttcggtgttctctacggtatgagtgcccatcgtttgtcgcaggaattaggcattccctatgaagaagctgcggcgttcattcagcgctactttcaaagctatcccaaagttcaagcatggatcgagaagactctcgaagaaggccgcacacgtggttacgtagagaccttatttggacgtcgccgctatgttcccgatttaaacgctcgcgtgaaatctgtccgtgaagccgccgaacgcatggcgttcaacatgcctgtacagggcacggcagctgacctcatgaaacttgcaatggtgcgcctttttccacaattgcgtgaagttggtgcccgcatgctcttgcaggtccacgatgaactcttgttagaagcgccaaaagagcgtgcggaagaggtggcagccctcgcgaaagaggttatggaaggcgtgtggcccttagcggtgcctcttgaagtcgaagttggtattggcgaggattggttggctgccaaaggataatga

SEQ ID NO: 602 - protein, 841 aa, synthetic construct
  REGION 1..841: note = Variant of DNA polymerase I from Thermus sp. strain 2.9
MHHHHHHGGSGMLPLFEPKGRVLLVDGHHLAYRNFFALKGLTTSRGEPVQGVYGFAKSLLKALKEDGDVVIVVFDAKAPSFRHEAYEAYKAGRAPTPEDFPRQLALMKELVDLLGLERLEVPGFEADDVLATLAKKAEREGYEVQILTADRDLFQLLSPRISVLHPEGHRITPEWLWEKYGLRPEQWVDFRALAGDPSDNIPGVKGIGEKTALKLLKEWGSLENLLKNLDQVKPASVREKILAHLEDLKLSRELSRVRTDLPLEVDFRGRREPDWEGLKAFLERLEFGSLLHEFGLLESPLPAEEAPWPPPEGAFLGYRLSRPEPMWAELLALAASAQGRVYRAEDPHGALRGLKEVRGLLAKDLAVVALREGLDLPPTDDPMLLAYLLDPSNTTPEGVARRYGGEWTEDAGERALLAERLHANLLGRLQGEERLLWLYEEVEKPLSRVLAHMEATGVKLDVAYLEALSLEVAAEMRRLEEEVFRLAGHSFNLNSRDQLERVLFDELGLPPIGKTEKTGKRSTSAAVLEALREVHPIVDKILQYRELAKLKGTYIDPLPALVHPKTGRLHTRFNQTATATGRLSSSDPNLQNIPVRTPLGQKIRKAFVAEEGWRLVALDYSQIELRVLAHLSGDENLIRVFQEGRDIHTQTASWMFGLSAEAIDPLMRRAAKTINFGVLYGMSAHRLSQELGIPYEEAAAFIQRYFQSYPKVQAWIEKTLEEGRTRGYVETLFGRRRYVPDLNARVKSVREAAERMAFNMPVQGTAADLMKLAMVRLFPQLREVGARMLLQVHDELLLEAPKERAEEVAALAKEVMEGVWPLAVPLEVEVGIGEDWLAAKG

SEQ ID NO: 603 - DNA, 2529 bp, synthetic construct
  misc_feature 1..2529: note = Variant of DNA polymerase I from Thermus sp. strain 2.9
  source 1..2529: mol_type = other DNA
atgcaccatcatcatcatcatggcggtagcggcatgttaccgttgttcgaacctaaaggtcgcgtgcttctggttgatggccatcatctcgcgtatcgtaacttctttgccctgaaaggattaaccaccagccgtggcgagccggtacagggtgtctacggctttgcaaagtcgctcctgaaagctctgaaagaagacggtgatgtggtgattgttgtctttgatgcgaaagcgccaagttttcgccacgaagcgtacgaagcttacaaagccgggcgtgctccaacgccggaagactttcctcgccaattggcgcttatgaaggaattagtggatttgcttggcctcgaacgcttggaagttcccggtttcgaggcagacgacgtattagcgactctcgcaaagaaagccgaacgtgagggctatgaagtccagatcttgacagcagatcgcgatcttttccagcttttatctccgcgcatttccgtgttacacccggaagggcatcgtatcaccccggaatggctctgggagaaatatggtttgcgtcccgaacaatgggtggattttcgcgccttagcgggcgatccgagcgacaatattccgggagttaaaggtatcggcgagaagacggcgctcaagctccttaaagaatgggggtcgttggagaacttgcttaagaatttagatcaggtcaaaccagcttcagtgcgtgagaagattcttgcacacctcgaagacctcaaattaagccgcgaattgtcccgtgtacgcaccgatttgccgctcgaagttgatttccgtggccgccgcgaacctgactgggagggtcttaaagcgtttttagagcgtcttgaatttggttcgctcttgcatgaattcggccttttagaaagcccgttaccagccgaagaagcaccttggccaccgcccgaaggcgcgtttttaggttaccgtttgagtcgcccggaaccgatgtgggccgaattattggctcttgcagcgtctgcccagggacgtgtgtatcgcgcggaagaccctcatggtgcgctccgtggcctcaaagaagtccgtggactccttgccaaagacttagctgttgttgcattgcgcgaaggtcttgatttacctccgactgatgatccaatgcttcttgcgtacctcttggacccgtcaaacacgacgcccgaaggcgtagcccgtcgttacggcggcgagtggaccgaagatgcaggtgagcgcgcgttattggccgaacgtttgcaccagaatttattaggacgtttgcaaggcgaggaacgtctcctctggctttacgaagaagtggagaaaccattgagtcgcgtgctcgcgcatatggaagctaccggtgtcaaattagacgtggcgtatttggaggcactcagccttgaagttgctgccgaaatgcgccgcttggaggaagaagtattccgtttagcaggccactcctttaaccttaattctcgcgatcagttagaacgtgtgttgttcgatgaacttggtctccctcctatcggcaagacagagaagaccggtaaacgtagcacttcagcggcggttttagaagctcttcgcgaagtccatcccattgtggacaagatcttgcagtaccgcgaactcgcgaaattgaaaggcacctatattgaccctcttccggcattagtccacccgaaaacgggacgcctccatacccgcttcaaccaaacagccacggcgaccggtcgtttgtcctcctctgatccaaaccttcagaatattccagtacgtaccccattgggccagaagatccgcaaagcgtttgtagctgaggagggttggcgtttagtggccctcgattatagccaaattgaattacgtgtccttgcccatctttctggcgatgagaacctcatccgcgtgtttcaggaaggccgcgacattcacactcaaacggcaagctggatgtttggattatcagctgaagcgatcgatcctttgatgcgtcgtgcagcgaagaccatcaatttcggtgttctctacggtatgagtgcccatcgtttgtcgcaggaattaggcattccctatgaagaagctgcggcgttcattcagcgctactttcaaagctatcccaaagttaaagcatggatcgagaagactctcgaagaaggccgcacacgtggttacgtagagaccttatttggacgtcgccgctatgttcccgatttaaacgctcgcgtgaaatctgtccgtgaagccgccgaacgcatggcgttcaacatgcctgtacagggcacggcagctgacctcatgaaacttgcaatggtgcgcctttttccacaattgcgtgaagttggtgcccgcatgctcttgcaggtccacgatgaactcttgttagaagcgccaaaagagcgtgcggaagaggtggcagccctcgcgaaagaggttatggaaggcgtgtggcccttagcggtgcctcttgaagtcgaagttggtattggcgaggattggttggctgccaaaggataatga

SEQ ID NO: 604 - protein, 841 aa, synthetic construct
  REGION 1..841: note = Variant of DNA polymerase I from Thermus sp. strain 2.9
MHHHHHHGGSGMLPLFEPKGRVLLVDGHHLAYRNFFALKGLTTSRGEPVQGVYGFAKSLLKALKEDGDVVIVVFDAKAPSFRHEAYEAYKAGRAPTPEDFPRQLALMKELVDLLGLERLEVPGFEADDVLATLAKKAEREGYEVQILTADRDLFQLLSPRISVLHPEGHRITPEWLWEKYGLRPEQWVDFRALAGDPSDNIPGVKGIGEKTALKLLKEWGSLENLLKNLDQVKPASVREKILAHLEDLKLSRELSRVRTDLPLEVDFRGRREPDWEGLKAFLERLEFGSLLHEFGLLESPLPAEEAPWPPPEGAFLGYRLSRPEPMWAELLALAASAQGRVYRAEDPHGALRGLKEVRGLLAKDLAVVALREGLDLPPTDDPMLLAYLLDPSNTTPEGVARRYGGEWTEDAGERALLAERLHQNLLGRLQGEERLLWLYEEVEKPLSRVLAHMEATGVKLDVAYLEALSLEVAAEMRRLEEEVFRLAGHSFNLNSRDQLERVLFDELGLPPIGKTEKTGKRSTSAAVLEALREVHPIVDKILQYRELAKLKGTYIDPLPALVHPKTGRLHTRFNQTATATGRLSSSDPNLQNIPVRTPLGQKIRKAFVAEEGWRLVALDYSQIELRVLAHLSGDENLIRVFQEGRDIHTQTASWMFGLSAEAIDPLMRRAAKTINFGVLYGMSAHRLSQELGIPYEEAAAFIQRYFQSYPKVKAWIEKTLEEGRTRGYVETLFGRRRYVPDLNARVKSVREAAERMAFNMPVQGTAADLMKLAMVRLFPQLREVGARMLLQVHDELLLEAPKERAEEVAALAKEVMEGVWPLAVPLEVEVGIGEDWLAAKG

SEQ ID NO: 605 - DNA, 2529 bp, synthetic construct
  misc_feature 1..2529: note = Variant of DNA polymerase I from Thermus sp. strain 2.9
  source 1..2529: mol_type = other DNA
atgcaccatcatcatcatcatggcggtagcggcatgttaccgttgttcgaacctaaaggtcgcgtgcttctggttgatggccatcatctcgcgtatcgtaacttctttgccctgaaaggattaaccaccagccgtggcgagccggtacagggtgtctacggctttgcaaagtcgctcctgaaagctctgaaagaagacggtgatgtggtgattgttgtctttgatgcgaaagcgccaagttttcgccacgaagcgtacgaagcttacaaagccgggcgtgctccaacgccggaagactttcctcgccaattggcgcttatgaaggaattagtggatttgcttggcctcgaacgcttggaagttcccggtttcgaggcagacgacgtattagcgactctcgcaaagaaagccgaacgtgagggctatgaagtccagatcttgacagcagatcgcgatcttttccagcttttatctccgcgcatttccgtgttacacccggaagggcatctgatcaccccggaatggctctgggagaaatatggtttgcgtcccgaacaatgggtggattttcgcgccttagtaggcgatccgagcgacaatattccgggagttaaaggtatcggcgagaagacggcgctcaagctccttaaagaatgggggtcgttggagaacttgcttaagaatttagatcaggtcaaaccagcttcagtgcgtgagaagattcttgcacacctcgaagacctcaaattaagccgcgaattgtcccgtgtacgcaccgatttgccgctcgaagttgatttccgtcgccgccgcgaacctgactgggagggtcttaaagcgtttttagagcgtcttgaatttggttcgctcttgcatgaattcggccttttagaaagcccgttaccagccgaagaagcaccttggccaccgcccgaaggcgcgtttttaggttacgttttgagtcgcccggaaccgatgtgggccgaattattggctcttgcagcgtctgcccagggacgtgtgtatcgcgcggaagaccctcatggtgcgctccgcggcctcaaagaagtccgtggactccttgccaaagacttagctgttgttgcattgcgcgaaggtcttgatttacctccgactgatgatccaatgcttcttgcgtacctcttggacccgtcaaacacgacgcccgaaggcgtagcccgtcgttacggcggcgagtggaccgaagatgcagccgagcgcgcgttattggccgaacgtttgcaccagaatttattaggacgtttgcaaggcgaggaacgcctcctctggctttacgaagaagtggagaaaccattgagtcgcgtgctcgcgcatatggaagctaccggtgtcaaattagacgtggcgtatttggaggcactcagccttgaagttgctgccgaaattcgccgcttggaggaagaagtattccgtttagcaggccactcctttaaccttaattctcgcgatcagttagaacgtgtgttgttcgatgaacttggtctccctcctatcggcaagacagagaagaccggtaaacgtagcacttcagcggcggttttagaagctcttcgcgaagtccatcccattgtggacaagatcttgcagtaccgcgaactcgcgaaattgaaaggcacctatattgaccctcttccggcattagtccacccgaaaacgggacgcctccatacccgcttcaaccaaacagccacggcgaccggtcgtttgtcctcctctgatccaaaccttcagaatattccagtacgtaccccattgggccagaagatccgccgcgcgtttgtagctgaggagggttggcgtttagtggccctcgattatagccaaattgaattacgtgtccttgcccatctttctggcgatgagaacctcatccgcgtgtttcaggaaggcaaagacattcacactcaaacggcaagctggatgtttggattatcggcggaagcgatcgatcctttgatgcgtcgtgcagcgaagaccatcaatttcggtgttctctacggtatgagtgcccatcgtttgtcgcaggaattaggcattccctatgaagaagctgcggcgttcattcagcgctactttcaaagctatcccaaagttaaagcatggatcgagaagactctcgaagaaggccgcacacgtggttacgtagagaccttatttggacgtcgccgctatgttcccgatttaaacgctcgcgtgaaatctgtccgtgaagccgccgaacgcatggcgttcaacatgcctgtacagggcacggcagctgacctcatgaaacttgcaatggtgcgcctttttccacaattgcgtgaagttggtgcccgcatgctcttgcaggtccacgatgaactcttgttagaagcgccaaaagagcgtgcggaagaggtggcagccctcgcgaaagaggttatggaaggcgtgtggcccttagcggtgcctcttgaagtcgaagttggtattggcgaggattggttggctgccaaaggataatga

SEQ ID NO: 606 - protein, 841 aa, synthetic construct
  REGION 1..841: note = Variant of DNA polymerase I from Thermus sp. strain 2.9
MHHHHHHGGSGMLPLFEPKGRVLLVDGHHLAYRNFFALKGLTTSRGEPVQGVYGFAKSLLKALKEDGDVVIVVFDAKAPSFRHEAYEAYKAGRAPTPEDFPRQLALMKELVDLLGLERLEVPGFEADDVLATLAKKAEREGYEVQILTADRDLFQLLSPRISVLHPEGHLITPEWLWEKYGLRPEQWVDFRALVGDPSDNIPGVKGIGEKTALKLLKEWGSLENLLKNLDQVKPASVREKILAHLEDLKLSRELSRVRTDLPLEVDFRRRREPDWEGLKAFLERLEFGSLLHEFGLLESPLPAEEAPWPPPEGAFLGYVLSRPEPMWAELLALAASAQGRVYRAEDPHGALRGLKEVRGLLAKDLAVVALREGLDLPPTDDPMLLAYLLDPSNTTPEGVARRYGGEWTEDAAERALLAERLHQNLLGRLQGEERLLWLYEEVEKPLSRVLAHMEATGVKLDVAYLEALSLEVAAEIRRLEEEVFRLAGHSFNLNSRDQLERVLFDELGLPPIGKTEKTGKRSTSAAVLEALREVHPIVDKILQYRELAKLKGTYIDPLPALVHPKTGRLHTRFNQTATATGRLSSSDPNLQNIPVRTPLGQKIRRAFVAEEGWRLVALDYSQIELRVLAHLSGDENLIRVFQEGKDIHTQTASWMFGLSAEAIDPLMRRAAKTINFGVLYGMSAHRLSQELGIPYEEAAAFIQRYFQSYPKVKAWIEKTLEEGRTRGYVETLFGRRRYVPDLNARVKSVREAAERMAFNMPVQGTAADLMKLAMVRLFPQLREVGARMLLQVHDELLLEAPKERAEEVAALAKEVMEGVWPLAVPLEVEVGIGEDWLAAKG

SEQ ID NO: 607 - DNA, 2529 bp, synthetic construct
  misc_feature 1..2529: note = Variant of DNA polymerase I from Thermus sp. strain 2.9
  source 1..2529: mol_type = other DNA
atgcaccatcatcatcatcatggcggtagcggcatgttaccgttgttcgaacctaaaggtcgcgtgcttctggttgatggccatcatctcgcgtatcgtaacttctttgccctgaaaggattaaccaccagccgtggcgagccggtacagggtgtctacggctttgcaaagtcgctcctgaaagctctgaaagaagacggtgatgtggtgattgttgtctttgatgcgaaagcgccaagttttcgccacgaagcgtacgaagcttacaaagccgggcgtgctccaacgccggaagactttcctcgccaattggcgcttatgaaggaattagtggatttgcttggcctcgaacgcttggaagttcccggtttcgaggcagacgacgtattagcgactctcgcaaagaaagccgaacgtgagggctatgaagtccagatcttgacagcagatcgcgatcttttccagcttttatctccgcgcatttccgtgttacacccggaagggcatcgtatcaccccggaatggctctgggagaaatatggtttgcgtcccgaacaatgggtggattttcgcgccttagcgggcgatccgagcgacaatattccgggagttaaaggtatcggcgagaagacggcgctcaagctccttaaagaatgggggtcgttggagaacttgcttaagaatttagatcaggtcaaaccagcttcagtgcgtgagaagattcttgcacacctcgaagacctcaaattaagccgcgaattgtcccgtgtacgcaccgatttgccgctcgaagttgattaccgtggccgccgcgaacctgactgggagggtcttaaagcgtttttagagcgtcttgaatttggttcgctcttgcatgaattcggccttttagaaagcccgttaccagccgaagaagcaccttggccaccgcccgaaggcgcgtttttaggttaccgtttgagtcgcccggaaccgatgtgggccgaattattggctcttgcagcgtctgcccagggacgtgtgtatcgcgcggaagaccctcatggtgcgctccgtggcctcaaagaagtccgtggactccttgccaaagacttagctgttgttgcattgcgcgaaggtcttgatttacctccgactgatgatccaatgcttcttgcgtacctcttggacccgtcaaacacgacgcccgaaggcgtagcccgtcgttacggcggcgagtggaccgaagatgcaggtgagcgcgcgttattggccgaacgtttgcacgccaatttattaggacgtttgcaaggcgaggaacgtctcctctggctttacgaagaagtggagaaaccattgagtcgcgtgctcgcgcatatggaagctaccggtgtcaaattagacgtggcgtatttggaggcactcagccttgaagttgctgccgaaatgcgccgcttggaggaagaagtattccgtttagcaggccactcctttaaccttaattctcgcgatcagttagaacgtgtgttgttcgatgaacttggtctccctcctatcggcaagacagagaagaccggtaaacgtagcacttcagcggcggttttagaagctcttcgcgaagtccatcccattgtggacaagatcttgcagtaccgcgaactcgcgaaattgaaaggcacctatattgaccctcttccggcattagtccacccgaaaacgggacgcctccatacccgcttcaaccaaacagccacggcgaccggtcgtttgtcctcctctgatccaaaccttcagaatattccagtacgtaccccattgggccagaagatccgcaaagcgtttgtagctgaggagggttggcgtttagtggccctcgattatagccaaattgaattacgtgtccttgcccatctttctggcgatgagaacctcatccgcgtgtttcaggaaggccgcgacattcacactcaaacggcaagctggatgtttggattatcagctgaagcgatcgatcctttgatgcgtcgtgcagcgaagaccatcaatttcggtgttctctacggtatgagtgcccatcgtttgtcgcaggaattaggcattccctatgaagaagctgcggcgttcattcagcgctactttcaaagctatcccaaagttaaagcatggatcgagaagactctcgaagaaggccgcacacgtggttacgtagagaccttatttggacgtcgccgctatgttcccgatttaaacgctcgcgtgaaatctgtccgtgaagccgccgaacgcatggcgttcaacatgcctgtacagggcacggcagctgacctcatgaaacttgcaatggtgcgcctttttccacaattgcgtgaagttggtgcccgcatgctcttgcaggtccacgatgaactcttgttagaagcgccaaaagagcgtgcggaagaggtggcagccctcgcgaaagaggttatggaaggcgtgtggcccttagcggtgcctcttgaagtcgaagttggtattggcgaggattggttggctgccaaaggataatga

SEQ ID NO: 608 - protein, 841 aa, synthetic construct
  REGION 1..841: note = Variant of DNA polymerase I from Thermus sp. strain 2.9
MHHHHHHGGSGMLPLFEPKGRVLLVDGHHLAYRNFFALKGLTTSRGEPVQGVYGFAKSLLKALKEDGDVVIVVFDAKAPSFRHEAYEAYKAGRAPTPEDFPRQLALMKELVDLLGLERLEVPGFEADDVLATLAKKAEREGYEVQILTADRDLFQLLSPRISVLHPEGHRITPEWLWEKYGLRPEQWVDFRALAGDPSDNIPGVKGIGEKTALKLLKEWGSLENLLKNLDQVKPASVREKILAHLEDLKLSRELSRVRTDLPLEVDYRGRREPDWEGLKAFLERLEFGSLLHEFGLLESPLPAEEAPWPPPEGAFLGYRLSRPEPMWAELLALAASAQGRVYRAEDPHGALRGLKEVRGLLAKDLAVVALREGLDLPPTDDPMLLAYLLDPSNTTPEGVARRYGGEWTEDAGERALLAERLHANLLGRLQGEERLLWLYEEVEKPLSRVLAHMEATGVKLDVAYLEALSLEVAAEMRRLEEEVFRLAGHSFNLNSRDQLERVLFDELGLPPIGKTEKTGKRSTSAAVLEALREVHPIVDKILQYRELAKLKGTYIDPLPALVHPKTGRLHTRFNQTATATGRLSSSDPNLQNIPVRTPLGQKIRKAFVAEEGWRLVALDYSQIELRVLAHLSGDENLIRVFQEGRDIHTQTASWMFGLSAEAIDPLMRRAAKTINFGVLYGMSAHRLSQELGIPYEEAAAFIQRYFQSYPKVKAWIEKTLEEGRTRGYVETLFGRRRYVPDLNARVKSVREAAERMAFNMPVQGTAADLMKLAMVRLFPQLREVGARMLLQVHDELLLEAPKERAEEVAALAKEVMEGVWPLAVPLEVEVGIGEDWLAAKG

SEQ ID NO: 609 - DNA, 2529 bp, synthetic construct
  misc_feature 1..2529: note = Variant of DNA polymerase I from Thermus sp. strain 2.9
  source 1..2529: mol_type = other DNA
atgcaccatcatcatcatcatggcggtagcggcatgttaccgttgttcgaacctaaaggtcgcgtgcttctggttgatggccatcatctcgcgtatcgtaacttctttgccctgaaaggattaaccaccagccgtggcgagccggtacagggtgtctacggctttgcaaagtcgctcctgaaagctctgaaagaagacggtgatgtggtgattgttgtctttgatgcgaaagcgccaagttttcgccacgaagcgtacgaagcttacaaagccgggcgtgctccaacgccggaagactttcctcgccaattggcgcttatgaaggaattagtggatttgcttggcctcgaacgcttggaagttcccggtttcgaggcagacgacgtattagcgactctcgcaaagaaagccgaacgtgagggctatgaagtccagatcttgacagcagatcgcgatcttttccagcttttatctccgcgcatttccgtgttacacccggaagggcatcgtatcaccccggaatggctctgggagaaatatggtttgcgtcccgaacaatgggtggattttcgcgccttagcgggcgatccgagcgacaatattccgggagttaaaggtatcggcgagaagacggcgctcaagctccttaaagaatgggggtcgttggagaacttgcttaagaatttagatcaggtcaaaccagcttcagtgcgtgagaagattcttgcacacctcgaagacctcaaattaagccgcgaattgtcccgtgtacgcaccgatttgccgctcgaagttgatttccgtggccgccgcgaacctgactgggagggtcttaaagcgtttttagagcgtcttgaatttggttcgctcttgcatgaattcggccttttagaaagcccgttaccagccgaagaagcaccttggccaccgcccgaaggcgcgtttttaggttaccgtttgagtcgcccggaaccgatgtgggccgaattattggctcttgcagcgtctgcccagggacgtgtgtatcgcgcggaagaccctcatggtgcgctccgcggcctcaaagaagtccgtggactccttgccaaagacttagctgttgttgcattgcgcgaaggtcttgatttacctccgactgatgatccaatgcttcttgcgtacctcttggacccgtcaaacacgacgcccgaaggcgtagcccgtcgttacggcggcgagtggaccgaagatgcaggcgagcgcgcgttattggccgaacgtttgcaccagaatttattaggacgtttgcaaggcgaggaacgcctcctctggctttacgaagaagtggagaaaccattgagtcgcgtgctcgcgcatatggaagctaccggtgtcaaattagacgtggcgtatttggaggcactcagccttgaagttgctgccgaaattcgccgcttggaggaagaagtattccgtttagcaggccactcctttaaccttaattctcgcgatcagttagaacgtgtgttgttcgatgaacttggtctccctcctatcggcaagacagagaagaccggtaaacgtagcacttcagcggcggttttagaagctcttcgcgaagtccatcccattgtggacaagatcttgcagtaccgcgaactcgcgaaattgaaaggcacctatattgaccctcttccggcattagtccacccgaaaacgggacgcctccatacccgcttcaaccaaacagccacggcgaccggtcgtttgtcctcctctgatccaaaccttcagaatattccagtacgtaccccattgggccagaagatccgccgcgcgtttgtagctgaggagggttggcgtttagtggccctcgattatagccaaattgaattacgtgtccttgcccatctttctggcgatgagaacctcatccgcgtgtttcaggaaggccgtgacattcacactcaaacggcaagctggatgtttggattatcagctgaagcgatcgatcctttgatgcgtcgtgcagcgaagaccattaatttcggtgttctctacggtatgagtgcccatcgtttgtcgcaggaattaggcattccctatgaagaagctgcggcgttcattcagcgctactttcaaagctatcccaaagttaaagcatggatcgagaagactctcgaagaaggccgcacacgtggttacgtagagaccttatttggacgtcgccgctatgttcccgatttaaacgctcgcgtgaaatctgtccgtgaagccgccgaacgcatggcgttcaacatgcctgtacagggcacggcagctgacctcatgaaacttgcaatggtgcgcctttttccacaattgcgtgaagttggtgcccgcatgctcttgcaggtccacgatgaactcttgttagaagcgccaaaagagcgtgcggaagaggtggcagccctcgcgaaagaggttatggaaggcgtgtggcccttagcggtgcctcttgaagtcgaagttggtattggcgaggattggttggctgccaaaggataatga

SEQ ID NO: 610 - protein, 841 aa, synthetic construct
  REGION 1..841: note = Variant of DNA polymerase I from Thermus sp. strain 2.9
MHHHHHHGGSGMLPLFEPKGRVLLVDGHHLAYRNFFALKGLTTSRGEPVQGVYGFAKSLLKALKEDGDVVIVVFDAKAPSFRHEAYEAYKAGRAPTPEDFPRQLALMKELVDLLGLERLEVPGFEADDVLATLAKKAEREGYEVQILTADRDLFQLLSPRISVLHPEGHRITPEWLWEKYGLRPEQWVDFRALAGDPSDNIPGVKGIGEKTALKLLKEWGSLENLLKNLDQVKPASVREKILAHLEDLKLSRELSRVRTDLPLEVDFRGRREPDWEGLKAFLERLEFGSLLHEFGLLESPLPAEEAPWPPPEGAFLGYRLSRPEPMWAELLALAASAQGRVYRAEDPHGALRGLKEVRGLLAKDLAVVALREGLDLPPTDDPMLLAYLLDPSNTTPEGVARRYGGEWTEDAGERALLAERLHQNLLGRLQGEERLLWLYEEVEKPLSRVLAHMEATGVKLDVAYLEALSLEVAAEIRRLEEEVFRLAGHSFNLNSRDQLERVLFDELGLPPIGKTEKTGKRSTSAAVLEALREVHPIVDKILQYRELAKLKGTYIDPLPALVHPKTGRLHTRFNQTATATGRLSSSDPNLQNIPVRTPLGQKIRRAFVAEEGWRLVALDYSQIELRVLAHLSGDENLIRVFQEGRDIHTQTASWMFGLSAEAIDPLMRRAAKTINFGVLYGMSAHRLSQELGIPYEEAAAFIQRYFQSYPKVKAWIEKTLEEGRTRGYVETLFGRRRYVPDLNARVKSVREAAERMAFNMPVQGTAADLMKLAMVRLFPQLREVGARMLLQVHDELLLEAPKERAEEVAALAKEVMEGVWPLAVPLEVEVGIGEDWLAAKG

SEQ ID NO: 611 - DNA, 2529 bp, synthetic construct
  misc_feature 1..2529: note = Variant of DNA polymerase I from Thermus sp. strain 2.9
  source 1..2529: mol_type = other DNA
atgcaccatcatcatcatcatggcggtagcggcatgttaccgttgttcgaacctaaaggtcgcgtgcttctggttgatggccatcatctcgcgtatcgtaacttctttgccctgaaaggattaaccaccagccgtggcgagccggtacagggtgtctacggctttgcaaagtcgctcctgaaagctctgaaagaagacggtgatgtggtgattgttgtctttgatgcgaaagcgccaagttttcgccacgaagcgtacgaagcttacaaagccgggcgtgctccaacgccggaagactttcctcgccaattggcgcttatgaaggaattagtggatttgcttggcctcgaacgcttggaagttcccggtttcgaggcagacgacgtattagcgactctcgcaaagaaagccgaacgtgagggctatgaagtccagatcttgacagcagatcgcgatcttttccagcttttatctccgcgcatttccgtgttacacccggaagggcatcgtatcaccccggaatggctctgggagaaatatggtttgcgtcccgaacaatgggtggattttcgcgccttagcaggcgatccgagcgacaatattccgggagttaaaggtatcggcgagaagacggcgctcaagctccttaaagaatgggggtcgttggagaacttgcttaagaatttagatcaggtcaaaccagcttcagtgcgtgagaagattcttgcacacctcgaagacctcaaattaagccgcgaattgtcccgtgtacgcaccgatttgccgctcgaagttgatttccgtggccgccgcgaacctgactgggagggtcttaaagcgtttttagagcgtcttgaatttggttcgctcttgcatgaattcggccttttagaaagcccgttaccagccgaagaagcaccttggccaccgcccgaaggcgcgtttttaggttaccgtttgagtcgcccggaaccgatgtgggccgaattattggctcttgcagcgtctgcccagggacgtgtgtatcgcgcggaagaccctcatggtgcgctcaaaggcctcaaagaagtccgtggactccttgccaaagacttagctgttgttgcattgcgcgaaggtcttgatttacctccgactgatgatccaatgcttcttgcgtacctcttggacccgtcaaacacgacgcccgaaggcgtagcccgtcgttacggcggcgagtggaccgaagatgcaggtgagcgcgcgttattggccgaacgtttgcacgccaatttattaggacgtttgcaaggcgaggaacgtctcctctggctttacgaagaagtggagaaaccattgagtcgcgtgctcgcgcatatggaagctaccggtgtcaaattagacgtggcgtatttggaggcactcagccttgaagttgctgccgaaatgcgccgcttggaggaagaagtattccgtttagcaggccactcctttaaccttaattctcgcgatcagttagaacgtgtgttgttcgatgaacttggtctccctcctatcggcaagacagagaagaccggtaaacgtagcacttcagcggcggttttagaagctcttcgcgaagtccatcccattgtggacaagatcttgcagtaccgcgaactcgcgaaattgaaaggcacctatattgaccctcttccggcattagtccacccgaaaacgggacgcctccatacccgcttcaaccaaacagccacggcgaccggtcgtttgtcctcctctgatccaaaccttcagaatattccagtacgtaccccattgggccagaagatccgcaaagcgtttgtagctgaggagggttggcgtttagtggccctcgattatagccaaattgaattacgtgtccttgcccatctttctggcgatgagaacctcatccgcgtgtttcaggaaggcaaagacattcacactcaaacggcaagctggatgtttggattatcagctgaagcgatcgatcctttgatgcgtcgtgcagcgaagaccatcaatttcggtgttctctacggtatgagtgcccatcgtttgtcgcaggaattaggcattccctatgaagaagctgcggcgttcattcagcgctactttcaaagctatcccaaagttaaagcatggatcgagaagactctcgaagaaggccgcacacgtggttacgtagagaccttatttggacgtcgccgctatgttcccgatttaaacgctcgcgtgaaatctgtccgtgaagccgccgaacgcatggcgttcaacatgcctgtacagggcacggcagctgacctcatgaaacttgcaatggtgcgcctttttccacaattgcgtgaagttggtgcccgcatgctcttgcaggtccacgatgaactcttgttagaagcgccaaaagagcgtgcggaagaggtggcagccctcgcgaaagaggttatggaaggcgtgtggcccttagcggtgcctcttgaagtcgaagttggtattggcgaggattggttggctgccaaaggataatga

SEQ ID NO: 612 - protein, 841 aa, synthetic construct
  REGION 1..841: note = Variant of DNA polymerase I from Thermus sp. strain 2.9
MHHHHHHGGSGMLPLFEPKGRVLLVDGHHLAYRNFFALKGLTTSRGEPVQGVYGFAKSLLKALKEDGDVVIVVFDAKAPSFRHEAYEAYKAGRAPTPEDFPRQLALMKELVDLLGLERLEVPGFEADDVLATLAKKAEREGYEVQILTADRDLFQLLSPRISVLHPEGHRITPEWLWEKYGLRPEQWVDFRALAGDPSDNIPGVKGIGEKTALKLLKEWGSLENLLKNLDQVKPASVREKILAHLEDLKLSRELSRVRTDLPLEVDFRGRREPDWEGLKAFLERLEFGSLLHEFGLLESPLPAEEAPWPPPEGAFLGYRLSRPEPMWAELLALAASAQGRVYRAEDPHGALKGLKEVRGLLAKDLAVVALREGLDLPPTDDPMLLAYLLDPSNTTPEGVARRYGGEWTEDAGERALLAERLHANLLGRLQGEERLLWLYEEVEKPLSRVLAHMEATGVKLDVAYLEALSLEVAAEMRRLEEEVFRLAGHSFNLNSRDQLERVLFDELGLPPIGKTEKTGKRSTSAAVLEALREVHPIVDKILQYRELAKLKGTYIDPLPALVHPKTGRLHTRFNQTATATGRLSSSDPNLQNIPVRTPLGQKIRKAFVAEEGWRLVALDYSQIELRVLAHLSGDENLIRVFQEGKDIHTQTASWMFGLSAEAIDPLMRRAAKTINFGVLYGMSAHRLSQELGIPYEEAAAFIQRYFQSYPKVKAWIEKTLEEGRTRGYVETLFGRRRYVPDLNARVKSVREAAERMAFNMPVQGTAADLMKLAMVRLFPQLREVGARMLLQVHDELLLEAPKERAEEVAALAKEVMEGVWPLAVPLEVEVGIGEDWLAAKG

SEQ ID NO: 613 - DNA, 2529 bp, synthetic construct
  misc_feature 1..2529: note = Variant of DNA polymerase I from Thermus sp. strain 2.9
  source 1..2529: mol_type = other DNA
atgcaccatcatcatcatcatggcggtagcggcatgttaccgttgttcgaacctaaaggtcgcgtgcttctggttgatggccatcatctcgcgtatcgtaacttctttgccctgaaaggattaaccaccagccgtggcgagccggtacagggtgtctacggctttgcaaagtcgctcctgaaagctctgaaagaagacggtgatgtggtgattgttgtctttgatgcgaaagcgccaagttttcgccacgaagcgtacgaagcttacaaagccgggcgtgctccaacgccggaagactttcctcgccaattggcgcttatgaaggaattagtggatttgcttggcctcgaacgcttggaagttcccggtttcgaggcagacgacgtattagcgactctcgcaaagaaagccgaacgtgagggctatgaagtccagatcttgacagcagatcgcgatcttttccagcttttatctccgcgcatctcggtgttacacccggaagggcatcgcatcaccccggaatggctctgggagaaatatggtttgcgtcccgaacaatgggtggattttcgcgccttagtaggcgatccgagcgacaatattccgggagttaaaggtatcggcgagaagacggcgctcaagctccttaaagaatgggggtcgttggagaacttgcttaagaatttagatcaggtcaaaccagcgtcagtgcgtgagaagattcttgcacacctcgaagacctcaaattaagcctggaattgtcccgtgtacgcaccgatttgccgctcgaagttgatttccgtggccgccgcgaacctgactgggagggtcttaaagcgtttttagagcgtcttgaatttggttcgctcttgcatgaattcggccttttagaaagcccgttaccagccgaagaagcaccttggccaccgcccgaaggcgcgtttttaggttacgttttgagtcgcccggaaccgatgtgggccgaattattggctcttgcagcgtctgcccagggacgtgtgtatcgcgcggaagaccctcatggtgcgctccgcggcctcaaagaagtccgtggactccttgccaaagacttagctgttgttgcattgcgcgaaggtcttgatttacctccgactgatgatccaatgcttcttgcgtacctcttggacccgtcaaacacgacgcccgaaggcgtagcccgtcgttacggcggcgagtggaccgaagatgcagccgagcgcgcgttattggccgaacgtttgcacgccaatttattaggacgtttgcaaggcgaggaacgtctcctctggctttacgaagaagtggagaaaccattgagtcgcgtgctcgcgcatatggaagctaccggtgtcaaattagacgtggcgtatttggaggcactcagccttgaagttgctgccgaaatgcgccgcttggaggaagaagtattccgtttagcaggccactcctttaaccttaattctcgcgatcagttagaacgtgtgttgttcgatgaacttggtctccctcctatcggcaagacagagaagaccggtaaacgtagcacttcagcggcggttttagaagctcttcgcgaagtccatcccattgtggacaagatcttgcagtaccgcgaactcgcgaaattgaaaggcacctatattgaccctcttccggcattagtccacccgaaaacgggacgcctccatacccgcttcaaccaaacagccacggcgaccggtcgtttgtcctcctctgatccaaaccttcagaatattccagtacgtaccccattgggccagaagatccgccgcgcgtttgtagctgaggagggttggcgtttagtggccctcgattatagccaaattgaattacgtgtccttgcccatctttctggcgatgagaacctcatccgcgtgtttcaggaaggccgcgacattcacactcaaacggcaagctggatgtttggattatcagctgaagcgatcgatcctttgatgcgtcgtgcagcgaagaccatcaatttcggtgttctctacggtatgagtgcccatcgtttgtcgcaggaattaggcattccctatgaagaagctgcggcgttcattcagcgctactttcaaagctatcccaaagttaaagcatggatcgagaagactctcgaagaaggccgcacacgtggttacgtagagaccttatttggacgtcgccgctatgttcccgatttaaacgctcgcgtgaaatctgtccgtgaagccgccgaacgcatggcgttcaacatgcctgtacagggcacggcagctgacctcatgaaacttgcaatggtgcgcctttttccacaattgcgtgaagttggtgcccgcatgctcttgcaggtccacgatgaactcttgttagaagcgccaaaagagcgtgcggaagaggtggcagccctcgcgaaagaggttatggaaggcgtgtggcccttagcggtgcctcttgaagtcgaagttggtattggcgaggattggttggctgccaaaggataatga

SEQ ID NO: 614 - protein, 841 aa, synthetic construct
  REGION 1..841: note = Variant of DNA polymerase I from Thermus sp. strain 2.9
MHHHHHHGGSGMLPLFEPKGRVLLVDGHHLAYRNFFALKGLTTSRGEPVQGVYGFAKSLLKALKEDGDVVIVVFDAKAPSFRHEAYEAYKAGRAPTPEDFPRQLALMKELVDLLGLERLEVPGFEADDVLATLAKKAEREGYEVQILTADRDLFQLLSPRISVLHPEGHRITPEWLWEKYGLRPEQWVDFRALVGDPSDNIPGVKGIGEKTALKLLKEWGSLENLLKNLDQVKPASVREKILAHLEDLKLSLELSRVRTDLPLEVDFRGRREPDWEGLKAFLERLEFGSLLHEFGLLESPLPAEEAPWPPPEGAFLGYVLSRPEPMWAELLALAASAQGRVYRAEDPHGALRGLKEVRGLLAKDLAVVALREGLDLPPTDDPMLLAYLLDPSNTTPEGVARRYGGEWTEDAAERALLAERLHANLLGRLQGEERLLWLYEEVEKPLSRVLAHMEATGVKLDVAYLEALSLEVAAEMRRLEEEVFRLAGHSFNLNSRDQLERVLFDELGLPPIGKTEKTGKRSTSAAVLEALREVHPIVDKILQYRELAKLKGTYIDPLPALVHPKTGRLHTRFNQTATATGRLSSSDPNLQNIPVRTPLGQKIRRAFVAEEGWRLVALDYSQIELRVLAHLSGDENLIRVFQEGRDIHTQTASWMFGLSAEAIDPLMRRAAKTINFGVLYGMSAHRLSQELGIPYEEAAAFIQRYFQSYPKVKAWIEKTLEEGRTRGYVETLFGRRRYVPDLNARVKSVREAAERMAFNMPVQGTAADLMKLAMVRLFPQLREVGARMLLQVHDELLLEAPKERAEEVAALAKEVMEGVWPLAVPLEVEVGIGEDWLAAKG

SEQ ID NO: 615 - DNA, 2529 bp, synthetic construct
  misc_feature 1..2529: note = Variant of DNA polymerase I from Thermus sp. strain 2.9
  source 1..2529: mol_type = other DNA
atgcaccatcatcatcatcatggcggtagcggcatgttaccgttgttcgaacctaaaggtcgcgtgcttctggttgatggccatcatctcgcgtatcgtaacttctttgccctgaaaggattaaccaccagccgtggcgagccggtacagggtgtctacggctttgcaaagtcgctcctgaaagctctgaaagaagacggtgatgtggtgattgttgtctttgatgcgaaagcgccaagttttcgccacgaagcgtacgaagcttacaaagccgggcgtgctccaacgccggaagactttcctcgccaattggcgcttatgaaggaattagtggatttgcttggcctcgaacgcttggaagttcccggtttcgaggcagacgacgtattagcgactctcgcaaagaaagccgaacgtgagggctatgaagtccagatcttgacagcagatcgcgatcttttccagcttttatctccgcgcatctcggtgttacacccggaagggcatctgatcaccccggaatggctctgggagaaatatggtttgcgtcccgaacaatgggtggattttcgcgccttagcgggcgatccgagcgacaatattccgggagttaaaggtatcggcgagaagacggcgctcaagctccttaaagaatgggggtcgttggagaacttgcttaagaatttagatcaggtcaaaccagcgtcagtgcgtgagaagattcttgcacacctcgaagacctccgtttaagcctggaattgtcccgtgtacgcaccgatttgccgctcgaagttgatttccgtcgccgccgcgaacctgactgggagggtcttaaagcgtttttagagcgtcttgaatttggttcgctcttgcatgaattcggccttttagaaagcccgttaccagccgaagaagcaccttggccaccgcccgaaggcgcgtttttaggttaccgtttgagtcgcccggaaccgatgtgggccgaattattggctcttgcagcgtctgcccagggacgtgtgtatcgcgcggaagaccctcatggtgcgctcaaaggcctcaaagaagtccgtggactccttgccaaagacttagctgttgttgcattgcgcgaaggtcttgatttacctccgactgatgatccaatgcttcttgcgtacctcttggacccgtcaaacacgacgcccgaaggcgtagcccgtcgttacggcggcgagtggaccgaagatgcagccgagcgcgcgttattggccgaacgtttgcaccagaatttattaggacgtttgcaaggcgaggaaaagctcctctggctttacgaagaagtggagaaaccattgagtcgcgtgctcgcgcatatggaagctaccggtgtcaaattagacgtggcgtatttggaggcactcagccttgaagttgctgccgaaattcgccgcttggaggaagaagtattccgtttagcaggccactcctttaaccttaattctcgcgatcagttagaacgtgtgttgttcgatgaacttggtctccctcctatcggcaagacagagaagaccggtaaacgtagcacttcagcggcggttttagaagctcttcgcgaagtccatcccattgtggacaagatcttgcagtaccgcgaactcgcgaaattgaaaggcacctatattgaccctcttccggcattagtccacccgaaaacgggacgcctccatacccgcttcaaccaaacagccacggcgaccggtcgtttgtcctcctctgatccaaaccttcagaatattccagtacgtaccccattgggccagaagatccgcaaagcgtttgtagctgaggagggttggcgtttagtggccctcgattatagccaaattgaattacgtgtccttgcccatctttctggcgatgagaacctcatccgcgtgtttcaggaaggccgtgacattcacactcaaacggcaagctggatgtttggattaccggcggaagcgatcgatcctttgatgcgtcgtgcagcgaagaccattaatttcggtgttctctacggtatgagtgcccatcgtttgtcgcaggaattaggcattccctatgaagaagctgcggcgttcattcagcgctactttcaaagctatcccaaagttaaagcatggatcgagaagactctcgaagaaggccgcacacgtggttacgtagagaccttatttggacgtcgccgctatgttcccgatttaaacgctcgcgtgaaatctgtccgtgaagccgccgaacgcatggcgttcaacatgcctgtacagggcacggcagctgacctcatgaaacttgcaatggtgcgcctttttccacaattgcgtgaagttggtgcccgcatgctcttgcaggtccacgatgaactcttgttagaagcgccaaaagagcgtgcggaagaggtggcagccctcgcgaaagaggttatggaaggcgtgtggcccttagcggtgcctcttgaagtcgaagttggtattggcgaggattggttggctgccaaaggataatga

SEQ ID NO: 616 - protein, 841 aa, synthetic construct
  REGION 1..841: note = Variant of DNA polymerase I from Thermus sp. strain 2.9
MHHHHHHGGSGMLPLFEPKGRVLLVDGHHLAYRNFFALKGLTTSRGEPVQGVYGFAKSLLKALKEDGDVVIVVFDAKAPSFRHEAYEAYKAGRAPTPEDFPRQLALMKELVDLLGLERLEVPGFEADDVLATLAKKAEREGYEVQILTADRDLFQLLSPRISVLHPEGHLITPEWLWEKYGLRPEQWVDFRALAGDPSDNIPGVKGIGEKTALKLLKEWGSLENLLKNLDQVKPASVREKILAHLEDLRLSLELSRVRTDLPLEVDFRRRREPDWEGLKAFLERLEFGSLLHEFGLLESPLPAEEAPWPPPEGAFLGYRLSRPEPMWAELLALAASAQGRVYRAEDPHGALKGLKEVRGLLAKDLAVVALREGLDLPPTDDPMLLAYLLDPSNTTPEGVARRYGGEWTEDAAERALLAERLHQNLLGRLQGEEKLLWLYEEVEKPLSRVLAHMEATGVKLDVAYLEALSLEVAAEIRRLEEEVFRLAGHSFNLNSRDQLERVLFDELGLPPIGKTEKTGKRSTSAAVLEALREVHPIVDKILQYRELAKLKGTYIDPLPALVHPKTGRLHTRFNQTATATGRLSSSDPNLQNIPVRTPLGQKIRKAFVAEEGWRLVALDYSQIELRVLAHLSGDENLIRVFQEGRDIHTQTASWMFGLPAEAIDPLMRRAAKTINFGVLYGMSAHRLSQELGIPYEEAAAFIQRYFQSYPKVKAWIEKTLEEGRTRGYVETLFGRRRYVPDLNARVKSVREAAERMAFNMPVQGTAADLMKLAMVRLFPQLREVGARMLLQVHDELLLEAPKERAEEVAALAKEVMEGVWPLAVPLEVEVGIGEDWLAAKG

SEQ ID NO: 617 - DNA, 2529 bp, synthetic construct
  misc_feature 1..2529: note = Variant of DNA polymerase I from Thermus sp. strain 2.9
  source 1..2529: mol_type = other DNA
atgcaccatcatcatcatcatggcggtagcggcatgttaccgttgttcgaacctaaaggtcgcgtgcttctggttgatggccatcatctcgcgtatcgtaacttctttgccctgaaaggattaaccaccagccgtggcgagccggtacagggtgtctacggctttgcaaagtcgctcctgaaagctctgaaagaagacggtgatgtggtgattgttgtctttgatgcgaaagcgccaagttttcgccacgaagcgtacgaagcttacaaagccgggcgtgctccaacgccggaagactttcctcgccaattggcgcttatgaaggaattagtggatttgcttggcctcgaacgcttggaagttcccggtttcgaggcagacgacgtattagcgactctcgcaaagaaagccgaacgtgagggctatgaagtccagatcttgacagcagatcgcgatcttttccagcttttatctccgcgcatcgcggtgttacacccggaagggcatctgatcaccccggaatggctctgggagaaatatggtttgcgtcccgaacaatgggtggattttcgcgccttagcaggcgatccgagcgacaatattccgggagttaaaggtatcggcgagaagacggcgctcaagctccttaaagaatgggggtcgttggagaacttgcttaagaatttagatcaggtcaaaccagcttcagtgcgtgagaagattcttgcacacctcgaagacctcaaattaagccgcgaattgtcccgtgtacgcaccgatttgccgctcgaagttgatttccgtggccgccgcgaacctgactgggagggtcttaaagcgtttttagagcgtcttgaatttggttcgctcttgcatgaattcggccttttagaaagcccgttaccagccgaagaagcaccttggccaccgcccgaaggcgcgtttttaggttaccgtttgagtcgcccggaaccgatgtgggccgaattattggctcttgcagcgtctgcccagggacgtgtgtatcgcgcggaagaccctcatggtgcgctccgtggcctcaaagaagtccgtggactccttgccaaagacttagctgttgttgcattgcgcgaaggtcttgatttacctccgactgatgatccaatgcttcttgcgtacctcttggacccgtcaaacacgacgcccgaaggcgtagcccgtcgttacggcggcgagtggaccgaagatgcagccgagcgcgcgttattggccgaacgtttgcacgccaatttattaggacgtttgcaaggcgaggaaaagctcctctggctttacgaagaagtggagaaaccattgagtcgcgtgctcgcgcatatggaagctaccggtgtcaaattagacgtggcgtatttggaggcactcagccttgaagttgctgccgaaattcgccgcttggaggaagaagtattccgtttagcaggccactcctttaaccttaattctcgcgatcagttagaacgtgtgttgttcgatgaacttggtctccctcctatcggcaagacagagaagaccggtaaacgtagcacttcagcggcggttttagaagctcttcgcgaagtccatcccattgtggacaagatcttgcagtaccgcgaactcgcgaaattgaaaggcacctatattgaccctcttccggcattagtccacccgaaaacgggacgcctccatacccgcttcaaccaaacagccacggcgaccggtcgtttgtcctcctctgatccaaaccttcagaatattccagtacgtaccccattgggccagaagatccgccgcgcgtttgtagctgaggagggttggcgtttagtggccctcgattatagccaaattgaattacgtgtccttgcccatctttctggcgatgagaacctcatccgcgtgtttcaggaaggccgtgacattcacactcaaacggcaagctggatgtttggattatcagctgaagcgatcgatcctttgatgcgtcgtgcagcgaagaccattaatttcggtgttctctacggtatgagtgcccatcgtttgtcgcaggaattaggcattccctatgaagaagctgcggcgttcattcagcgctactttcaaagctatcccaaagttaaagcatggatcgagaagactctcgaagaaggccgcacacgtggttacgtagagaccttatttggacgtcgccgctatgttcccgatttaaacgctcgcgtgaaatctgtccgtgaagccgccgaacgcatggcgttcaacatgcctgtacagggcacggcagctgacctcatgaaacttgcaatggtgcgcctttttccacaattgcgtgaagttggtgcccgcatgctcttgcaggtccacgatgaactcttgttagaagcgccaaaagagcgtgcggaagaggtggcagccctcgcgaaagaggttatggaaggcgtgtggcccttagcggtgcctcttgaagtcgaagttggtattggcgaggattggttggctgccaaaggataatga

SEQ ID NO: 618 - protein, 841 aa, synthetic construct
  REGION 1..841: note = Variant of DNA polymerase I from Thermus sp. strain 2.9
MHHHHHHGGSGMLPLFEPKGRVLLVDGHHLAYRNFFALKGLTTSRGEPVQGVYGFAKSLLKALKEDGDVVIVVFDAKAPSFRHEAYEAYKAGRAPTPEDFPRQLALMKELVDLLGLERLEVPGFEADDVLATLAKKAEREGYEVQILTADRDLFQLLSPRIAVLHPEGHLITPEWLWEKYGLRPEQWVDFRALAGDPSDNIPGVKGIGEKTALKLLKEWGSLENLLKNLDQVKPASVREKILAHLEDLKLSRELSRVRTDLPLEVDFRGRREPDWEGLKAFLERLEFGSLLHEFGLLESPLPAEEAPWPPPEGAFLGYRLSRPEPMWAELLALAASAQGRVYRAEDPHGALRGLKEVRGLLAKDLAVVALREGLDLPPTDDPMLLAYLLDPSNTTPEGVARRYGGEWTEDAAERALLAERLHANLLGRLQGEEKLLWLYEEVEKPLSRVLAHMEATGVKLDVAYLEALSLEVAAEIRRLEEEVFRLAGHSFNLNSRDQLERVLFDELGLPPIGKTEKTGKRSTSAAVLEALREVHPIVDKILQYRELAKLKGTYIDPLPALVHPKTGRLHTRFNQTATATGRLSSSDPNLQNIPVRTPLGQKIRRAFVAEEGWRLVALDYSQIELRVLAHLSGDENLIRVFQEGRDIHTQTASWMFGLSAEAIDPLMRRAAKTINFGVLYGMSAHRLSQELGIPYEEAAAFIQRYFQSYPKVKAWIEKTLEEGRTRGYVETLFGRRRYVPDLNARVKSVREAAERMAFNMPVQGTAADLMKLAMVRLFPQLREVGARMLLQVHDELLLEAPKERAEEVAALAKEVMEGVWPLAVPLEVEVGIGEDWLAAKG

SEQ ID NO: 619 - DNA, 2529 bp, synthetic construct
  misc_feature 1..2529: note = Variant of DNA polymerase I from Thermus sp. strain 2.9
  source 1..2529: mol_type = other DNA
atgcaccatcatcatcatcatggcggtagcggcatgttaccgttgttcgaacctaaaggtcgcgtgcttctggttgatggccatcatctcgcgtatcgtaacttctttgccctgaaaggattaaccaccagccgtggcgagccggtacagggtgtctacggctttgcaaagtcgctcctgaaagctctgaaagaagacggtgatgtggtgattgttgtctttgatgcgaaagcgccaagttttcgccacgaagcgtacgaagcttacaaagccgggcgtgctccaacgccggaagactttcctcgccaattggcgcttatgaaggaattagtggatttgcttggcctcgaacgcttggaagttcccggtttcgaggcagacgacgtattagcgactctcgcaaagaaagccgaacgtgagggctatgaagtccagatcttgacagcagatcgcgatcttttccagcttttatctccgcgcatttccgtgttacacccggaagggcatctgatcaccccggaatggctctgggagaaatatggtttgcgtcccgaacaatgggtggattttcgcgccttagcaggcgatccgagcgacaatattccgggagttaaaggtatcggcgagaagacggcgctcaagctccttaaagaatgggggtcgttggagaacttgcttaagaatttagatcaggtcaaaccagcttcagtgcgtgagaagattcttgcacacctcgaagacctcaaattaagccgcgaattgtcccgtgtacgcaccgatttgccgctcgaagttgatttccgtggccgccgcgaacctgactgggagggtcttaaagcgtttttagagcgtcttgaatttggttcgctcttgcatgaattcggccttttagaaagcccgttaccagccgaagaagcaccttggccaccgcccgaaggcgcgtttttaggttaccgtttgagtcgcccggaaccgatgtgggccgaattattggctcttgcagcgtctgcccagggacgtgtgtatcgcgcggaagaccctcatggtgcgctccgcggcctcaaagaagtccgtggactccttgccaaagacttagctgttgttgcattgcgcgaaggtcttgatttacctccgactgatgatccaatgcttcttgcgtacctcttggacccgtcaaacacgacgcccgaaggcgtagcccgtcgttacggcggcgagtggaccgaagatgcaggtgagcgcgcgttattggccgaacgtttgcacgccaatttattaggacgtttgcaaggcgaggaacgtctcctctggctttacgaagaagtggagaaaccattgagtcgcgtgctcgcgcatatggaagctaccggtgtcaaattagacgtggcgtatttggaggcactcagccttgaagttgctgccgaaattcgccgcttggaggaagaagtattccgtttagcaggccactcctttaaccttaattctcgcgatcagttagaacgtgtgttgttcgatgaacttggtctccctcctatcggcaagacagagaagaccggtaaacgtagcacttcagcggcggttttagaagctcttcgcgaagtccatcccattgtggacaagatcttgcagtaccgcgaactcgcgaaattgaaaggcacctatattgaccctcttccggcattagtccacccgaaaacgggacgcctccatacccgcttcaaccaaacagccacggcgaccggtcgtttgtcctcctctgatccaaaccttcagaatattccagtacgtaccccattgggccagaagatccgcaaagcgtttgtagctgaggagggttggcgtttagtggccctcgattatagccaaattgaattacgtgtccttgcccatctttctggcgatgagaacctcatccgcgtgtttcaggaaggccgtgacattcacactcaaacggcaagctggatgtttggattatcagctgaagcgatcgatcctttgatgcgtcgtgcagcgaagaccgttaatttcggtgttctctacggtatgagtgcccatcgtttgtcgcaggaattaggcattccctatgaagaagctgcggcgttcattcagcgctactttcaaagctatcccaaagttaaagcatggatcgagaagactctcgaagaaggccgcacacgtggttacgtagagaccttatttggacgtcgccgctatgttcccgatttaaacgctcgcgtgaaatctgtccgtgaagccgccgaacgcatggcgttcaacatgcctgtacagggcacggcagctgacctcatgaaacttgcaatggtgcgcctttttccacaattgcgtgaagttggtgcccgcatgctcttgcaggtccacgatgaactcttgttagaagcgccaaaagagcgtgcggaagaggtggcagccctcgcgaaagaggttatggaaggcgtgtggcccttagcggtgcctcttgaagtcgaagttggtattggcgaggattggttggctgccaaaggataatga

SEQ ID NO: 620 - protein, 841 aa, synthetic construct
  REGION 1..841: note = Variant of DNA polymerase I from Thermus sp. strain 2.9
MHHHHHHGGSGMLPLFEPKGRVLLVDGHHLAYRNFFALKGLTTSRGEPVQGVYGFAKSLLKALKEDGDVVIVVFDAKAPSFRHEAYEAYKAGRAPTPEDFPRQLALMKELVDLLGLERLEVPGFEADDVLATLAKKAEREGYEVQILTADRDLFQLLSPRISVLHPEGHLITPEWLWEKYGLRPEQWVDFRALAGDPSDNIPGVKGIGEKTALKLLKEWGSLENLLKNLDQVKPASVREKILAHLEDLKLSRELSRVRTDLPLEVDFRGRREPDWEGLKAFLERLEFGSLLHEFGLLESPLPAEEAPWPPPEGAFLGYRLSRPEPMWAELLALAASAQGRVYRAEDPHGALRGLKEVRGLLAKDLAVVALREGLDLPPTDDPMLLAYLLDPSNTTPEGVARRYGGEWTEDAGERALLAERLHANLLGRLQGEERLLWLYEEVEKPLSRVLAHMEATGVKLDVAYLEALSLEVAAEIRRLEEEVFRLAGHSFNLNSRDQLERVLFDELGLPPIGKTEKTGKRSTSAAVLEALREVHPIVDKILQYRELAKLKGTYIDPLPALVHPKTGRLHTRFNQTATATGRLSSSDPNLQNIPVRTPLGQKIRKAFVAEEGWRLVALDYSQIELRVLAHLSGDENLIRVFQEGRDIHTQTASWMFGLSAEAIDPLMRRAAKTVNFGVLYGMSAHRLSQELGIPYEEAAAFIQRYFQSYPKVKAWIEKTLEEGRTRGYVETLFGRRRYVPDLNARVKSVREAAERMAFNMPVQGTAADLMKLAMVRLFPQLREVGARMLLQVHDELLLEAPKERAEEVAALAKEVMEGVWPLAVPLEVEVGIGEDWLAAKG

SEQ ID NO: 621 - DNA, 2529 bp, synthetic construct
  misc_feature 1..2529: note = Variant of DNA polymerase I from Thermus sp. strain 2.9
  source 1..2529: mol_type = other DNA
atgcaccatcatcatcatcatggcggtagcggcatgttaccgttgttcgaacctaaaggtcgcgtgcttctggttgatggccatcatctcgcgtatcgtaacttctttgccctgaaaggattaaccaccagccgtggcgagccggtacagggtgtctacggctttgcaaagtcgctcctgaaagctctgaaagaagacggtgatgtggtgattgttgtctttgatgcgaaagcgccaagttttcgccacgaagcgtacgaagcttacaaagccgggcgtgctccaacgccggaagactttcctcgccaattggcgcttatgaaggaattagtggatttgcttggcctcgaacgcttggaagttcccggtttcgaggcagacgacgtattagcgactctcgcaaagaaagccgaacgtgagggctatgaagtccagatcttgacagcagatcgcgatcttttccagcttttatctccgcgcatttccgtgttacacccggaagggcatcgtatcaccccggaatggctctgggagaaatatggtttgcgtcccgaacaatgggtggattttcgcgccttagcgggcgatccgagcgacaatattccgggagttaaaggtatcggcgagaagacggcgctcaagctccttaaagaatgggggtcgttggagaacttgcttaagaatttagatcaggtcaaaccagcttcagtgcgtgagaagattcttgcacacctcgaagacctcaaattaagccgcgaattgtcccgtgtacgcaccgatttgccgctcgaagttgatttccgtggccgccgcgaacctgactgggagggtcttaaagcgtttttagagcgtcttgaatttggttcgctcttgcatgaattcggccttttagaaagcccgttaccagccgaagaagcaccttggccaccgcccgaaggcgcgtttttaggttaccgtttgagtgttccggaaccgatgtgggccgaattattggctcttgcagcgtctgcccagggacgtgtgtatcgcgcggaagaccctcatggtgcgctccgtggcctcaaagaagtccgtggactccttgccaaagacttagctgttgttgcattgcgcgaaggtcttgatttacctccgactgatgatccaatgcttcttgcgtacctcttggacccgtcaaacacgacgcccgaaggcgtagcccgtcgttacggcggcgagtggaccgaagatgcaggtgagcgcgcgttattggccgaacgtttgcacgccaatttattaggacgtttgcaaggcgaggaacgtctcctctggctttacgaagaagtggagaaaccattgagtcgcgtgctcgcgcatatggaagctaccggtgtcaaattagacgtggcgtatttggaggcactcagccttgaagttgctgccgaaatgcgccgcttggaggaagaagtattccgtttagcaggccactcctttaaccttaattctcgcgatcagttagaacgtgtgttgttcgatgaacttggtctccctcctatcggcaagacagagaagaccggtaaacgtagcacttcagcggcggttttagaagctcttcgcgaagtccatcccattgtggacaagatcttgcagtaccgcgaactcgcgaaattgaaaggcacctatattgaccctcttccggcattagtccacccgaaaacgggacgcctccatacccgcttcaaccaaacagccacggcgaccggtcgtttgtcctcctctgatccaaaccttcagaatattccagtacgtaccccattgggccagaagatccgcaaagcgtttgtagctgaggagggttggcgtttagtggccctcgattatagccaaattgaattacgtgtccttgcccatctttctggcgatgagaacctcatccgcgtgtttcaggaaggccgcgacattcacactcaaacggcaagctggatgtttggattatcagctgaagcgatcgatcctttgatgcgtcgtgcagcgaagaccatcaatttcggtgttctctacggtatgagtgcccatcgtttgtcgcaggaattaggcattccctatgaagaagctgcggcgttcattcagcgctactttcaaagctatcccaaagttaaagcatggatcgagaagactctcgaagaaggccgcacacgtggttacgtagagaccttatttggacgtcgccgctatgttcccgatttaaacgctcgcgtgaaatctgtccgtgaagccgccgaacgcatggcgttcaacatgcctgtacagggcacggcagctgacctcatgaaacttgcaatggtgcgcctttttccacaattgcgtgaagttggtgcccgcatgctcttgcaggtccacgatgaactcttgttagaagcgccaaaagagcgtgcggaagaggtggcagccctcgcgaaagaggttatggaaggcgtgtggcccttagcggtgcctcttgaagtcgaagttggtattggcgaggattggttggctgccaaaggataatga

SEQ ID NO: 622 - protein, 841 aa, synthetic construct
  REGION 1..841: note = Variant of DNA polymerase I from Thermus sp. strain 2.9
MHHHHHHGGSGMLPLFEPKGRVLLVDGHHLAYRNFFALKGLTTSRGEPVQGVYGFAKSLLKALKEDGDVVIVVFDAKAPSFRHEAYEAYKAGRAPTPEDFPRQLALMKELVDLLGLERLEVPGFEADDVLATLAKKAEREGYEVQILTADRDLFQLLSPRISVLHPEGHRITPEWLWEKYGLRPEQWVDFRALAGDPSDNIPGVKGIGEKTALKLLKEWGSLENLLKNLDQVKPASVREKILAHLEDLKLSRELSRVRTDLPLEVDFRGRREPDWEGLKAFLERLEFGSLLHEFGLLESPLPAEEAPWPPPEGAFLGYRLSVPEPMWAELLALAASAQGRVYRAEDPHGALRGLKEVRGLLAKDLAVVALREGLDLPPTDDPMLLAYLLDPSNTTPEGVARRYGGEWTEDAGERALLAERLHANLLGRLQGEERLLWLYEEVEKPLSRVLAHMEATGVKLDVAYLEALSLEVAAEMRRLEEEVFRLAGHSFNLNSRDQLERVLFDELGLPPIGKTEKTGKRSTSAAVLEALREVHPIVDKILQYRELAKLKGTYIDPLPALVHPKTGRLHTRFNQTATATGRLSSSDPNLQNIPVRTPLGQKIRKAFVAEEGWRLVALDYSQIELRVLAHLSGDENLIRVFQEGRDIHTQTASWMFGLSAEAIDPLMRRAAKTINFGVLYGMSAHRLSQELGIPYEEAAAFIQRYFQSYPKVKAWIEKTLEEGRTRGYVETLFGRRRYVPDLNARVKSVREAAERMAFNMPVQGTAADLMKLAMVRLFPQLREVGARMLLQVHDELLLEAPKERAEEVAALAKEVMEGVWPLAVPLEVEVGIGEDWLAAKG

SEQ ID NO: 623 - DNA, 2529 bp, synthetic construct
  misc_feature 1..2529: note = Variant of DNA polymerase I from Thermus sp. strain 2.9
  source 1..2529: mol_type = other DNA
atgcaccatcatcatcatcatggcggtagcggcatgttaccgttgttcgaacctaaaggtcgcgtgcttctggttgatggccatcatctcgcgtatcgtaacttctttgccctgaaaggattaaccaccagccgtggcgagccggtacagggtgtctacggctttgcaaagtcgctcctgaaagctctgaaagaagacggtgatgtggtgattgttgtctttgatgcgaaagcgccaagttttcgccacgaagcgtacgaagcttacaaagccgggcgtgctccaacgccggaagactttcctcgccaattggcgcttatgaaggaattagtggatttgcttggcctcgaacgcttggaagttcccggtttcgaggcagacgacgtattagcgactctcgcaaagaaagccgaacgtgagggctatgaagtccagatcttgacagcagatcgcgatcttttccagcttttatctccgcgcatttccgtgttacacccggaagggcatcgtatcaccccggaatggctctgggagaaatatggtttgcgtcccgaacaatgggtggattttcgcgccttagcgggcgatccgagcgacaatattccgggagttaaaggtatcggcgagaagacggcgctcaagctccttaaagaatgggggtcgttggagaacttgcttaagaatttagatcaggtcaaaccagcttcagtgcgtgagaagattcttgcacacctcgaagacctcaaattaagccgcgaattgtcgcgtgtacgcaccgatttgccgctcgaagttgatttccgtggccgccgcgaacctgactgggagggtcttaaagcgtttttagagcgtcttgaatttggttcgctcttgcatgaattcggccttttagaaagcccgttaccagccgaagaagcaccttggccaccgcccgaaggcgcgtttttaggttaccgtttgagtcgcccggaaccgatgtgggccgaattattggctcttgcagcgtctgcccagggacgtgtgtatcgcgcggaagaccctcatggtgcgctccgtggcctcaaagaagtccgtggactccttgccaaagacttagctgttgttgcattgcgcgaaggtcttgatttacctccgactgatgatccaatgcttcttgcgtacctcttggacccgtcaaacacgacgcccgaaggcgtagcccgtcgttacggcggcgagtggaccgaagatgcaggtgagcgcgcgttattggccgaacgtttgcacgccaatttattaggacgtttgcaaggcgaggaacgtctcctctggctttacgaagaagtggagaaaccattgagtcgcgtgctcgcgcatatggaagctaccggtgtcaaattagacgtggcgtatttggaggcactcagccttgaagccgctgccgaactgcgccgcttggaggaagaagtattccgtttagcaggccactcctttaaccttaattctcgcgatcagttagaacgtgtgttgttcgatgaacttggtctccctcctatcaccaagacagagaagaccggtaaacgtagcacttcagcggcggttttagaagctcttcgcgaagtccatcccattgtggacaagatcttgcagtaccgcgaactcgcgaaattgaaaggcacctatattgaccctcttccggcattagtccacccgaaaacgggacgcctccatacccgcttcaaccaaacagccacggcgaccggtcgtttgtcctcctctgatccaaaccttcagaatattccagtacgtaccccattgggccagaagatccgcaaagcgtttgtagctgaggagggttggcgtttagtggccctcgattatagccaaattgaattacgtgtccttgcccatctttctggcgatgagaacctcatccgcgtgtttcaggaaggccgcgacattcacactcaaacggcaagctggatgtttggattatcagctgaagcgatcgatcctttgatgcgtcgtgcagcgaagaccatcaatttcggtgttctctacggtatgagtgcccatcgtttgtcgcaggaattaggcattccctatgaagaagctgcggcgttcattcagcgctactttcaaagctatcccaaagttaaagcatggatcgagaagactctcgaagaaggccgcacacgtggttacgtagagaccttatttggacgtcgccgctatgttcccgatttaactgctcgcgtgaaatctgtccgtgaagccgccgaacgcatggcgttcaacatgcctgtacagggcacggcagctgacctcatgaaacttgcaatggtgcgcctttttccacaattgcgtgaagttggtgcccgcatgctcttgcaggtccacgatgaactcttgttagaagcgccaaaagagcgtgcggaagaggtggcagccctcgcgaaagaggttatggaaggcgtgtggcccttagcggtgcctcttgaagtcgaagttggtattggcgaggattggttggctgccaaaggataatga

SEQ ID NO: 624 - protein, 841 aa, synthetic construct
  REGION 1..841: note = Variant of DNA polymerase I from Thermus sp. strain 2.9
MHHHHHHGGSGMLPLFEPKGRVLLVDGHHLAYRNFFALKGLTTSRGEPVQGVYGFAKSLLKALKEDGDVVIVVFDAKAPSFRHEAYEAYKAGRAPTPEDFPRQLALMKELVDLLGLERLEVPGFEADDVLATLAKKAEREGYEVQILTADRDLFQLLSPRISVLHPEGHRITPEWLWEKYGLRPEQWVDFRALAGDPSDNIPGVKGIGEKTALKLLKEWGSLENLLKNLDQVKPASVREKILAHLEDLKLSRELSRVRTDLPLEVDFRGRREPDWEGLKAFLERLEFGSLLHEFGLLESPLPAEEAPWPPPEGAFLGYRLSRPEPMWAELLALAASAQGRVYRAEDPHGALRGLKEVRGLLAKDLAVVALREGLDLPPTDDPMLLAYLLDPSNTTPEGVARRYGGEWTEDAGERALLAERLHANLLGRLQGEERLLWLYEEVEKPLSRVLAHMEATGVKLDVAYLEALSLEAAAELRRLEEEVFRLAGHSFNLNSRDQLERVLFDELGLPPITKTEKTGKRSTSAAVLEALREVHPIVDKILQYRELAKLKGTYIDPLPALVHPKTGRLHTRFNQTATATGRLSSSDPNLQNIPVRTPLGQKIRKAFVAEEGWRLVALDYSQIELRVLAHLSGDENLIRVFQEGRDIHTQTASWMFGLSAEAIDPLMRRAAKTINFGVLYGMSAHRLSQELGIPYEEAAAFIQRYFQSYPKVKAWIEKTLEEGRTRGYVETLFGRRRYVPDLTARVKSVREAAERMAFNMPVQGTAADLMKLAMVRLFPQLREVGARMLLQVHDELLLEAPKERAEEVAALAKEVMEGVWPLAVPLEVEVGIGEDWLAAKG

SEQ ID NO: 625 - DNA, 2529 bp, synthetic construct
  misc_feature 1..2529: note = Variant of DNA polymerase I from Thermus sp. strain 2.9
  source 1..2529: mol_type = other DNA
atgcaccatcatcatcatcatggcggtagcggcatgttaccgttgttcgaacctaaaggtcgcgtgcttctggttgatggccatcatctcgcgtatcgtaacttctttgccctgaaaggattaaccaccagccgtggcgagccggtacagggtgtctacggctttgcaaagtcgctcctgaaagctctgaaagaagacggtgatgtggtgattgttgtctttgatgcgaaagcgccaagttttcgccacgaagcgtacgaagcttacaaagccgggcgtgctccaacgccggaagactttcctcgccaattggcgcttatgaaggaattagtggatttgcttggcctcgaacgcttggaagttcccggtttcgaggcagacgacgtattagcgactctcgcaaagaaagccgaacgtgagggctatgaagtccagatcttgacagcagatcgcgatcttttccagcttttatctccgcgcatttccgtgttacacccggaagggcatcgtatcaccccggaatggctctgggagaaatatggtttgcgtcccgaacaatgggtggattttcgcgccttagcgggcgatccgagcgacaatattccgggagttaaaggtatcggcgagaagacggcgctcaagctccttaaagaatgggggtcgttggagaacttgcttaagaatttagatcaggtcaaaccagcttcagtgcgtgagaagattcttgcacacctcgaagacctcaaattaagccgcgaattgtcgcgtgtacgcaccgatttgccgctcgaagttgatttccgtggccgccgcgaacctgactgggagggtcttaaagcgtttttagagcgtcttgaatttggttcgctcttgcatgaattcggccttttagaaagcccgttaccagccgaagaagcaccttggccaccgcccgaaggcgcgtttttaggttaccgtttgagtcgcccggaaccgatgtgggccgaattattggctcttgcagcgtctgcccagggacgtgtgtatcgcgcggaagaccctcatggtgcgctccgtggcctcaaagaagtccgtggactccttgccaaagacttagctgttgttgcattgcgcgaaggtcttgatttacctccgactgatgatccaatgcttcttgcgtacctcttggacccgtcaaacacgacgcccgaaggcgtagcccgtcgttacggcggcgagtggaccgaagatgcaggtgagcgcgcgttattggccgaacgtttgcacgccaatttattaggacgtttgcaaggcgaggaacgtctcctctggctttacgaagaagtggagaaaccattgagtcgcgtgctcgcgcatatggaagctaccggtgtcaaattagacgtggcgtatttggaggcactcagccttgaagttgctgccgaaatgcgccgcttggaggaagaagtattccgtttagcaggccactcctttaaccttaattctcgcgatcagttagaacgtgtgttgttcgatgaacttggtctccctcctatcggcaagacagagaagaccggtaaacgtagcacttcagcggcggttttagaagctcttcgcgaagtccatcccattgtggacaagatcttgcagtaccgcgaactcgcgaaattgaaaggcacctatattgaccgtcttccggcattagtccacccgaaaacgggacgcctccatacccgcttcaaccaaacagccacggcgaccggtcgtttgtcctcctctgatccaaaccttcagaatattccagtacgtaccccattgggccagaagatccgcaaagcgtttgtagctgaggagggttggcgtttagtggccctcgattatagccaaattgaattacgtgtccttgcccatctttctggcgatgagaacctcatccgcgtgtttcaggaaggccgcgacattcacactcaaacggcaagctggatgtttggattatcagctgaagcgatcgatcctttgatgcgtcgtgcagcgaagaccatcaatttcggtgttctctacggtatgagtgcccatcgtttgtcgcaggaattaggcattccctatgaagaagctgcggcgttcattcagcgctactttcaaagctatcccaaagttaaagcatggatcgagaagactctcgaagaaggccgcacacgtggttacgtagagaccttatttggacgtcgccgctatgttcccgatttaaacgctcgcgtgaaatctgtccgtgaagccgccgaacgcatggcgttcaacatgcctgtacagggcacggcagctgacctcatgaaacttgcaatggtgcgcctttttccacaattgcgtgaagttggtgcccgcatgctcttgcaggtccacgatgaactcttgttagaagcgccaaaagagcgtgcggaagaggtggcagccctcgcgaaagaggttatggaaggcgtgtggcccttagcggtgcctcttgaagtcgaagttggtattggcgaggattggttggctgccaaaggataatga

SEQ ID NO: 626 - protein, 841 aa, synthetic construct
  REGION 1..841: note = Variant of DNA polymerase I from Thermus sp. strain 2.9
MHHHHHHGGSGMLPLFEPKGRVLLVDGHHLAYRNFFALKGLTTSRGEPVQGVYGFAKSLLKALKEDGDVVIVVFDAKAPSFRHEAYEAYKAGRAPTPEDFPRQLALMKELVDLLGLERLEVPGFEADDVLATLAKKAEREGYEVQILTADRDLFQLLSPRISVLHPEGHRITPEWLWEKYGLRPEQWVDFRALAGDPSDNIPGVKGIGEKTALKLLKEWGSLENLLKNLDQVKPASVREKILAHLEDLKLSRELSRVRTDLPLEVDFRGRREPDWEGLKAFLERLEFGSLLHEFGLLESPLPAEEAPWPPPEGAFLGYRLSRPEPMWAELLALAASAQGRVYRAEDPHGALRGLKEVRGLLAKDLAVVALREGLDLPPTDDPMLLAYLLDPSNTTPEGVARRYGGEWTEDAGERALLAERLHANLLGRLQGEERLLWLYEEVEKPLSRVLAHMEATGVKLDVAYLEALSLEVAAEMRRLEEEVFRLAGHSFNLNSRDQLERVLFDELGLPPIGKTEKTGKRSTSAAVLEALREVHPIVDKILQYRELAKLKGTYIDRLPALVHPKTGRLHTRFNQTATATGRLSSSDPNLQNIPVRTPLGQKIRKAFVAEEGWRLVALDYSQIELRVLAHLSGDENLIRVFQEGRDIHTQTASWMFGLSAEAIDPLMRRAAKTINFGVLYGMSAHRLSQELGIPYEEAAAFIQRYFQSYPKVKAWIEKTLEEGRTRGYVETLFGRRRYVPDLNARVKSVREAAERMAFNMPVQGTAADLMKLAMVRLFPQLREVGARMLLQVHDELLLEAPKERAEEVAALAKEVMEGVWPLAVPLEVEVGIGEDWLAAKG

SEQ ID NO: 627 - DNA, 2529 bp, synthetic construct
  misc_feature 1..2529: note = Variant of DNA polymerase I from Thermus sp. strain 2.9
  source 1..2529: mol_type = other DNA
atgcaccatcatcatcatcatggcggtagcggcatgttaccgttgttcgaacctaaaggtcgcgtgcttctggttgatggccatcatctcgcgtatcgtaacttctttgccctgaaaggattaaccaccagccgtggcgagccggtacagggtgtctacggctttgcaaagtcgctcctgaaagctctgaaagaagacggtgatgtggtgattgttgtctttgatgcgaaagcgccaagttttcgccacgaagcgtacgaagcttacaaagccgggcgtgctccaacgccggaagactttcctcgccaattggcgcttatgaaggaattagtggatttgcttggcctcgaacgcttggaagttcccggtttcgaggcagacgacgtattagcgactctcgcaaagaaagccgaacgtgagggctatgaagtccagatcttgacagcagatcgcgatcttttccagcttttatctccgcgcatttccgtgttacacccggaagggcatcgcatcaccccggaatggctctgggagaaatatggtttgcgtcccgaacaatgggtggattttcgcgccttagcgggcgatccgagcgacaatattccgggagttaaaggtatcggcgagaagacggcgctcaagctccttaaagaatgggggtcgttggagaacttgcttaagaatttagatcaggtcaaaccagcttcagtgcgtgagaagattcttgcacacctcgaagacctcaaattaagccgcgaattgtcccgtgtacgcaccgatttgccgctcgaagttgatttccgtcgccgccgcgaacctgactgggagggtcttaaagcgtttttagagcgtcttgaatttggttcgctcttgcatgaattcggccttttagaaagcccgttaccagccgaagaagcaccttggccaccgcccgaaggcgcgtttttaggttaccgtttgagtcgcccggaaccgatgtgggccgaattattggctcttgcagcgtctgcccagggacgtgtgtatcgcgcggaagaccctcatggtgcgctcaaaggcctcaaagaagtccgtggactccttgccaaagacttagctgttgttgcattgcgcgaaggtcttgatttacctccgactgatgatccaatgcttcttgcgtacctcttggacccgtcaaacacgacgcccgaaggcgtagcccgtcgttacggcggcgagtggaccgaagatgcagccgagcgcgcgttattggccgaacgtttgcacgccaatttattaggacgtttgcaaggcgaggaacgtctcctctggctttacgaagaagtggagaaaccattgagtcgcgtgctcgcgcatatggaagctaccggtgtcaaattagacgtggcgtatttggaggcactcagccttgaagttgctgccgaaatgcgccgcttggaggaagaagtattccgtttagcaggccactcctttaaccttaattctcgcgatcagttagaacgtgtgttgttcgatgaacttggtctccctcctatcggcaagacagagaagaccggtaaacgtagcacttcagcggcggttttagaagctcttcgcgaagtccatcccattgtggacaagatcttgcagtaccgcgaactcgcgaaattgaaaggcacctatattgaccctcttccggcattagtccacccgaaaacgggacgcctccatacccgcttcaaccaaacagccacggcgaccggtcgtttgtcctcctctgatccaaaccttcagaatattccagtacgtaccccattgggccagaagatccgcaaagcgtttgtagctgaggagggttggcgtttagtggccctcgattatagccaaattgaattacgtgtccttgcccatctttctggcgatgagaacctcatccgcgtgtttcaggaaggccgtgacattcacactcaaacggcaagctggatgtttggattatcagctgaagcgatcgatcctttgatgcgtcgtgcagcgaagaccattaatttcggtgttctctacggtatgagtgcccatcgtttgtcgcaggaattaggcattccctatgaagaagctgcggcgttcattcagcgctactttcaaagctatcccaaagttaaagcatggatcgagaagactctcgaagaaggccgcacacgtggttacgtagagaccttatttggacgtcgccgctatgttcccgatttaaacgctcgcgtgaaatctgtccgtgaagccgccgaacgcatggcgttcaacatgcctgtacagggcacggcagctgacctcatgaaacttgcaatggtgcgcctttttccacaattgcgtgaagttggtgcccgcatgctcttgcaggtccacgatgaactcttgttagaagcgccaaaagagcgtgcggaagaggtggcagccctcgcgaaagaggttatggaaggcgtgtggcccttagcggtgcctcttgaagtcgaagttggtattggcgaggattggttggctgccaaaggataatga

SEQ ID NO: 628 - protein, 841 aa, synthetic construct
  REGION 1..841: note = Variant of DNA polymerase I from Thermus sp. strain 2.9
MHHHHHHGGSGMLPLFEPKGRVLLVDGHHLAYRNFFALKGLTTSRGEPVQGVYGFAKSLLKALKEDGDVVIVVFDAKAPSFRHEAYEAYKAGRAPTPEDFPRQLALMKELVDLLGLERLEVPGFEADDVLATLAKKAEREGYEVQILTADRDLFQLLSPRISVLHPEGHRITPEWLWEKYGLRPEQWVDFRALAGDPSDNIPGVKGIGEKTALKLLKEWGSLENLLKNLDQVKPASVREKILAHLEDLKLSRELSRVRTDLPLEVDFRRRREPDWEGLKAFLERLEFGSLLHEFGLLESPLPAEEAPWPPPEGAFLGYRLSRPEPMWAELLALAASAQGRVYRAEDPHGALKGLKEVRGLLAKDLAVVALREGLDLPPTDDPMLLAYLLDPSNTTPEGVARRYGGEWTEDAAERALLAERLHANLLGRLQGEERLLWLYEEVEKPLSRVLAHMEATGVKLDVAYLEALSLEVAAEMRRLEEEVFRLAGHSFNLNSRDQLERVLFDELGLPPIGKTEKTGKRSTSAAVLEALREVHPIVDKILQYRELAKLKGTYIDPLPALVHPKTGRLHTRFNQTATATGRLSSSDPNLQNIPVRTPLGQKIRKAFVAEEGWRLVALDYSQIELRVLAHLSGDENLIRVFQEGRDIHTQTASWMFGLSAEAIDPLMRRAAKTINFGVLYGMSAHRLSQELGIPYEEAAAFIQRYFQSYPKVKAWIEKTLEEGRTRGYVETLFGRRRYVPDLNARVKSVREAAERMAFNMPVQGTAADLMKLAMVRLFPQLREVGARMLLQVHDELLLEAPKERAEEVAALAKEVMEGVWPLAVPLEVEVGIGEDWLAAKG

SEQ ID NO: 629 - DNA, 2529 bp, synthetic construct
  misc_feature 1..2529: note = Variant of DNA polymerase I from Thermus sp. strain 2.9
  source 1..2529: mol_type = other DNA
atgcaccatcatcatcatcatggcggtagcggcatgttaccgttgttcgaacctaaaggtcgcgtgcttctggttgatggccatcatctcgcgtatcgtaacttctttgccctgaaaggattaaccaccagccgtggcgagccggtacagggtgtctacggctttgcaaagtcgctcctgaaagctctgaaagaagacggtgatgtggtgattgttgtctttgatgcgaaagcgccaagttttcgccacgaagcgtacgaagcttacaaagccgggcgtgctccaacgccggaagactttcctcgccaattggcgcttatgaaggaattagtggatttgcttggcctcgaacgcttggaagttcccggtttcgaggcagacgacgtattagcgactctcgcaaagaaagccgaacgtgagggctatgaagtccatatcttgacagcagatcgcgatcttttccagcttttatctccgcgcatttccgtgttacacccggaagggcatcgtatcaccccggaatggctctgggagaaatatggtttgcgtcccgaacaatgggtggattttcgcgccttagcgggcgatccgagcgacaatattccgggagttaaaggtatcggcgagaagacggcgctcaagctccttaaagaatgggggtcgttggagaacttgcttaagaatttagatcaggtcaaaccagcttcagtgcgtgagaagattcttgcacacctcgaagacctcaaattaagccgcgaattggtccgtgtacgcaccgatttgccgctcgaagttgatttccgtggccgccgcgaacctgactgggagggtcttaaagcgtttttagagcgtcttgaatttggttcgctcttgcatgaattcggccttttagaaagcccgttaccagccgaagaagcaccttggccaccgcccgaaggcgcgtttttaggttaccgtttgagtcgcccggaaccgatgtgggccgaattattggctcttgcagcgtctgcccagggacgtgtgtatcgcgcggaagaccctcatggtgcgctccgtggcctcaaagaagtccgtggactccttgccaaagacttagctgttgttgcattgcgcgaaggtcttgatttacctccgactgatgatccaatgcttcttgcgtacctcttggactcgtcaaacacgacgcccgaaggcgtagcccgtcgttacggcggcgagtggaccgaagatgcaggtgagcgcgcgttattggccgaacgtttgcacgccaatttattaggacgtttgcaaggcgaggaacgtctcctctggctttacgaagaagtggagaaaccattgagtcgcgtgctcgcgcatatggaagctaccggtgtcaaattagacgtggcgtatttggaggcactcagccttgaagtcgctgccgaactgcgccgcttggaggaagaagtattccgtttagcaggccactcctttaaccttaattctcgcgatcagttagaacgtgtgttgttcgatgaacttggtctccctcctatcggcaagacagagaagaccggtaaacgtagcacttcagcggcggttttagaagctcttcgcgaagtccatcccattgtggacaagatcttgcagtaccgcgaactcgcgaaattgaaaggcacctatattgaccgtcttccggcattagtccacccgaaaacgggacgcctccatacccgcttcaaccaaacagccacggcgaccggtcgtttgtcctcctctgatccaaaccttcagaatattccagtacgtaccccattgggccagaaaatccgcaaagcgtttgtagctgaggagggttggcgtttagtggccctcgattatagccaaattgaattacgtgtccttgcccatctttctggcgatgagaacctcatccgcgtgtttcaggaaggccgcgacattcacactcaaacggcaagctggatgtttggagtgtcatcggaagcgatcgatcctttgatgcgtcgtgcagcgaagaccatcaatttcggtgttctctacggtatgagtgcccatcgtttgtcgcaggaattaggcattccctatgaagaagctgcggcgttcattcagcgctactttcaaagctatcccaaagttaaagcatggatcgagaagactctcgaagaaggccgcacacgtggttacgtagagaccttatttggacgtcgccgctatgttcccgatttaactgctcgcgtgaaatctgtccgtgaagccgccgaacgcatggcgtttaacatgcctgtacagggcacggcagctgacctcatgaaacttgcaatggtgcgcctttttccacaattgcgtgaagttggtgcccgcatgctcttgcaggtccacgatgaactcttgttagaagcgccaaaagagcgtgcggaagaggtggcagccctcgcgaaagaggttatggaaggcgtgtggcccttagcggtgcctcttgaagtcgaagttggtattggcgaggattggttggctgccaaaggataatga

SEQ ID NO: 630 - protein, 841 aa, synthetic construct
  REGION 1..841: note = Variant of DNA polymerase I from Thermus sp. strain 2.9
MHHHHHHGGSGMLPLFEPKGRVLLVDGHHLAYRNFFALKGLTTSRGEPVQGVYGFAKSLLKALKEDGDVVIVVFDAKAPSFRHEAYEAYKAGRAPTPEDFPRQLALMKELVDLLGLERLEVPGFEADDVLATLAKKAEREGYEVHILTADRDLFQLLSPRISVLHPEGHRITPEWLWEKYGLRPEQWVDFRALAGDPSDNIPGVKGIGEKTALKLLKEWGSLENLLKNLDQVKPASVREKILAHLEDLKLSRELVRVRTDLPLEVDFRGRREPDWEGLKAFLERLEFGSLLHEFGLLESPLPAEEAPWPPPEGAFLGYRLSRPEPMWAELLALAASAQGRVYRAEDPHGALRGLKEVRGLLAKDLAVVALREGLDLPPTDDPMLLAYLLDSSNTTPEGVARRYGGEWTEDAGERALLAERLHANLLGRLQGEERLLWLYEEVEKPLSRVLAHMEATGVKLDVAYLEALSLEVAAELRRLEEEVFRLAGHSFNLNSRDQLERVLFDELGLPPIGKTEKTGKRSTSAAVLEALREVHPIVDKILQYRELAKLKGTYIDRLPALVHPKTGRLHTRFNQTATATGRLSSSDPNLQNIPVRTPLGQKIRKAFVAEEGWRLVALDYSQIELRVLAHLSGDENLIRVFQEGRDIHTQTASWMFGVSSEAIDPLMRRAAKTINFGVLYGMSAHRLSQELGIPYEEAAAFIQRYFQSYPKVKAWIEKTLEEGRTRGYVETLFGRRRYVPDLTARVKSVREAAERMAFNMPVQGTAADLMKLAMVRLFPQLREVGARMLLQVHDELLLEAPKERAEEVAALAKEVMEGVWPLAVPLEVEVGIGEDWLAAKG

SEQ ID NO: 631 - DNA, 2529 bp, synthetic construct
  misc_feature 1..2529: note = Variant of DNA polymerase I from Thermus sp. strain 2.9
  source 1..2529: mol_type = other DNA
atgcaccatcatcatcatcatggcggtagcggcatgttaccgttgttcgaacctaaaggtcgcgtgcttctggttgatggccatcatctcgcgtatcgtaacttctttgccctgaaaggattaaccaccagccgtggcgagccggtacagggtgtctacggctttgcaaagtcgctcctgaaagctctgaaagaagacggtgatgtggtgattgttgtctttgatgcgaaagcgccaagttttcgccacgaagcgtacgaagcttacaaagccgggcgtgctccaacgccggaagactttcctcgccaattggcgcttatgaaggaattagtggatttgcttggcctcgaacgcttggaagttcccggtttcgaggcagacgacgtattagcgactctcgcaaagaaagccgaacgtgagggctatgaagtccagatcttgacagcagatcgcgatcttttccagcttttatctccgcgcgtctcggtgttacacccggaagggcatcgtatcaccccggaatggctctgggagaaatatggtttgcgtcccgaacaatgggtggattttcgcgccttagcgggcgatccgagcgacaatattccgggagttaaaggtatcggcgagaagacggcgctcaagctccttaaagaatgggggtcgttggagaacttgcttaagaatttagatcaggtcaaaccagcttcagtgcgtgagaagattcttgcacacctcgaagacctcaaattaagccgcgaattgtcccgtgtacgcaccgatttgccgctcgaagttgatttccgtcgccgccgcgaacctgactgggagggtcttaaagcgtttttagagcgtcttgaatttggttcgctcttgcatgaattcggccttttagaaagcccgttaccagccgaagaagcaccttggccaccgcccgaaggcgcgtttttaggttaccgtttgagtcgcccggaaccgatgtgggccgaattattggctcttgcagcgtctgcccagggacgtgtgtatcgcgcggaagaccctcatggtgcgctccgtggcctcaaagaagtccgtggactccttgccaaagacttagctgttgttgcattgcgcgaaggtcttgatttacctccgactgatgatccaatgcttcttgcgtacctcttggacccgtcaaacacgacgcccgaaggcgtagcccgtcgttacggcggcgagtggaccgaagatgcaggtgagcgcgcgttattggccgaacgtttgcacgccaatttattaggacgtttgcaaggcgaggaaaagctcctctggctttacgaagaagtggagaaaccattgagtcgcgtgctcgcgcatatggaagctaccggtgtcaaattagacgtggcgtatttggaggcactcagccttgaagttgctgccgaaatgcgccgcttggaggaagaagtattccgtttagcaggccactcctttaaccttaattctcgcgatcagttagaacgtgtgttgttcgatgaacttggtctccctcctatcggcaagacagagaagaccggtaaacgtagcacttcagcggcggttttagaagctcttcgcgaagtccatcccattgtggacaagatcttgcagtaccgcgaactcgcgaaattgaaaggcacctatattgaccctcttccggcattagtccacccgaaaacgggacgcctccatacccgcttcaaccaaacagccacggcgaccggtcgtttgtcctcctctgatccaaaccttcagaatattccagtacgtaccccattgggccagaagatccgcaaagcgtttgtagctgaggagggttggcgtttagtggccctcgattatagccaaattgaattacgtgtccttgcccatctttctggcgatgagaacctcatccgcgtgtttcaggaaggccgcgacattcacactcaaacggcaagctggatgtttggattatcagctgaagcgatcgatcctttgatgcgtcgtgcagcgaagaccattaatttcggtgttctctacggtatgagtgcccatcgtttgtcgcaggaattaggcattccctatgaagaagctgtggcgttcattcagcgctactttcaaagctatcccaaagttaaagcatggatcgagaagactctcgaagaaggccgcacacgtggttacgtagagaccttatttggacgtcgccgctatgttcccgatttaaacgctcgcgtgaaatctgtccgtgaagccgccgaacgcatggcgttcaacatgcctgtacagggcacggcagctgacctcatgaaacttgcaatggtgcgcctttttccacaattgcgtgaagttggtgcccgcatgctcttgcaggtccacgatgaactcttgttagaagcgccaaaagagcgtgcggaagaggtggcagccctcgcgaaagaggttatggaaggcgtgtggcccttagcggtgcctcttgaagtcgaagttggtattggcgaggattggttggctgccaaaggataatga

SEQ ID NO: 632 - protein, 841 aa, synthetic construct
  REGION 1..841: note = Variant of DNA polymerase I from Thermus sp. strain 2.9
MHHHHHHGGSGMLPLFEPKGRVLLVDGHHLAYRNFFALKGLTTSRGEPVQGVYGFAKSLLKALKEDGDVVIVVFDAKAPSFRHEAYEAYKAGRAPTPEDFPRQLALMKELVDLLGLERLEVPGFEADDVLATLAKKAEREGYEVQILTADRDLFQLLSPRVSVLHPEGHRITPEWLWEKYGLRPEQWVDFRALAGDPSDNIPGVKGIGEKTALKLLKEWGSLENLLKNLDQVKPASVREKILAHLEDLKLSRELSRVRTDLPLEVDFRRRREPDWEGLKAFLERLEFGSLLHEFGLLESPLPAEEAPWPPPEGAFLGYRLSRPEPMWAELLALAASAQGRVYRAEDPHGALRGLKEVRGLLAKDLAVVALREGLDLPPTDDPMLLAYLLDPSNTTPEGVARRYGGEWTEDAGERALLAERLHANLLGRLQGEEKLLWLYEEVEKPLSRVLAHMEATGVKLDVAYLEALSLEVAAEMRRLEEEVFRLAGHSFNLNSRDQLERVLFDELGLPPIGKTEKTGKRSTSAAVLEALREVHPIVDKILQYRELAKLKGTYIDPLPALVHPKTGRLHTRFNQTATATGRLSSSDPNLQNIPVRTPLGQKIRKAFVAEEGWRLVALDYSQIELRVLAHLSGDENLIRVFQEGRDIHTQTASWMFGLSAEAIDPLMRRAAKTINFGVLYGMSAHRLSQELGIPYEEAVAFIQRYFQSYPKVKAWIEKTLEEGRTRGYVETLFGRRRYVPDLNARVKSVREAAERMAFNMPVQGTAADLMKLAMVRLFPQLREVGARMLLQVHDELLLEAPKERAEEVAALAKEVMEGVWPLAVPLEVEVGIGEDWLAAKG

SEQ ID NO: 633 - DNA, 2529 bp, synthetic construct
  misc_feature 1..2529: note = Variant of DNA polymerase I from Thermus sp. strain 2.9
  source 1..2529: mol_type = other DNA
atgcaccatcatcatcatcatggcggtagcggcatgttaccgttgttcgaacctaaatgtcgcgtgcttctggttgatggccatcatctcgcgtatcgtaacttctttgccctgaaaggattaaccaccagccgtggcgagccggtacagggtgtctacggctttgcaaagtcgctcctgaaagctctgaaagaagacggtgatgtggtgattgttgtctttgatgcgaaagcgccaagttttcgccacgaagcgtacgaagcttacaaagccgggcgtgctccaacgccggaagactttcctcgccaattggcgcttatgaaggaattagtggatttgcttggcctcgaacgcttggaagttcccggtttcgaggcagacgacgtattagcgactctcgcaaagaaagccgaacgtgagggctatgaagtccagatcttgacagcagatcgcgatcttttccagcttttatctccgcgcatttccgtgttacacccggaagggcatcgtatcaccccggaatggctctgggagaaatatggtttgcgtcccgaacaatgggtggattttcgcgccttagcgggcgatccgagcgacaatattccgggagttaaaggtatcggcgagaagacggcgctcaagctccttaaagaatgggggtcgttggagaacttgcttaagaatttagatcaggtcaaaccagcttcagtgcgtgagaagattcttgcacacctcgaagacctcaaattaagccgcgaattgtcccgtgtacgcaccgatttgccgctcgaagttgatttccgtggccgccgcgaacctgactgggagggtcttaaagcgtttttagagcgtcttgaatttggttcgctcttgcatgaattcggccttttagaaagcccgttaccagccgaagaagcaccttggccaccgcccgaaggcgcgtttttaggttaccgtttgagtcgcccggaaccgatgtgggccgaattattggctcttgcagcgtctgcccagggacgtgtgtatcgcgcggaagaccctcatggtgcgctccgtggcctcaaagaagtccgtggactccttgccaaagacttagctgttgttgcattgcgcgaaggtcttgatttacctccgactgatgatccaatgcttcttgcgtacctcttggacccgtcaaacacgacgcccgaaggcgtagcccgtcgttacggcggcgagtggaccgaagatgcaggtgagcgcgcgttattggccgaacgtttgcacgccaatttattaggacgtttgcaaggcgaggaacgtctcctctggctttacgaagaagtggagaaaccattgagtcgcgtgctcgcgcatatggaagctaccggtgtcaaattagacgtggcgtatttggaggcactcagccttgaagttgctgccgaaatgcgccgcttggaggaagaagtattccgtttagcaggccactcctttaaccttaattctcgcgatcagttagaacgtgtgttgttcgatgaacttggtctccctcctatcggcaagacagagaagaccggtaaacgtagcacttcagcggcggttttagaagctcttcgcgaagtccatcccattgtggacaagatcttgcagtaccgcgaactcgcgaaattgaaaggcacctatattgaccctcttccggcattagtccacccgaaaacgggacgcctccatacccgcttcaaccaaacagccacggcgaccggtcgtttgtcctcctctgatccaaaccttcagaatattccagtacgtaccccattgggccagcacatccgcaaagcgtttgtagctgaggagggttggcgtttagtggccctcgattatagccaaattgaattacgtgtccttgcccatctttctggcgatgagaacctcatccgcgtgtttcaggaaggccgcgacattcacactcaaacggcaagctggatgtttggattatcagctgaagcgatcgatcctttgatgcgtcgtgcagcgaagaccatcaatttcggtgttctctacggtatgagtgcccatcgtttgtcgcaggaattaggcattccctatgaagaagctgcggcgttcattcagcgctactttcaaagctatcccaaagttaaagcatggatcgagaagactctcgaagaaggccgcacacgtggttacgtagagaccttatttggacgtcgccgctatgttcccgatttaaacgctcgcgtgaaatctgtccgtgaagccgccgaacgcatggcgttcaacatgcctgtacagggcacggcagctgacctcatgaaacttgcaatggtgcgcctttttccacaattgcgtgaagttggtgcccgcatgctcttgcaggtccacgatgaactcttgttagaagcgccaaaagagcgtgcggaagaggtggcagccctcgcgaaagaggttatggaaggcgtgtggcccttagcggtgcctcttgaagtcgaagttggtattggcgaggattggttggctgccaaaggataatga

SEQ ID NO: 634 - protein, 841 aa, synthetic construct
  REGION 1..841: note = Variant of DNA polymerase I from Thermus sp. strain 2.9
MHHHHHHGGSGMLPLFEPKCRVLLVDGHHLAYRNFFALKGLTTSRGEPVQGVYGFAKSLLKALKEDGDVVIVVFDAKAPSFRHEAYEAYKAGRAPTPEDFPRQLALMKELVDLLGLERLEVPGFEADDVLATLAKKAEREGYEVQILTADRDLFQLLSPRISVLHPEGHRITPEWLWEKYGLRPEQWVDFRALAGDPSDNIPGVKGIGEKTALKLLKEWGSLENLLKNLDQVKPASVREKILAHLEDLKLSRELSRVRTDLPLEVDFRGRREPDWEGLKAFLERLEFGSLLHEFGLLESPLPAEEAPWPPPEGAFLGYRLSRPEPMWAELLALAASAQGRVYRAEDPHGALRGLKEVRGLLAKDLAVVALREGLDLPPTDDPMLLAYLLDPSNTTPEGVARRYGGEWTEDAGERALLAERLHANLLGRLQGEERLLWLYEEVEKPLSRVLAHMEATGVKLDVAYLEALSLEVAAEMRRLEEEVFRLAGHSFNLNSRDQLERVLFDELGLPPIGKTEKTGKRSTSAAVLEALREVHPIVDKILQYRELAKLKGTYIDPLPALVHPKTGRLHTRFNQTATATGRLSSSDPNLQNIPVRTPLGQHIRKAFVAEEGWRLVALDYSQIELRVLAHLSGDENLIRVFQEGRDIHTQTASWMFGLSAEAIDPLMRRAAKTINFGVLYGMSAHRLSQELGIPYEEAAAFIQRYFQSYPKVKAWIEKTLEEGRTRGYVETLFGRRRYVPDLNARVKSVREAAERMAFNMPVQGTAADLMKLAMVRLFPQLREVGARMLLQVHDELLLEAPKERAEEVAALAKEVMEGVWPLAVPLEVEVGIGEDWLAAKG

SEQ ID NO: 635 - DNA, 2529 bp, synthetic construct
  misc_feature 1..2529: note = Variant of DNA polymerase I from Thermus sp. strain 2.9
  source 1..2529: mol_type = other DNA
atgcaccatcatcatcatcatggcggtagcggcatgttaccgttgttcgaacctaaaggtcgcgtgcttctggttgatggccatcatctcgcgtatcgtaacttctttgccctgaaaggattaaccaccagccgtggcgagccggtacagggtgtctacggctttgcaaagtcgctcctgaaagctctgaaagaagacggtgatgtggtgattgttgtctttgatgcgaaagcgccaagttttcgccacgaagcgtacgaagcttacaaagccgggcgtgctccaacgccggaagactttcctcgccaattggcgcttatgaaggaattagtggatttgcttggcctcgaacgcttggaagttcccggtttcgaggcagacgacgtattagcgactctcgcaaagaaagccgaacgtgagggctatgaagtccagatcttgacagcagatcgcgatcttttccagcttttatctccgcgcatttccgtgttacacccggaagggcatctgatcaccccggaatggctctgggagaaatatggtttgcgtcccgaacaatgggtggattttcgcgccttagcgggcgatccgagcgacaatattccgggagttaaaggtatcggcgagaagacggcgctcaagctccttaaagaatgggggtcgttggagaacttgcttaagaatttagatcaggtcaaaccagcttcagtgcgtgagaagattcttgcacacctcgaagacctcaaattaagcctggaattgtcccgtgtacgcaccgatttgccgctcgaagttgatttccgtggccgccgcgaacctgactgggagggtcttaaagcgtttttagagcgtcttgaatttggttcgctcttgcatgaattcggccttttagaaagcccgttaccagccgaagaagcaccttggccaccgcccgaaggcgcgtttttaggttaccgtttgagtcgcccggaaccgatgtgggccgaattattggctcttgcagcgtctgcccagggacgtgtgtatcgcgcggaagaccctcatggtgcgctcaaaggcctcaaagaagtccgtggactccttgccaaagacttagctgttgttgcattgcgcgaaggtcttgatttacctccgactgatgatccaatgcttcttgcgtacctcttggacccgtcaaacacgacgcccgaaggcgtagcccgtcgttacggcggcgagtggaccgaagatgcaggcgagcgcgcgttattggccgaacgtttgcaccagaatttattaggacgtttgcaaggcgaggaacgtctcctctggctttacgaagaagtggagaaaccattgagtcgcgtgctcgcgcatatggaagctaccggtgtcaaattagacgtggcgtatttggaggcactcagccttgaagttgctgccgaaatgcgccgcttggaggaagaagtattccgtttagcaggccactcctttaaccttaattctcgcgatcagttagaacgtgtgttgttcgatgaacttggtctccctcctatcggcaagacagagaagaccggtaaacgtagcacttcagcggcggttttagaagctcttcgcgaagtccatcccattgtggacaagatcttgcagtaccgcgaactcgcgaaattgaaaggcacctatattgaccctcttccggcattagtccacccgaaaacgggacgcctccatacccgcttcaaccaaacagccacggcgaccggtcgtttgtcctcctctgatccaaaccttcagaatattccagtacgtaccccattgggccagaagatccgcaaagcgtttgtagctgaggagggttggcgtttagtggccctcgattatagccaaattgaattacgtgtccttgcccatctttctggcgatgagaacctcatccgcgtgtttcaggaaggccgcgacattcacactcaaacggcaagctggatgtttggattatcagctgaagcgatcgatcctttgatgcgtcgtgcagcgaagaccgttaatttcggtgttctctacggtatgagtgcccatcgtttgtcgcaggaattaggcattccctatgaagaagctgtggcgttcattcagcgctactttcaaagctatcccaaagttaaagcatggatcgagaagactctcgaagaaggccgcacacgtggttacgtagagaccttatttggacgtcgccgctatgttcccgatttaaacgctcgcgtgaaatctgtccgtgaagccgccgaacgcatggcgttcaacatgcctgtacagggcacggcagctgacctcatgaaacttgcaatggtgcgcctttttccacaattgcgtgaagttggtgcccgcatgctcttgcaggtccacgatgaactcttgttagaagcgccaaaagagcgtgcggaagaggtggcagccctcgcgaaagaggttatggaaggcgtgtggcccttagcggtgcctcttgaagtcgaagttggtattggcgaggattggttggctgccaaaggataatga

SEQ ID NO: 636 - protein, 841 aa, synthetic construct
  REGION 1..841: note = Variant of DNA polymerase I from Thermus sp. strain 2.9
MHHHHHHGGSGMLPLFEPKGRVLLVDGHHLAYRNFFALKGLTTSRGEPVQGVYGFAKSLLKALKEDGDVVIVVFDAKAPSFRHEAYEAYKAGRAPTPEDFPRQLALMKELVDLLGLERLEVPGFEADDVLATLAKKAEREGYEVQILTADRDLFQLLSPRISVLHPEGHLITPEWLWEKYGLRPEQWVDFRALAGDPSDNIPGVKGIGEKTALKLLKEWGSLENLLKNLDQVKPASVREKILAHLEDLKLSLELSRVRTDLPLEVDFRGRREPDWEGLKAFLERLEFGSLLHEFGLLESPLPAEEAPWPPPEGAFLGYRLSRPEPMWAELLALAASAQGRVYRAEDPHGALKGLKEVRGLLAKDLAVVALREGLDLPPTDDPMLLAYLLDPSNTTPEGVARRYGGEWTEDAGERALLAERLHQNLLGRLQGEERLLWLYEEVEKPLSRVLAHMEATGVKLDVAYLEALSLEVAAEMRRLEEEVFRLAGHSFNLNSRDQLERVLFDELGLPPIGKTEKTGKRSTSAAVLEALREVHPIVDKILQYRELAKLKGTYIDPLPALVHPKTGRLHTRFNQTATATGRLSSSDPNLQNIPVRTPLGQKIRKAFVAEEGWRLVALDYSQIELRVLAHLSGDENLIRVFQEGRDIHTQTASWMFGLSAEAIDPLMRRAAKTVNFGVLYGMSAHRLSQELGIPYEEAVAFIQRYFQSYPKVKAWIEKTLEEGRTRGYVETLFGRRRYVPDLNARVKSVREAAERMAFNMPVQGTAADLMKLAMVRLFPQLREVGARMLLQVHDELLLEAPKERAEEVAALAKEVMEGVWPLAVPLEVEVGIGEDWLAAKG

SEQ ID NO: 637 - DNA, 2529 bp, synthetic construct
  misc_feature 1..2529: note = Variant of DNA polymerase I from Thermus sp. strain 2.9
  source 1..2529: mol_type = other DNA
atgcaccatcatcatcatcatggcggtagcggcatgttaccgttgttcgaacctaaaggtcgcgtgcttctggttgatggccatcatctcgcgtatcgtaacttctttgccctgaaaggattaaccaccagccgtggcgagccggtacagggtgtctacggctttgcaaagtcgctcctgaaagctctgaaagaagacggtgatgtggtgattgttgtctttgatgcgaaagcgccaagttttcgccacgaagcgtacgaagcttacaaagccgggcgtgctccaacgccggaagactttcctcgccaattggcgcttatgaaggaattagtggatttgcttggcctcgaacgcttggaagttcccggtttcgaggcagacgacgtattagcgactctcgcaaagaaagccgaacgtgagggctatgaagtccagatcttgacagcagatcgcgatcttttccagcttttatctccgcgcatttccgtgttacacccggaagggcatcgcatcaccccggaatggctctgggagaaatatggtttgcgtcccgaacaatgggtggattttcgcgccttagcgggcgatccgagcgacaatattccgggagttaaaggtatcggcgagaagacggcgctcaagctccttaaagaatgggggtcgttggagaacttgcttaagaatttagatcaggtcaaaccagcttcagtgcgtgagaagattcttgcacacctcgaagacctccgtttaagcctggaattgtcccgtgtacgcaccgatttgccgctcgaagttgatttccgtggccgccgcgaacctgactgggagggtcttaaagcgtttttagagcgtcttgaatttggttcgctcttgcatgaattcggccttttagaaagcccgttaccagccgaagaagcaccttggccaccgcccgaaggcgcgtttttaggttacgttttgagtcgcccggaaccgatgtgggccgaattattggctcttgcagcgtctgcccagggacgtgtgtatcgcgcggaagaccctcatggtgcgctccgcggcctcaaagaagtccgtggactccttgccaaagacttagctgttgttgcattgcgcgaaggtcttgatttacctccgactgatgatccaatgcttcttgcgtacctcttggacccgtcaaacacgacgcccgaaggcgtagcccgtcgttacggcggcgagtggaccgaagatgcaggtgagcgcgcgttattggccgaacgtttgcacgccaatttattaggacgtttgcaaggcgaggaacgtctcctctggctttacgaagaagtggagaaaccattgagtcgcgtgctcgcgcatatggaagctaccggtgtcaaattagacgtggcgtatttggaggcactcagccttgaagttgctgccgaaatgcgccgcttggaggaagaagtattccgtttagcaggccactcctttaaccttaattctcgcgatcagttagaacgtgtgttgttcgatgaacttggtctccctcctatcggcaagacagagaagaccggtaaacgtagcacttcagcggcggttttagaagctcttcgcgaagtccatcccattgtggacaagatcttgcagtaccgcgaactcgcgaaattgaaaggcacctatattgaccctcttccggcattagtccacccgaaaacgggacgcctccatacccgcttcaaccaaacagccacggcgaccggtcgtttgtcctcctctgatccaaaccttcagaatattccagtacgtaccccattgggccagaagatccgccgcgcgtttgtagctgaggagggttggcgtttagtggccctcgattatagccaaattgaattacgtgtccttgcccatctttctggcgatgagaacctcatccgcgtgtttcaggaaggccgtgacattcacactcaaacggcaagctggatgtttggattatcgccggaagcgatcgatcctttgatgcgtcgtgcagcgaagaccattaatttcggtgttctctacggtatgagtgcccatcgtttgtcgcaggaattaggcattccctatgaagaagctgcggcgttcattcagcgctactttcaaagctatcccaaagttaaagcatggatcgagaagactctcgaagaaggccgcacacgtggttacgtagagaccttatttggacgtcgccgctatgttcccgatttaaacgctcgcgtgaaatctgtccgtgaagccgccgaacgcatggcgttcaacatgcctgtacagggcacggcagctgacctcatgaaacttgcaatggtgcgcctttttccacaattgcgtgaagttggtgcccgcatgctcttgcaggtccacgatgaactcttgttagaagcgccaaaagagcgtgcggaagaggtggcagccctcgcgaaagaggttatggaaggcgtgtggcccttagcggtgcctcttgaagtcgaagttggtattggcgaggattggttggctgccaaaggataatga

SEQ ID NO: 638 - protein, 841 aa, synthetic construct
  REGION 1..841: note = Variant of DNA polymerase I from Thermus sp. strain 2.9
MHHHHHHGGSGMLPLFEPKGRVLLVDGHHLAYRNFFALKGLTTSRGEPVQGVYGFAKSLLKALKEDGDVVIVVFDAKAPSFRHEAYEAYKAGRAPTPEDFPRQLALMKELVDLLGLERLEVPGFEADDVLATLAKKAEREGYEVQILTADRDLFQLLSPRISVLHPEGHRITPEWLWEKYGLRPEQWVDFRALAGDPSDNIPGVKGIGEKTALKLLKEWGSLENLLKNLDQVKPASVREKILAHLEDLRLSLELSRVRTDLPLEVDFRGRREPDWEGLKAFLERLEFGSLLHEFGLLESPLPAEEAPWPPPEGAFLGYVLSRPEPMWAELLALAASAQGRVYRAEDPHGALRGLKEVRGLLAKDLAVVALREGLDLPPTDDPMLLAYLLDPSNTTPEGVARRYGGEWTEDAGERALLAERLHANLLGRLQGEERLLWLYEEVEKPLSRVLAHMEATGVKLDVAYLEALSLEVAAEMRRLEEEVFRLAGHSFNLNSRDQLERVLFDELGLPPIGKTEKTGKRSTSAAVLEALREVHPIVDKILQYRELAKLKGTYIDPLPALVHPKTGRLHTRFNQTATATGRLSSSDPNLQNIPVRTPLGQKIRRAFVAEEGWRLVALDYSQIELRVLAHLSGDENLIRVFQEGRDIHTQTASWMFGLSPEAIDPLMRRAAKTINFGVLYGMSAHRLSQELGIPYEEAAAFIQRYFQSYPKVKAWIEKTLEEGRTRGYVETLFGRRRYVPDLNARVKSVREAAERMAFNMPVQGTAADLMKLAMVRLFPQLREVGARMLLQVHDELLLEAPKERAEEVAALAKEVMEGVWPLAVPLEVEVGIGEDWLAAKG

SEQ ID NO: 639 - DNA, 2529 bp, synthetic construct
  misc_feature 1..2529: note = Variant of DNA polymerase I from Thermus sp. strain 2.9
  source 1..2529: mol_type = other DNA
atgcaccatcatcatcatcatggcggtagcggcatgttaccgttgttcgaacctaaaggtcgcgtgcttctggttgatggccatcatctcgcgtatcgtaacttctttgccctgaaaggattaaccaccagccgtggcgagccggtacagggtgtctacggctttgcaaagtcgctcctgaaagctctgaaagaagacggtgatgtggtgattgttgtctttgatgcgaaagcgccaagttttcgccacgaagcgtacgaagcttacaaagccgggcgtgctccaacgccggaagactttcctcgccaattggcgcttatgaaggaattagtggatttgcttggcctcgaacgcttggaagttcccggtttcgaggcagacgacgtattagcgactctcgcaaagaaagccgaacgtgagggctatgaagtccagatcttgacagcagatcgcgatcttttccagcttttatctccgcgcgtctcggtgttacacccggaagggcatcgcatcaccccggaatggctctgggagaaatatggtttgcgtcccgaacaatgggtggattttcgcgccttagtaggcgatccgagcgacaatattccgggagttaaaggtatcggcgagaagacggcgctcaagctccttaaagaatgggggtcgttggagaacttgcttaagaatttagatcaggtcaaaccagagtcagtgcgtgagaagattcttgcacacctcgaagacctccgtttaagccgcgaattgtcccgtgtacgcaccgatttgccgctcgaagttgatttccgtggccgccgcgaacctgactgggagggtcttaaagcgtttttagagcgtcttgaatttggttcgctcttgcatgaattcggccttttagaaagcccgttaccagccgaagaagcaccttggccaccgcccgaaggcgcgtttttaggttaccgtttgagtcgcccggaaccgatgtgggccgaattattggctcttgcagcgtctgcccagggacgtgtgtatcgcgcggaagaccctcatggtgcgctcaaaggcctcaaagaagtccgtggactccttgccaaagacttagctgttgttgcattgcgcgaaggtcttgatttacctccgactgatgatccaatgcttcttgcgtacctcttggacccgtcaaacacgacgcccgaaggcgtagcccgtcgttacggcggcgagtggaccgaagatgcagccgagcgcgcgttattggccgaacgtttgcacgccaatttattaggacgtttgcaaggcgaggaaaagctcctctggctttacgaagaagtggagaaaccattgagtcgcgtgctcgcgcatatggaagctaccggtgtcaaattagacgtggcgtatttggaggcactcagccttgaagttgctgccgaaatgcgccgcttggaggaagaagtattccgtttagcaggccactcctttaaccttaattctcgcgatcagttagaacgtgtgttgttcgatgaacttggtctccctcctatcggcaagacagagaagaccggtaaacgtagcacttcagcggcggttttagaagctcttcgcgaagtccatcccattgtggacaagatcttgcagtaccgcgaactcgcgaaattgaaaggcacctatattgaccctcttccggcattagtccacccgaaaacgggacgcctccatacccgcttcaaccaaacagccacggcgaccggtcgtttgtcctcctctgatccaaaccttcagaatattccagtacgtaccccattgggccagaagatccgcaaagcgtttgtagctgaggagggttggcgtttagtggccctcgattatagccaaattgaattacgtgtccttgcccatctttctggcgatgagaacctcatccgcgtgtttcaggaaggccgtgacattcacactcaaacggcaagctggatgtttggattatcagctgaagcgatcgatcctttgatgcgtcgtgcagcgaagaccgttaatttcggtgttctctacggtatgagtgcccatcgtttgtcgcaggaattaggcattccctatgaagaagctgtggcgttcattcagcgctactttcaaagctatcccaaagttaaagcatggatcgagaagactctcgaagaaggccgcacacgtggttacgtagagaccttatttggacgtcgccgctatgttcccgatttaaacgctcgcgtgaaatctgtccgtgaagccgccgaacgcatggcgttcaacatgcctgtacagggcacggcagctgacctcatgaaacttgcaatggtgcgcctttttccacaattgcgtgaagttggtgcccgcatgctcttgcaggtccacgatgaactcttgttagaagcgccaaaagagcgtgcggaagaggtggcagccctcgcgaaagaggttatggaaggcgtgtggcccttagcggtgcctcttgaagtcgaagttggtattggcgaggattggttggctgccaaaggataatga

SEQ ID NO: 640 - protein, 841 aa, synthetic construct
  REGION 1..841: note = Variant of DNA polymerase I from Thermus sp. strain 2.9
MHHHHHHGGSGMLPLFEPKGRVLLVDGHHLAYRNFFALKGLTTSRGEPVQGVYGFAKSLLKALKEDGDVVIVVFDAKAPSFRHEAYEAYKAGRAPTPEDFPRQLALMKELVDLLGLERLEVPGFEADDVLATLAKKAEREGYEVQILTADRDLFQLLSPRVSVLHPEGHRITPEWLWEKYGLRPEQWVDFRALVGDPSDNIPGVKGIGEKTALKLLKEWGSLENLLKNLDQVKPESVREKILAHLEDLRLSRELSRVRTDLPLEVDFRGRREPDWEGLKAFLERLEFGSLLHEFGLLESPLPAEEAPWPPPEGAFLGYRLSRPEPMWAELLALAASAQGRVYRAEDPHGALKGLKEVRGLLAKDLAVVALREGLDLPPTDDPMLLAYLLDPSNTTPEGVARRYGGEWTEDAAERALLAERLHANLLGRLQGEEKLLWLYEEVEKPLSRVLAHMEATGVKLDVAYLEALSLEVAAEMRRLEEEVFRLAGHSFNLNSRDQLERVLFDELGLPPIGKTEKTGKRSTSAAVLEALREVHPIVDKILQYRELAKLKGTYIDPLPALVHPKTGRLHTRFNQTATATGRLSSSDPNLQNIPVRTPLGQKIRKAFVAEEGWRLVALDYSQIELRVLAHLSGDENLIRVFQEGRDIHTQTASWMFGLSAEAIDPLMRRAAKTVNFGVLYGMSAHRLSQELGIPYEEAVAFIQRYFQSYPKVKAWIEKTLEEGRTRGYVETLFGRRRYVPDLNARVKSVREAAERMAFNMPVQGTAADLMKLAMVRLFPQLREVGARMLLQVHDELLLEAPKERAEEVAALAKEVMEGVWPLAVPLEVEVGIGEDWLAAKG

SEQ ID NO: 641 - DNA, 2529 bp, synthetic construct
  misc_feature 1..2529: note = Variant of DNA polymerase I from Thermus sp. strain 2.9
  source 1..2529: mol_type = other DNA
atgcaccatcatcatcatcatggcggtagcggcatgttaccgttgttcgaacctaaaggtcgcgtgcttctggttgatggccatcatctcgcgtatcgtaacttctttgccctgaaaggattaaccaccagccgtggcgagccggtacagggtgtctacggctttgcaaagtcgctcctgaaagctctgaaagaagacggtgatgtggtgattgttgtctttgatgcgaaagcgccaagttttcgccacgaagcgtacgaagcttacaaagccgggcgtgctccaacgccggaagactttcctcgccaattggcgcttatgaaggaattagtggatttgcttggcctcgaacgcttggaagttcccggtttcgaggcagacgacgtattagcgactctcgcaaagaaagccgaacgtgagggctatgaagtccagatcttgacagcagatcgcgatcttttccagcttttatctccgcgcatttccgtgttacacccggaagggcatcgtatcaccccggaatggctctgggagaaatatggtttgcgtcccgaacaatgggtggattttcgcgccttagcgggcgatccgagcgacaatattccgggagttaaaggtatcggcgagaagacggcgctcaagctccttaaagaatgggggtcgttggagaacttgcttaagaatttagatcaggtcaaaccagcttcagtgcgtgagaagattcttgcacacctcgaagacctcaaattaagccgcgaattgtcccgtgtacgcaccgatttgccgctcgaagttgatttccgtggccgccgcgaacctgactgggagggtcttaaagcgtttttagagcgtcttgaatttggttcgctcttgcatgaattcggccttttagaaagcccgttaccagccgaagaagcaccttggccaccgcccgaaggcgcgtttttaggttaccgtttgagtcgcccggaaccgatgtgggccgaattattggctcttgcagcgtctgcccagggacgtgtgtatcgcgcggaagaccctcatggtgcgctccgtggcctcaaagaagtccgtggactccttgccaaagacttagctgttgttgcattgcgcgaaggtcttgatttacctccgactgatgatccaatgcttcttgcgtacctcttggacccgtcaaacacgacgcccgaaggcgtagcccgtcgttacggcggcgagtggaccgaagatgcaggtgagcgcgcgttattggccgaacgtttgcacgccaatttattaggacgtttgcaaggcgaggaacgtctcctctggctttacgaagaagtggagaaaccattgagtcgcgtgctcgcgcatatggaagctaccggtgtcaaattagacgtggcgtatttggaggcactcagccttgaagttgctgccgaaatgcgccgcttggaggaagaagtattccgtttagcaggccactcctttaaccttaattctcgcgatcagttagaacgtgtgttgttcgatgaacttggtctccctcctatcggcaagacagagaagaccggtaaacgtagcacttcagcggcggttttagaagctcttcgcgaagtccatcccattgtggacaagatcttgcagtaccgcgaactcgcgaaattgaaaggcacctatattgaccctcttccggcattagtccacccgaaaacgggacgcctccatacccgcttcaaccaaacagccacggcgaccggtcgtttgtcctcctctgatccaaaccttcagaatattccagtacgtaccccattgggccagaagatccgcaaagcgtttgtagctgaggagggttggcgtttagtggccctcgattatagccaaattgaattacgtgtccttgcccatctttctggcgatgagaacctcatccgcgtgtttcaggaaggccgcgacattcacactcaaacggcaagctggatgtttggattatcagctgaagcgatcgatcctttgatgcgtcgtgcagcgaagaccatcaatttcggtgttctctacggtatgagtgcccatcgtttgtcgcaggaattaggcattccctatgaagaagctgcggcgttcattcagcgctactttcaaagctatcccaaagttaaagcatggatcgaggatactctcgaagaaggccgcacacgtggttacgtagagaccttatttggacgtcgccgctatgttcccgatttaaacgctcgcgtgaaatctgtccgtgaagccgccgaacgcatggcgttcaacatgcctgtacagggcacggcagctgacctcatgaaacttgcaatggtgcgcctttttccacaattgcgtgaagttggtgcccgcatgctcttgcaggtccacgatgaactcttgttagaagcgccaaaagagcgtgcggaagaggtggcagccctcgcgaaagaggttatggaaggcgtgtggcccttagcggtgcctcttgaagtcgaagttggtattggcgaggattggttggctgccaaaggataatga

SEQ ID NO: 642 - protein, 841 aa, synthetic construct
  REGION 1..841: note = Variant of DNA polymerase I from Thermus sp. strain 2.9
MHHHHHHGGSGMLPLFEPKGRVLLVDGHHLAYRNFFALKGLTTSRGEPVQGVYGFAKSLLKALKEDGDVVIVVFDAKAPSFRHEAYEAYKAGRAPTPEDFPRQLALMKELVDLLGLERLEVPGFEADDVLATLAKKAEREGYEVQILTADRDLFQLLSPRISVLHPEGHRITPEWLWEKYGLRPEQWVDFRALAGDPSDNIPGVKGIGEKTALKLLKEWGSLENLLKNLDQVKPASVREKILAHLEDLKLSRELSRVRTDLPLEVDFRGRREPDWEGLKAFLERLEFGSLLHEFGLLESPLPAEEAPWPPPEGAFLGYRLSRPEPMWAELLALAASAQGRVYRAEDPHGALRGLKEVRGLLAKDLAVVALREGLDLPPTDDPMLLAYLLDPSNTTPEGVARRYGGEWTEDAGERALLAERLHANLLGRLQGEERLLWLYEEVEKPLSRVLAHMEATGVKLDVAYLEALSLEVAAEMRRLEEEVFRLAGHSFNLNSRDQLERVLFDELGLPPIGKTEKTGKRSTSAAVLEALREVHPIVDKILQYRELAKLKGTYIDPLPALVHPKTGRLHTRFNQTATATGRLSSSDPNLQNIPVRTPLGQKIRKAFVAEEGWRLVALDYSQIELRVLAHLSGDENLIRVFQEGRDIHTQTASWMFGLSAEAIDPLMRRAAKTINFGVLYGMSAHRLSQELGIPYEEAAAFIQRYFQSYPKVKAWIEDTLEEGRTRGYVETLFGRRRYVPDLNARVKSVREAAERMAFNMPVQGTAADLMKLAMVRLFPQLREVGARMLLQVHDELLLEAPKERAEEVAALAKEVMEGVWPLAVPLEVEVGIGEDWLAAKG

SEQ ID NO: 643 - DNA, 2529 bp, synthetic construct
  misc_feature 1..2529: note = Variant of DNA polymerase I from Thermus sp. strain 2.9
  source 1..2529: mol_type = other DNA
atgcaccatcatcatcatcatggcggtagcggcatgttaccgttgttcgaacctaaaggtcgcgtgcttctggttgatggccatcatctcgcgtatcgtaacttctttgccctgaaaggattaaccaccagccgtggcgagccggtacagggtgtctacggctttgcaaagtcgctcctgaaagctctgaaagaagacggtgatgtggtgattgttgtctttgatgcgaaagcgccaagttttcgccacgaagcgtacgaagcttacaaagccgggcgtgctccaacgccggaagactttcctcgccaattggcgcttatgaaggaattagtggatttgcttggcctcgaacgcttggaagttcccggtttcgaggcagacgacgtattagcgactctcgcaaagaaagccgaacgtgagggctatgaagtccagatcttgacagcagatcgcgatcttttccagcttttatctccgcgcatttccgtgttacacccggaagggcatcgtatcaccccggaatggctctgggagaaatatggtttgcgtcccgaacaatgggtggattttcgcgccttagcgggcgatccgagcgacaatattccgggagttaaaggtatcggcgagaagacggcgctcaagctccttaaagaatgggggtcgttggagaacttgcttaagaatttagatcaggtcaaaccagcttcagtgcgtgagaagattcttgcacacctcgaagacctcaaattaagccgcgaattgtcgcgtgtacgcaccgatttgccgctcgaagttgatttccgtggccgccgcgaacctgactgggagggtcttaaagcgtttttagagcgtcttgaatttggttcgctcttgcatgaattcggccttttagaaagcccgttaccagccgaagaagcaccttggccaccgcccgaaggcgcgtttttaggttaccgtttgagtcgcccggaaccgatgtgggccgaattattggctcttgcagcgtctgcccagggacgtgtgtatcgcgcggaagaccctcatggtgcgctccgtggcctcaaagaagtccgtggactccttgccaaagacttagctgttgttgcattgcgcgaaggtcttgatttacctccgactgatgatccaatgcttcttgcgtacctcttggactcgtcaaacacgacgcccgaaggcgtagcccgtcgttacggcggcgagtggaccgaagatgcaggtgagcgcgcgttattggccgaacgtttgcacgccaatttattaggacgtttgcaaggcgaggaacgtctcctctggctttacgaagaagtggagaaaccattgagtcgcgtgctcgcgcatatggaagctaccggtgtcaaattagacgtggcgtatttggaggcactcagccttgaagttgctgccgaaatgcgccgcttggaggaagaagtattccgtttagcaggccactcctttaaccttaattctcgcgatcagttagaacgtgtgttgttcgatgaacttggtctccctcctatcggtaagacagagaagaccggtaaacgtagcacttcagcggcggttttagaagctcttcgcgaagtccatcccattgtggacaagatcttgcagtaccgcgaactcgcgaaattgaaaggcacctatattgaccctcttccggcattagtccacccgaaaacgggacgcctccatacccgcttcaaccaaacagccacggcgaccggtcgtttgtcctcctctgatccaaaccttcagaatattccagtacgtaccccattgggccagcatatccgcaaagcgtttgtagctgaggagggttggcgtttagtggccctcgattatagccaaattgaattacgtgtccttgcccatctttctggcgatgagaacctcatccgcgtgtttcaggaaggccgcgacattcacactcaaacggcaagctggatgtttggattatcagctgaagcgatcgatcctttgatgcgtcgtgcagcgaagaccatcaatttcggtgttctctacggtatgagtgcccatcgtttgtcgcaggaattaggcattccctatgaagaagctgcggcgttcattcagcgctactttcaaagctatcccaaagttaaagcatggatcgagaagactctcgaagaaggccgcacacgtggttacgtagagaccttatttggacgtcgccgctatgttcccgatttaaacgctcgcgtgaaatctgtccgtgaagccgccgaacgcatggcgtggaacatgcctgtacagggcacggcagctgacctcatgaaacttgcaatggtgcgcctttttccacaattgcgtgaagttggtgcccgcatgctcttgcaggtccacgatgaactcttgttagaagcgccaaaagagcgtgcggaagaggtggcagccctcgcgaaagaggttatggaaggcgtgtggcccttagcggtgcctcttgaagtcgaagttggtattggcgaggattggttggctgccaaaggataatga

SEQ ID NO: 644 - protein, 841 aa, synthetic construct
  REGION 1..841: note = Variant of DNA polymerase I from Thermus sp. strain 2.9
MHHHHHHGGSGMLPLFEPKGRVLLVDGHHLAYRNFFALKGLTTSRGEPVQGVYGFAKSLLKALKEDGDVVIVVFDAKAPSFRHEAYEAYKAGRAPTPEDFPRQLALMKELVDLLGLERLEVPGFEADDVLATLAKKAEREGYEVQILTADRDLFQLLSPRISVLHPEGHRITPEWLWEKYGLRPEQWVDFRALAGDPSDNIPGVKGIGEKTALKLLKEWGSLENLLKNLDQVKPASVREKILAHLEDLKLSRELSRVRTDLPLEVDFRGRREPDWEGLKAFLERLEFGSLLHEFGLLESPLPAEEAPWPPPEGAFLGYRLSRPEPMWAELLALAASAQGRVYRAEDPHGALRGLKEVRGLLAKDLAVVALREGLDLPPTDDPMLLAYLLDSSNTTPEGVARRYGGEWTEDAGERALLAERLHANLLGRLQGEERLLWLYEEVEKPLSRVLAHMEATGVKLDVAYLEALSLEVAAEMRRLEEEVFRLAGHSFNLNSRDQLERVLFDELGLPPIGKTEKTGKRSTSAAVLEALREVHPIVDKILQYRELAKLKGTYIDPLPALVHPKTGRLHTRFNQTATATGRLSSSDPNLQNIPVRTPLGQHIRKAFVAEEGWRLVALDYSQIELRVLAHLSGDENLIRVFQEGRDIHTQTASWMFGLSAEAIDPLMRRAAKTINFGVLYGMSAHRLSQELGIPYEEAAAFIQRYFQSYPKVKAWIEKTLEEGRTRGYVETLFGRRRYVPDLNARVKSVREAAERMAWNMPVQGTAADLMKLAMVRLFPQLREVGARMLLQVHDELLLEAPKERAEEVAALAKEVMEGVWPLAVPLEVEVGIGEDWLAAKG

SEQ ID NO: 645 - DNA, 2529 bp, synthetic construct
  misc_feature 1..2529: note = Variant of DNA polymerase I from Thermus sp. strain 2.9
  source 1..2529: mol_type = other DNA
atgcaccatcatcatcatcatggcggtagcggcatgttaccgttgttcgaacctaaaggtcgcgtgcttctggttgatggccatcatctcgcgtatcgtaacttctttgccctgaaaggattaaccaccagccgtggcgagccggtacagggtgtctacggctttgcaaagtcgctcctgaaagctctgaaagaagacggtgatgtggtgattgttgtctttgatgcgaaagcgccaagttttcgccacgaagcgtacgaagcttacaaagccgggcgtgctccaacgccggaagactttcctcgccaattggcgcttatgaaggaattagtggatttgcttggcctcgaacgcttggaagttcccggtttcgaggcagacgacgtattagcgactctcgcaaagaaagccgaacgtgagggctatgaagtccagatcttgacagcagatcgcgatcttttccagcttttatctccgcgcatttccgtgttacacccggaagggcatcgtatcaccccggaatggctctgggagaaatatggtttgcgtcccgaacaatgggtggattttcgcgccttagcgggcgatccgagcgacaatattccgggagttaaaggtatcggcgagaagacggcgctcaagctccttaaagaatgggggtcgttggagaacttgcttaagaatttagatcaggtcaaaccagcttcagtgcgtgagaagattcttgcacacctcgaagacctcaaattaagccgcgaattgtcccgtgtacgcaccgatttgccgctcgaagttgatttccgtggccgccgcgaacctgactgggagggtcttaaagcgtttttagagcgtcttgaatttggttcgctcttgcatgaattcggccttttagaaagcccgttaccagccgaagaagcaccttggccaccgcccgaaggcgcgtttttaggttaccgtttgagtcgcccggaaccgatgtgggccgaattattggctcttgcagcgtctgcccagggacgtgtgtatcgcgcggaagaccctcatggtgcgctccgtggcctcaaagaagtccgtggactccttgccaaagacttagctgttgttgcattgcgcgaaggtcttgatttacctccgactgatgatccaatgcttcttgcgtacctcttggactcgtcaaacacgacgcccgaaggcgtagcccgtcgttacggcggcgagtggaccgaagatgcaggtgagcgcgcgttattggccgaacgtttgcacgccaatttattaggacgtttgcaaggcgaggaacgtctcctctggctttacgaagaagtggagaaaccattgagtcgcgtgctcgcgcatatggaagctaccggtgtcaaattagacgtggcgtatttggaggcactcagccttgaagccgctgccgaactgcgccgcttggaggaagaagtattccgtttagcaggccactcctttaaccttaattctcgcgatcagttagaacgtgtgttgttcgatgaacttggtctccctcctatcggtaagacagagaagaccggtaaacgtagcacttcagcggcggttttagaagctcttcgcgaagtccatcccattgtggacaagatcttgcagtaccgcgaactcgcgaaattgaaaggcacctatattgaccgtcttccggcattagtccacccgaaaacgggacgcctccatacccgcttcaaccaaacagccacggcgaccggtcgtttgtcctcctctgatccaaaccttcagaatattccagtacgtaccccattgggccagcatatccgcaaagcgtttgtagctgaggagggttggcgtttagtggccctcgattatagccaaattgaattacgtgtccttgcccatctttctggcgatgagaacctcatccgcgtgtttcaggaaggccgcgacattcacactcaaacggcaagctggatgtttggactgtcagcggaagcgatcgatcctttgatgcgtcgtgcagcgaagaccatcaatttcggtgttctctacggtatgagtgcccatcgtttgtcgcaggaattaggcattccctatgaagaagctgcggcgttcattcagcgctactttcaaagctatcccaaagttaaagcatggatcgagaagactctcgaagaaggccgcacacgtggttacgtagagaccttatttggacgtcgccgctatgttcccgatttaaacgctcgcgtgaaatctgtccgtgaagccgccgaacgcatggcgttcaacatgcctgtacagggcacggcagctgacctcatgaaacttgcaatggtgcgcctttttccacaattgcgtgaagttggtgcccgcatgctcttgcaggtccacgatgaactcttgttagaagcgccaaaagagcgtgcggaagaggtggcagccctcgcgaaagaggttatggaaggcgtgtggcccttagcggtgcctcttgaagtcgaagttggtattggcgaggattggttggctgccaaaggataatga

SEQ ID NO: 646 - protein, 841 aa, synthetic construct
  REGION 1..841: note = Variant of DNA polymerase I from Thermus sp. strain 2.9
MHHHHHHGGSGMLPLFEPKGRVLLVDGHHLAYRNFFALKGLTTSRGEPVQGVYGFAKSLLKALKEDGDVVIVVFDAKAPSFRHEAYEAYKAGRAPTPEDFPRQLALMKELVDLLGLERLEVPGFEADDVLATLAKKAEREGYEVQILTADRDLFQLLSPRISVLHPEGHRITPEWLWEKYGLRPEQWVDFRALAGDPSDNIPGVKGIGEKTALKLLKEWGSLENLLKNLDQVKPASVREKILAHLEDLKLSRELSRVRTDLPLEVDFRGRREPDWEGLKAFLERLEFGSLLHEFGLLESPLPAEEAPWPPPEGAFLGYRLSRPEPMWAELLALAASAQGRVYRAEDPHGALRGLKEVRGLLAKDLAVVALREGLDLPPTDDPMLLAYLLDSSNTTPEGVARRYGGEWTEDAGERALLAERLHANLLGRLQGEERLLWLYEEVEKPLSRVLAHMEATGVKLDVAYLEALSLEAAAELRRLEEEVFRLAGHSFNLNSRDQLERVLFDELGLPPIGKTEKTGKRSTSAAVLEALREVHPIVDKILQYRELAKLKGTYIDRLPALVHPKTGRLHTRFNQTATATGRLSSSDPNLQNIPVRTPLGQHIRKAFVAEEGWRLVALDYSQIELRVLAHLSGDENLIRVFQEGRDIHTQTASWMFGLSAEAIDPLMRRAAKTINFGVLYGMSAHRLSQELGIPYEEAAAFIQRYFQSYPKVKAWIEKTLEEGRTRGYVETLFGRRRYVPDLNARVKSVREAAERMAFNMPVQGTAADLMKLAMVRLFPQLREVGARMLLQVHDELLLEAPKERAEEVAALAKEVMEGVWPLAVPLEVEVGIGEDWLAAKG

SEQ ID NO: 647 - DNA, 2529 bp, synthetic construct
  misc_feature 1..2529: note = Variant of DNA polymerase I from Thermus sp. strain 2.9
  source 1..2529: mol_type = other DNA
atgcaccatcatcatcatcatggcggtagcggcatgttaccgttgttcgaacctaaaggtcgcgtgcttctggttgatggccatcatctcgcgtatcgtaacttctttgccctgaaaggattaaccaccagccgtggcgagccggtacagggtgtctacggctttgcaaagtcgctcctgaaagctctgaaagaagacggtgatgtggtgattgttgtctttgatgcgaaagcgccaagttttcgccacgaagcgtacgaagcttacaaagccgggcgtgctccaacgccggaagactttcctcgccaattggcgcttatgaaggaattagtggatttgcttggcctcgaacgcttggaagttcccggtttcgaggcagacgacgtattagcgactctcgcaaagaaagccgaacgtgagggctatgaagtccagatcttgacagcagatcgcgatcttttccagcttttatctccgcgcatctcggtgttacacccggaagggcatcgtatcaccccggaatggctctgggagaaatatggtttgcgtcccgaacaatgggtggattttcgcgccttagtaggcgatccgagcgacaatattccgggagttaaaggtatcggcgagaagacggcgctcaagctccttaaagaatgggggtcgttggagaacttgcttaagaatttagatcaggtcaaaccagcttcagtgcgtgagaagattcttgcacacctcgaagacctcaaattaagccgcgaattgtcccgtgtacgcaccgatttgccgctcgaagttgatttccgtggccgccgcgaacctgactgggagggtcttaaagcgtttttagagcgtcttgaatttggttcgctcttgcatgaattcggccttttagaaagcccgttaccagccgaagaagcaccttggccaccgcccgaaggcgcgtttttaggttaccgtttgagtcgcccggaaccgatgtgggccgaattattggctcttgcagcgtctgcccagggacgtgtgtatcgcgcggaagaccctcatggtgcgctcaaaggcctcaaagaagtccgtggactccttgccaaagacttagctgttgttgcattgcgcgaaggtcttgatttacctccgactgatgatccaatgcttcttgcgtacctcttggacccgtcaaacacgacgcccgaaggcgtagcccgtcgttacggcggcgagtggaccgaagatgcaggtgagcgcgcgttattggccgaacgtttgcacgccaatttattaggacgtttgcaaggcgaggaacgtctcctctggctttacgaagaagtggagaaaccattgagtcgcgtgctcgcgcatatggaagctaccggtgtcaaattagacgtggcgtatttggaggcactcagccttgaagttgctgccgaaattcgccgcttggaggaagaagtattccgtttagcaggccactcctttaaccttaattctcgcgatcagttagaacgtgtgttgttcgatgaacttggtctccctcctatcggcaagacagagaagaccggtaaacgtagcacttcagcggcggttttagaagctcttcgcgaagtccatcccattgtggacaagatcttgcagtaccgcgaactcgcgaaattgaaaggcacctatattgaccctcttccggcattagtccacccgaaaacgggacgcctccatacccgcttcaaccaaacagccacggcgaccggtcgtttgtcctcctctgatccaaaccttcagaatattccagtacgtaccccattgggccagaagatccgcaaagcgtttgtagctgaggagggttggcgtttagtggccctcgattatagccaaattgaattacgtgtccttgcccatctttctggcgatgagaacctcatccgcgtgtttcaggaaggccgcgacattcacactcaaacggcaagctggatgtttggattaccggcggaagcgatcgatcctttgatgcgtcgtgcagcgaagaccatcaatttcggtgttctctacggtatgagtgcccatcgtttgtcgcaggaattaggcattccctatgaagaagctgcggcgttcattcagcgctactttcaaagctatcccaaagttaaagcatggatcgagaagactctcgaagaaggccgcacacgtggttacgtagagaccttatttggacgtcgccgctatgttcccgatttaaacgctcgcgtgaaatctgtccgtgaagccgccgaacgcatggcgttcaacatgcctgtacagggcacggcagctgacctcatgaaacttgcaatggtgcgcctttttccacaattgcgtgaagttggtgcccgcatgctcttgcaggtccacgatgaactcttgttagaagcgccaaaagagcgtgcggaagaggtggcagccctcgcgaaagaggttatggaaggcgtgtggcccttagcggtgcctcttgaagtcgaagttggtattggcgaggattggttggctgccaaaggataatga

SEQ ID NO: 648 - protein, 841 aa, synthetic construct
  REGION 1..841: note = Variant of DNA polymerase I from Thermus sp. strain 2.9
MHHHHHHGGSGMLPLFEPKGRVLLVDGHHLAYRNFFALKGLTTSRGEPVQGVYGFAKSLLKALKEDGDVVIVVFDAKAPSFRHEAYEAYKAGRAPTPEDFPRQLALMKELVDLLGLERLEVPGFEADDVLATLAKKAEREGYEVQILTADRDLFQLLSPRISVLHPEGHRITPEWLWEKYGLRPEQWVDFRALVGDPSDNIPGVKGIGEKTALKLLKEWGSLENLLKNLDQVKPASVREKILAHLEDLKLSRELSRVRTDLPLEVDFRGRREPDWEGLKAFLERLEFGSLLHEFGLLESPLPAEEAPWPPPEGAFLGYRLSRPEPMWAELLALAASAQGRVYRAEDPHGALKGLKEVRGLLAKDLAVVALREGLDLPPTDDPMLLAYLLDPSNTTPEGVARRYGGEWTEDAGERALLAERLHANLLGRLQGEERLLWLYEEVEKPLSRVLAHMEATGVKLDVAYLEALSLEVAAEIRRLEEEVFRLAGHSFNLNSRDQLERVLFDELGLPPIGKTEKTGKRSTSAAVLEALREVHPIVDKILQYRELAKLKGTYIDPLPALVHPKTGRLHTRFNQTATATGRLSSSDPNLQNIPVRTPLGQKIRKAFVAEEGWRLVALDYSQIELRVLAHLSGDENLIRVFQEGRDIHTQTASWMFGLPAEAIDPLMRRAAKTINFGVLYGMSAHRLSQELGIPYEEAAAFIQRYFQSYPKVKAWIEKTLEEGRTRGYVETLFGRRRYVPDLNARVKSVREAAERMAFNMPVQGTAADLMKLAMVRLFPQLREVGARMLLQVHDELLLEAPKERAEEVAALAKEVMEGVWPLAVPLEVEVGIGEDWLAAKG

SEQ ID NO: 649 - DNA, 2529 bp, synthetic construct
  misc_feature 1..2529: note = Variant of DNA polymerase I from Thermus sp. strain 2.9
  source 1..2529: mol_type = other DNA
atgcaccatcatcatcatcatggcggtagcggcatgttaccgttgttcgaacctaaaggtcgcgtgcttctggttgatggccatcatctcgcgtatcgtaacttctttgccctgaaaggattaaccaccagccgtggcgagccggtacagggtgtctacggctttgcaaagtcgctcctgaaagctctgaaagaagacggtgatgtggtgattgttgtctttgatgcgaaagcgccaagttttcgccacgaagcgtacgaagcttacaaagccgggcgtgctccaacgccggaagactttcctcgccaattggcgcttatgaaggaattagtggatttgcttggcctcgaacgcttggaagttcccggtttcgaggcagacgacgtattagcgactctcgcaaagaaagccgaacgtgagggctatgaagtccagatcttgacagcagatcgcgatcttttccagcttttatctccgcgcatttccgtgttacacccggaagggcatcgtatcaccccggaatggctctgggagaaatatggtttgcgtcccgaacaatgggtggattttcgcgccttagcgggcgatccgagcgacaatattccgggagttaaaggtatcggcgagaagacggcgctcaagctccttaaagaatgggggtcgttggagaacttgcttaagaatttagatcaggtcaaaccagcttcagtgcgtgagaagattcttgcacacctcgaagacctcaaattaagccgcgaattgtcccgtgtacgcaccgatttgccgctcgaagttgatttccgtggccgccgcgaacctgactgggagggtcttaaagcgtttttagagcgtcttgaatttggttcgctcttgcatgaattcggccttttagaaagcccgttaccagccgaagaagcaccttggccaccgcccgaaggcgcgtttttaggttaccgtttgagtcgcccggaaccgatgtgggccgaattattggctcttgcagcgtctgcccagggacgtgtgtatcgcgcggaagaccctcatggtgcgctccgtggcctcaaagaagtccgtggactccttgccaaagacttagctgttgttgcattgcgcgaaggtcttgatttacctccgactgatgatccaatgcttcttgcgtacctcttggacccgtcaaacacgacgcccgaaggcgtagcccgtcgttacggcggcgagtggaccgaagatgcaggtgagcgcgcgttattggccgaacgtttgcacgccaatttattaggacgtttgcaaggcgaggaacgtctcctctggctttacgaagaagtggagaaaccattgagtcgcgtgctcgcgcatatggaagctaaaggtgtcaaattagacgtggcgtatttggaggcactcagccttgaagttgctgccgaaatgcgccgcttggaggaagaagtattccgtttagcaggccactcctttaaccttaattctcgcgatcagttagaacgtgtgttgttcgatgaacttggtctccctcctatcggcaagacagagaagaccggtaaacgtagcacttcagcggcggttttagaagctcttcgcgaagtccatcccattgtggacaagatcttgcagtaccgcgaactcgcgaaattgaaaggcacctatattgaccctcttccggcattagtccacccgaaaacgggacgcctccatacccgcttcaaccaaacagccacggcgaccggtcgtttgtcctcctctgatccaaaccttcagaatattccagtacgtaccccattgggccagaagatccgcaaagcgtttgtagctgaggagggttggcgtttagtggccctcgattatagccaaattgaattacgtgtccttgcccatctttctggcgatgagaacctcatccgcgtgtttcaggaaggccgcgacattcacactcaaacggcaagctggatgtttggattatcagctgaagcgatcgatcctttgatgcgtcgtgcagcgaagaccatcaatttcggtgttctctacggtatgagtgcccatcgtttgtcgcaggaattaggcattccctatgaagaagctgcggcgttcattcagcgctactttcaaagctatcccaaagttaaagcatggatcgagaagactctcgaagaaggccgcacacgtggttacgtagagaccttatttggacgtcgccgctatgttcccgatttaaacgctcgcgtgaaatctgtccgtgaagccgccgaacgcatggcgttcaacatgcctgtacagggcacggcagctgacctcatgaaacttgcaatggtgcgcctttttccacaattgcgtgaagttggtgcccgcatgctcttgcaggtccacgatgaactcttgttagaagcgccaaaagagcgtgcggaagaggtggcagccctcgcgaaagaggttatggaaggcgtgtggcccttagcggtgcctcttgaagtcgaagttggtattggcgaggattggttggctgccaaaggataatga

SEQ ID NO: 650 - protein, 841 aa, synthetic construct
  REGION 1..841: note = Variant of DNA polymerase I from Thermus sp. strain 2.9
MHHHHHHGGSGMLPLFEPKGRVLLVDGHHLAYRNFFALKGLTTSRGEPVQGVYGFAKSLLKALKEDGDVVIVVFDAKAPSFRHEAYEAYKAGRAPTPEDFPRQLALMKELVDLLGLERLEVPGFEADDVLATLAKKAEREGYEVQILTADRDLFQLLSPRISVLHPEGHRITPEWLWEKYGLRPEQWVDFRALAGDPSDNIPGVKGIGEKTALKLLKEWGSLENLLKNLDQVKPASVREKILAHLEDLKLSRELSRVRTDLPLEVDFRGRREPDWEGLKAFLERLEFGSLLHEFGLLESPLPAEEAPWPPPEGAFLGYRLSRPEPMWAELLALAASAQGRVYRAEDPHGALRGLKEVRGLLAKDLAVVALREGLDLPPTDDPMLLAYLLDPSNTTPEGVARRYGGEWTEDAGERALLAERLHANLLGRLQGEERLLWLYEEVEKPLSRVLAHMEAKGVKLDVAYLEALSLEVAAEMRRLEEEVFRLAGHSFNLNSRDQLERVLFDELGLPPIGKTEKTGKRSTSAAVLEALREVHPIVDKILQYRELAKLKGTYIDPLPALVHPKTGRLHTRFNQTATATGRLSSSDPNLQNIPVRTPLGQKIRKAFVAEEGWRLVALDYSQIELRVLAHLSGDENLIRVFQEGRDIHTQTASWMFGLSAEAIDPLMRRAAKTINFGVLYGMSAHRLSQELGIPYEEAAAFIQRYFQSYPKVKAWIEKTLEEGRTRGYVETLFGRRRYVPDLNARVKSVREAAERMAFNMPVQGTAADLMKLAMVRLFPQLREVGARMLLQVHDELLLEAPKERAEEVAALAKEVMEGVWPLAVPLEVEVGIGEDWLAAKG

SEQ ID NO: 651 - DNA, 2529 bp, synthetic construct
  misc_feature 1..2529: note = Variant of DNA polymerase I from Thermus sp. strain 2.9
  source 1..2529: mol_type = other DNA
atgcaccatcatcatcatcatggcggtagcggcatgttaccgttgttcgaacctaaaggtcgcgtgcttctggttgatggccatcatctcgcgtatcgtaacttctttgccctgaaaggattaaccaccagccgtggcgagccggtacagggtgtctacggctttgcaaagtcgctcctgaaagctctgaaagaagacggtgatgtggtgattgttgtctttgatgcgaaagcgccaagttttcgccacgaagcgtacgaagcttacaaagccgggcgtgctccaacgccggaagactttcctcgccaattggcgcttatgaaggaattagtggatttgcttggcctcgaacgcttggaagttcccggtttcgaggcagacgacgtattagcgactctcgcaaagaaagccgaacgtgagggctatgaagtccagatcttgacagcagatcgcgatcttttccagcttttatctccgcgcatcgcggtgttacacccggaagggcatcgtatcaccccggaatggctctgggagaaatatggtttgcgtcccgaacaatgggtggattttcgcgccttagcaggcgatccgagcgacaatattccgggagttaaaggtatcggcgagaagacggcgctcaagctccttaaagaatgggggtcgttggagaacttgcttaagaatttagatcaggtcaaaccagcgtcagtgcgtgagaagattcttgcacacctcgaagacctcaaattaagccgcgaattgtcccgtgtacgcaccgatttgccgctcgaagttgatttccgtggccgccgcgaacctgactgggagggtcttaaagcgtttttagagcgtcttgaatttggttcgctcttgcatgaattcggccttttagaaagcccgttaccagccgaagaagcaccttggccaccgcccgaaggcgcgtttttaggttaccgtttgagtcgcccggaaccgatgtgggccgaattattggctcttgcagcgtctgcccagggacgtgtgtatcgcgcggaagaccctcatggtgcgctccgcggcctcaaagaagtccgtggactccttgccaaagacttagctgttgttgcattgcgcgaaggtcttgatttacctccgactgatgatccaatgcttcttgcgtacctcttggacccgtcaaacacgacgcccgaaggcgtagcccgtcgttacggcggcgagtggaccgaagatgcaggtgagcgcgcgttattggccgaacgtttgcacgccaatttattaggacgtttgcaaggcgaggaacgtctcctctggctttacgaagaagtggagaaaccattgagtcgcgtgctcgcgcatatggaagctaccggtgtcaaattagacgtggcgtatttggaggcactcagccttgaagttgctgccgaaatgcgccgcttggaggaagaagtattccgtttagcaggccactcctttaaccttaattctcgcgatcagttagaacgtgtgttgttcgatgaacttggtctccctcctatcggcaagacagagaagaccggtaaacgtagcacttcagcggcggttttagaagctcttcgcgaagtccatcccattgtggacaagatcttgcagtaccgcgaactcgcgaaattgaaaggcacctatattgaccctcttccggcattagtccacccgaaaacgggacgcctccatacccgcttcaaccaaacagccacggcgaccggtcgtttgtcctcctctgatccaaaccttcagaatattccagtacgtaccccattgggccagaagatccgccgcgcgtttgtagctgaggagggttggcgtttagtggccctcgattatagccaaattgaattacgtgtccttgcccatctttctggcgatgagaacctcatccgcgtgtttcaggaaggcaaagacattcacactcaaacggcaagctggatgtttggattatcggcggaagcgatcgatcctttgatgcgtcgtgcagcgaagaccatcaatttcggtgttctctacggtatgagtgcccatcgtttgtcgcaggaattaggcattccctatgaagaagctgcggcgttcattcagcgctactttcaaagctatcccaaagttaaagcatggatcgagaagactctcgaagaaggccgcacacgtggttacgtagagaccttatttggacgtcgccgctatgttcccgatttaaacgctcgcgtgaaatctgtccgtgaagccgccgaacgcatggcgttcaacatgcctgtacagggcacggcagctgacctcatgaaacttgcaatggtgcgcctttttccacaattgcgtgaagttggtgcccgcatgctcttgcaggtccacgatgaactcttgttagaagcgccaaaagagcgtgcggaagaggtggcagccctcgcgaaagaggttatggaaggcgtgtggcccttagcggtgcctcttgaagtcgaagttggtattggcgaggattggttggctgccaaaggataatga

SEQ ID NO: 652 - protein, 841 aa, synthetic construct
  REGION 1..841: note = Variant of DNA polymerase I from Thermus sp. strain 2.9
MHHHHHHGGSGMLPLFEPKGRVLLVDGHHLAYRNFFALKGLTTSRGEPVQGVYGFAKSLLKALKEDGDVVIVVFDAKAPSFRHEAYEAYKAGRAPTPEDFPRQLALMKELVDLLGLERLEVPGFEADDVLATLAKKAEREGYEVQILTADRDLFQLLSPRIAVLHPEGHRITPEWLWEKYGLRPEQWVDFRALAGDPSDNIPGVKGIGEKTALKLLKEWGSLENLLKNLDQVKPASVREKILAHLEDLKLSRELSRVRTDLPLEVDFRGRREPDWEGLKAFLERLEFGSLLHEFGLLESPLPAEEAPWPPPEGAFLGYRLSRPEPMWAELLALAASAQGRVYRAEDPHGALRGLKEVRGLLAKDLAVVALREGLDLPPTDDPMLLAYLLDPSNTTPEGVARRYGGEWTEDAGERALLAERLHANLLGRLQGEERLLWLYEEVEKPLSRVLAHMEATGVKLDVAYLEALSLEVAAEMRRLEEEVFRLAGHSFNLNSRDQLERVLFDELGLPPIGKTEKTGKRSTSAAVLEALREVHPIVDKILQYRELAKLKGTYIDPLPALVHPKTGRLHTRFNQTATATGRLSSSDPNLQNIPVRTPLGQKIRRAFVAEEGWRLVALDYSQIELRVLAHLSGDENLIRVFQEGKDIHTQTASWMFGLSAEAIDPLMRRAAKTINFGVLYGMSAHRLSQELGIPYEEAAAFIQRYFQSYPKVKAWIEKTLEEGRTRGYVETLFGRRRYVPDLNARVKSVREAAERMAFNMPVQGTAADLMKLAMVRLFPQLREVGARMLLQVHDELLLEAPKERAEEVAALAKEVMEGVWPLAVPLEVEVGIGEDWLAAKG

SEQ ID NO: 653 - DNA, 2529 bp, synthetic construct
  misc_feature 1..2529: note = Variant of DNA polymerase I from Thermus sp. strain 2.9
  source 1..2529: mol_type = other DNA
atgcaccatcatcatcatcatggcggtagcggcatgttaccgttgttcgaacctaaaggtcgcgtgcttctggttgatggccatcatctcgcgtatcgtaacttctttgccctgaaaggattaaccaccagccgtggcgagccggtacagggtgtctacggctttgcaaagtcgctcctgaaagctctgaaagaagacggtgatgtggtgattgttgtctttgatgcgaaagcgccaagttttcgccacgaagcgtacgaagcttacaaagccgggcgtgctccaacgccggaagactttcctcgccaattggcgcttatgaaggaattagtggatttgcttggcctcgaacgcttggaagttcccggtttcgaggcagacgacgtattagcgactctcgcaaagaaagccgaacgtgagggctatgaagtccagatcttgacagcagatcgcgatcttttccagcttttatctccgcgcatttccgtgttacacccggaagggcatcgtatcaccccggaatggctctgggagaaatatggtttgcgtcccgaacaatgggtggattttcgcgccttagcgggcgatccgagcgacaatattccgggagttaaaggtatcggcgagaagacggcgctcaagctccttaaagaatgggggtcgttggagaacttgcttaagaatttagatcaggtcaaaccagcttcagtgcgtgagaagattcttgcacacctcgaagacctcaaattaagccgcgaattgtcccgtgtacgcaccgatttgccgctcgaagttgatttccgtggccgccgcgaacctgactgggagggtcttaaagcgtttttagagcgtcttgaatttggttcgctcttgcatgaattcggccttttagaaagcccgttaccagccgaagaagcaccttggccaccgcccgaaggcgcgtttttaggttaccgtttgagtcgcccggaaccgatgtgggccgaattattggctcttgcagcgtctgcccagggacgtgtgtatcgcgcggaagaccctcatggtgcgctccgtggcctcaaagaagtccgtggactccttgccaaagacttagctgttgttgcattgcgcgaaggtcttgatttacctccgactgatgatccaatgcttcttgcgtacctcttggacccgtcaaacacgacgcccgaaggcgtagcccgtcgttacggcggcgagtggaccgaagatgcaggtgagcgcgcgttattggccgaacgtttgcacgccaatttattaggacgtttgcaaggcgaggaacgtctcctctggctttacgaagaagtggagaaaccattgagtcgcgtgctcgcgcatatggaagctaccggtgtcaaattagacgtggcgtatttggaggcactcagccttgaagttgctgccgaaatgcgccgcttggaggaagaagtattccgtttagcaggccactcctttaaccttaattctcgcgatcagttagaacgtgtgttgttcgatgaacttggtctccctcctatcggcaagacagagaagaccggtaaacgtagcacttcagcggcggttttagaagctcttcgcgaagtccatcccattgtggacaagatcttgcagtaccgcgaactcgcgaaattgaaaggcacctatattgaccctcttccggcattagtccacccgaaaacgggacgcctccatacccgcttcaaccaaacagccacggcgaccggtcgtttgtcctcctctgatccaaaccttcagaatattccagtacgtaccccattgggccagaagatccgcaaagcgtttgtagctgaggagggttggcgtttagtggccctcgattatagccaaattgaattacgtgtccttgcccatctttctggcgatgagaacctcatccgcgtgtttcagcacggccgcgacattcacactcaaacggcaagctggatgtttggattatcagctgaagcgatcgatcctttgatgcgtcgtgcagcgaagaccatcaatttcggtgttctctacggtatgagtgcccatcgtttgtcgcaggaattaggcattccctatgaagaagctgcggcgttcattcagcgctactttcaaagctatcccaaagttaaagcatggatcgagaagactctcgaagaaggccgcacacgtggttacgtagagaccttatttggacgtcgccgctatgttcccgatttaaacgctcgcgtgaaatctgtccgtgaagccgccgaacgcatggcgttcaacatgcctgtacagggcacggcagctgacctcatgaaacttgcaatggtgcgcctttttccacaattgcgtgaagttggtgcccgcatgctcttgcaggtccacgatgaactcttgttagaagcgccaaaagagcgtgcggaagaggtggcagccctcgcgaaagaggttatggaaggcgtgtggcccttagcggtgcctcttgaagtcgaagttggtattggcgaggattggttggctgccaaaggataatga

SEQ ID NO: 654 - protein, 841 aa, synthetic construct
  REGION 1..841: note = Variant of DNA polymerase I from Thermus sp. strain 2.9
MHHHHHHGGSGMLPLFEPKGRVLLVDGHHLAYRNFFALKGLTTSRGEPVQGVYGFAKSLLKALKEDGDVVIVVFDAKAPSFRHEAYEAYKAGRAPTPEDFPRQLALMKELVDLLGLERLEVPGFEADDVLATLAKKAEREGYEVQILTADRDLFQLLSPRISVLHPEGHRITPEWLWEKYGLRPEQWVDFRALAGDPSDNIPGVKGIGEKTALKLLKEWGSLENLLKNLDQVKPASVREKILAHLEDLKLSRELSRVRTDLPLEVDFRGRREPDWEGLKAFLERLEFGSLLHEFGLLESPLPAEEAPWPPPEGAFLGYRLSRPEPMWAELLALAASAQGRVYRAEDPHGALRGLKEVRGLLAKDLAVVALREGLDLPPTDDPMLLAYLLDPSNTTPEGVARRYGGEWTEDAGERALLAERLHANLLGRLQGEERLLWLYEEVEKPLSRVLAHMEATGVKLDVAYLEALSLEVAAEMRRLEEEVFRLAGHSFNLNSRDQLERVLFDELGLPPIGKTEKTGKRSTSAAVLEALREVHPIVDKILQYRELAKLKGTYIDPLPALVHPKTGRLHTRFNQTATATGRLSSSDPNLQNIPVRTPLGQKIRKAFVAEEGWRLVALDYSQIELRVLAHLSGDENLIRVFQHGRDIHTQTASWMFGLSAEAIDPLMRRAAKTINFGVLYGMSAHRLSQELGIPYEEAAAFIQRYFQSYPKVKAWIEKTLEEGRTRGYVETLFGRRRYVPDLNARVKSVREAAERMAFNMPVQGTAADLMKLAMVRLFPQLREVGARMLLQVHDELLLEAPKERAEEVAALAKEVMEGVWPLAVPLEVEVGIGEDWLAAKG

SEQ ID NO: 655 - DNA, 2529 bp, synthetic construct
  misc_feature 1..2529: note = Variant of DNA polymerase I from Thermus sp. strain 2.9
  source 1..2529: mol_type = other DNA
atgcaccatcatcatcatcatggcggtagcggcatgttaccgttgttcgaacctaaaggtcgcgtgcttctggttgatggccatcatctcgcgtatcgtaacttctttgccctgaaaggattaaccaccagccgtggcgagccggtacagggtgtctacggctttgcaaagtcgctcctgaaagctctgaaagaagacggtgatgtggtgattgttgtctttgatgcgaaagcgccaagttttcgccacgaagcgtacgaagcttacaaagccgggcgtgctccaacgccggaagactttcctcgccaattggcgcttatgaaggaattagtggatttgcttggcctcgaacgcttggaagttcccggtttcgaggcagacgacgtattagcgactctcgcaaagaaagccgaacgtgagggctatgaagtccagatcttgacagcagatcgcgatcttttccagcttttatctccgcgcatcgcggtgttacacccggaagggcatcgcatcaccccggaatggctctgggagaaatatggtttgcgtcccgaacaatgggtggattttcgcgccttagcgggcgatccgagcgacaatattccgggagttaaaggtatcggcgagaagacggcgctcaagctccttaaagaatgggggtcgttggagaacttgcttaagaatttagatcaggtcaaaccagcttcagtgcgtgagaagattcttgcacacctcgaagacctcaaattaagcctggaattgtcccgtgtacgcaccgatttgccgctcgaagttgatttccgtggccgccgcgaacctgactgggagggtcttaaagcgtttttagagcgtcttgaatttggttcgctcttgcatgaattcggccttttagaaagcccgttaccagccgaagaagcaccttggccaccgcccgaaggcgcgtttttaggttaccgtttgagtcgcccggaaccgatgtgggccgaattattggctcttgcagcgtctgcccagggacgtgtgtatcgcgcggaagaccctcatggtgcgctcaaaggcctcaaagaagtccgtggactccttgccaaagacttagctgttgttgcattgcgcgaaggtcttgatttacctccgactgatgatccaatgcttcttgcgtacctcttggacccgtcaaacacgacgcccgaaggcgtagcccgtcgttacggcggcgagtggaccgaagatgcagccgagcgcgcgttattggccgaacgtttgcacgccaatttattaggacgtttgcaaggcgaggaaaagctcctctggctttacgaagaagtggagaaaccattgagtcgcgtgctcgcgcatatggaagctaccggtgtcaaattagacgtggcgtatttggaggcactcagccttgaagttgctgccgaaatgcgccgcttggaggaagaagtattccgtttagcaggccactcctttaaccttaattctcgcgatcagttagaacgtgtgttgttcgatgaacttggtctccctcctatcggcaagacagagaagaccggtaaacgtagcacttcagcggcggttttagaagctcttcgcgaagtccatcccattgtggacaagatcttgcagtaccgcgaactcgcgaaattgaaaggcacctatattgaccctcttccggcattagtccacccgaaaacgggacgcctccatacccgcttcaaccaaacagccacggcgaccggtcgtttgtcctcctctgatccaaaccttcagaatattccagtacgtaccccattgggccagaagatccgcaaagcgtttgtagctgaggagggttggcgtttagtggccctcgattatagccaaattgaattacgtgtccttgcccatctttctggcgatgagaacctcatccgcgtgtttcaggaaggcaaagacattcacactcaaacggcaagctggatgtttggattatcgccggaagcgatcgatcctttgatgcgtcgtgcagcgaagaccattaatttcggtgttctctacggtatgagtgcccatcgtttgtcgcaggaattaggcattccctatgaagaagctgtggcgttcattcagcgctactttcaaagctatcccaaagttaaagcatggatcgagaagactctcgaagaaggccgcacacgtggttacgtagagaccttatttggacgtcgccgctatgttcccgatttaaacgctcgcgtgaaatctgtccgtgaagccgccgaacgcatggcgttcaacatgcctgtacagggcacggcagctgacctcatgaaacttgcaatggtgcgcctttttccacaattgcgtgaagttggtgcccgcatgctcttgcaggtccacgatgaactcttgttagaagcgccaaaagagcgtgcggaagaggtggcagccctcgcgaaagaggttatggaaggcgtgtggcccttagcggtgcctcttgaagtcgaagttggtattggcgaggattggttggctgccaaaggataatga

SEQ ID NO: 656 - protein, 841 aa, synthetic construct
  REGION 1..841: note = Variant of DNA polymerase I from Thermus sp. strain 2.9
MHHHHHHGGSGMLPLFEPKGRVLLVDGHHLAYRNFFALKGLTTSRGEPVQGVYGFAKSLLKALKEDGDVVIVVFDAKAPSFRHEAYEAYKAGRAPTPEDFPRQLALMKELVDLLGLERLEVPGFEADDVLATLAKKAEREGYEVQILTADRDLFQLLSPRIAVLHPEGHRITPEWLWEKYGLRPEQWVDFRALAGDPSDNIPGVKGIGEKTALKLLKEWGSLENLLKNLDQVKPASVREKILAHLEDLKLSLELSRVRTDLPLEVDFRGRREPDWEGLKAFLERLEFGSLLHEFGLLESPLPAEEAPWPPPEGAFLGYRLSRPEPMWAELLALAASAQGRVYRAEDPHGALKGLKEVRGLLAKDLAVVALREGLDLPPTDDPMLLAYLLDPSNTTPEGVARRYGGEWTEDAAERALLAERLHANLLGRLQGEEKLLWLYEEVEKPLSRVLAHMEATGVKLDVAYLEALSLEVAAEMRRLEEEVFRLAGHSFNLNSRDQLERVLFDELGLPPIGKTEKTGKRSTSAAVLEALREVHPIVDKILQYRELAKLKGTYIDPLPALVHPKTGRLHTRFNQTATATGRLSSSDPNLQNIPVRTPLGQKIRKAFVAEEGWRLVALDYSQIELRVLAHLSGDENLIRVFQEGKDIHTQTASWMFGLSPEAIDPLMRRAAKTINFGVLYGMSAHRLSQELGIPYEEAVAFIQRYFQSYPKVKAWIEKTLEEGRTRGYVETLFGRRRYVPDLNARVKSVREAAERMAFNMPVQGTAADLMKLAMVRLFPQLREVGARMLLQVHDELLLEAPKERAEEVAALAKEVMEGVWPLAVPLEVEVGIGEDWLAAKG

SEQ ID NO: 657 - DNA, 2529 bp, synthetic construct
  misc_feature 1..2529: note = Variant of DNA polymerase I from Thermus sp. strain 2.9
  source 1..2529: mol_type = other DNA
atgcaccatcatcatcatcatggcggtagcggcatgttaccgttgttcgaacctaaaggtcgcgtgcttctggttgatggccatcatctcgcgtatcgtaacttctttgccctgaaaggattaaccaccagccgtggcgagccggtacagggtgtctacggctttgcaaagtcgctcctgaaagctctgaaagaagacggtgatgtggtgattgttgtctttgatgcgaaagcgccaagttttcgccacgaagcgtacgaagcttacaaagccgggcgtgctccaacgccggaagactttcctcgccaattggcgcttatgaaggaattagtggatttgcttggcctcgaacgcttggaagttcccggtttcgaggcagacgacgtattagcgactctcgcaaagaaagccgaacgtgagggctatgaagtccagatcttgacagcagatcgcgatcttttccagcttttatctccgcgcatttccgtgttacacccggaagggcatctgatcaccccggaatggctctgggagaaatatggtttgcgtcccgaacaatgggtggattttcgcgccttagcgggcgatccgagcgacaatattccgggagttaaaggtatcggcgagaagacggcgctcaagctccttaaagaatgggggtcgttggagaacttgcttaagaatttagatcaggtcaaaccagcttcagtgcgtgagaagattcttgcacacctcgaagacctccgtttaagccgcgaattgtcccgtgtacgcaccgatttgccgctcgaagttgatttccgtggccgccgcgaacctgactgggagggtcttaaagcgtttttagagcgtcttgaatttggttcgctcttgcatgaattcggccttttagaaagcccgttaccagccgaagaagcaccttggccaccgcccgaaggcgcgtttttaggttaccgtttgagtcgcccggaaccgatgtgggccgaattattggctcttgcagcgtctgcccagggacgtgtgtatcgcgcggaagaccctcatggtgcgctccgtggcctcaaagaagtccgtggactccttgccaaagacttagctgttgttgcattgcgcgaaggtcttgatttacctccgactgatgatccaatgcttcttgcgtacctcttggacccgtcaaacacgacgcccgaaggcgtagcccgtcgttacggcggcgagtggaccgaagatgcagccgagcgcgcgttattggccgaacgtttgcacgccaatttattaggacgtttgcaaggcgaggaacgcctcctctggctttacgaagaagtggagaaaccattgagtcgcgtgctcgcgcatatggaagctaccggtgtcaaattagacgtggcgtatttggaggcactcagccttgaagttgctgccgaaatgcgccgcttggaggaagaagtattccgtttagcaggccactcctttaaccttaattctcgcgatcagttagaacgtgtgttgttcgatgaacttggtctccctcctatcggcaagacagagaagaccggtaaacgtagcacttcagcggcggttttagaagctcttcgcgaagtccatcccattgtggacaagatcttgcagtaccgcgaactcgcgaaattgaaaggcacctatattgaccctcttccggcattagtccacccgaaaacgggacgcctccatacccgcttcaaccaaacagccacggcgaccggtcgtttgtcctcctctgatccaaaccttcagaatattccagtacgtaccccattgggccagaagatccgcaaagcgtttgtagctgaggagggttggcgtttagtggccctcgattatagccaaattgaattacgtgtccttgcccatctttctggcgatgagaacctcatccgcgtgtttcaggaaggccgcgacattcacactcaaacggcaagctggatgtttggattatcagctgaagcgatcgatcctttgatgcgtcgtgcagcgaagaccatcaatttcggtgttctctacggtatgagtgcccatcgtttgtcgcaggaattaggcattccctatgaagaagctgcggcgttcattcagcgctactttcaaagctatcccaaagttaaagcatggatcgagaagactctcgaagaaggccgcacacgtggttacgtagagaccttatttggacgtcgccgctatgttcccgatttaaacgctcgcgtgaaatctgtccgtgaagccgccgaacgcatggcgttcaacatgcctgtacagggcacggcagctgacctcatgaaacttgcaatggtgcgcctttttccacaattgcgtgaagttggtgcccgcatgctcttgcaggtccacgatgaactcttgttagaagcgccaaaagagcgtgcggaagaggtggcagccctcgcgaaagaggttatggaaggcgtgtggcccttagcggtgcctcttgaagtcgaagttggtattggcgaggattggttggctgccaaaggataatga

SEQ ID NO: 658 - protein, 841 aa, synthetic construct
  REGION 1..841: note = Variant of DNA polymerase I from Thermus sp. strain 2.9
MHHHHHHGGSGMLPLFEPKGRVLLVDGHHLAYRNFFALKGLTTSRGEPVQGVYGFAKSLLKALKEDGDVVIVVFDAKAPSFRHEAYEAYKAGRAPTPEDFPRQLALMKELVDLLGLERLEVPGFEADDVLATLAKKAEREGYEVQILTADRDLFQLLSPRISVLHPEGHLITPEWLWEKYGLRPEQWVDFRALAGDPSDNIPGVKGIGEKTALKLLKEWGSLENLLKNLDQVKPASVREKILAHLEDLRLSRELSRVRTDLPLEVDFRGRREPDWEGLKAFLERLEFGSLLHEFGLLESPLPAEEAPWPPPEGAFLGYRLSRPEPMWAELLALAASAQGRVYRAEDPHGALRGLKEVRGLLAKDLAVVALREGLDLPPTDDPMLLAYLLDPSNTTPEGVARRYGGEWTEDAAERALLAERLHANLLGRLQGEERLLWLYEEVEKPLSRVLAHMEATGVKLDVAYLEALSLEVAAEMRRLEEEVFRLAGHSFNLNSRDQLERVLFDELGLPPIGKTEKTGKRSTSAAVLEALREVHPIVDKILQYRELAKLKGTYIDPLPALVHPKTGRLHTRFNQTATATGRLSSSDPNLQNIPVRTPLGQKIRKAFVAEEGWRLVALDYSQIELRVLAHLSGDENLIRVFQEGRDIHTQTASWMFGLSAEAIDPLMRRAAKTINFGVLYGMSAHRLSQELGIPYEEAAAFIQRYFQSYPKVKAWIEKTLEEGRTRGYVETLFGRRRYVPDLNARVKSVREAAERMAFNMPVQGTAADLMKLAMVRLFPQLREVGARMLLQVHDELLLEAPKERAEEVAALAKEVMEGVWPLAVPLEVEVGIGEDWLAAKG

SEQ ID NO: 659 - DNA, 2529 bp, synthetic construct
  misc_feature 1..2529: note = Variant of DNA polymerase I from Thermus sp. strain 2.9
  source 1..2529: mol_type = other DNA
atgcaccatcatcatcatcatggcggtagcggcatgttaccgttgttcgaacctaaaggtcgcgtgcttctggttgatggccatcatctcgcgtatcgtaacttctttgccctgaaaggattaaccaccagccgtggcgagccggtacagggtgtctacggctttgcaaagtcgctcctgaaagctctgaaagaagacggtgatgtggtgattgttgtctttgatgcgaaagcgccaagttttcgccacgaagcgtacgaagcttacaaagccgggcgtgctccaacgccggaagactttcctcgccaattggcgcttatgaaggaattagtggatttgcttggcctcgaacgcttggaagttcccggtttcgaggcagacgacgtattagcgactctcgcaaagaaagccgaacgtgagggctatgaagtccagatcttgacagcagatcgcgatcttttccagcttttatctccgcgcgtcgcggtgttacacccggaagggcatctgatcaccccggaatggctctgggagaaatatggtttgcgtcccgaacaatgggtggattttcgcgccttagcaggcgatccgagcgacaatattccgggagttaaaggtatcggcgagaagacggcgctcaagctccttaaagaatgggggtcgttggagaacttgcttaagaatttagatcaggtcaaaccagagtcagtgcgtgagaagattcttgcacacctcgaagacctccgtttaagcctggaattgtcccgtgtacgcaccgatttgccgctcgaagttgatttccgtggccgccgcgaacctgactgggagggtcttaaagcgtttttagagcgtcttgaatttggttcgctcttgcatgaattcggccttttagaaagcccgttaccagccgaagaagcaccttggccaccgcccgaaggcgcgtttttaggttaccgtttgagtcgcccggaaccgatgtgggccgaattattggctcttgcagcgtctgcccagggacgtgtgtatcgcgcggaagaccctcatggtgcgctccgtggcctcaaagaagtccgtggactccttgccaaagacttagctgttgttgcattgcgcgaaggtcttgatttacctccgactgatgatccaatgcttcttgcgtacctcttggacccgtcaaacacgacgcccgaaggcgtagcccgtcgttacggcggcgagtggaccgaagatgcaggcgagcgcgcgttattggccgaacgtttgcacgccaatttattaggacgtttgcaaggcgaggaacgcctcctctggctttacgaagaagtggagaaaccattgagtcgcgtgctcgcgcatatggaagctaccggtgtcaaattagacgtggcgtatttggaggcactcagccttgaagttgctgccgaaatgcgccgcttggaggaagaagtattccgtttagcaggccactcctttaaccttaattctcgcgatcagttagaacgtgtgttgttcgatgaacttggtctccctcctatcggcaagacagagaagaccggtaaacgtagcacttcagcggcggttttagaagctcttcgcgaagtccatcccattgtggacaagatcttgcagtaccgcgaactcgcgaaattgaaaggcacctatattgaccctcttccggcattagtccacccgaaaacgggacgcctccatacccgcttcaaccaaacagccacggcgaccggtcgtttgtcctcctctgatccaaaccttcagaatattccagtacgtaccccattgggccagaagatccgcaaagcgtttgtagctgaggagggttggcgtttagtggccctcgattatagccaaattgaattacgtgtccttgcccatctttctggcgatgagaacctcatccgcgtgtttcaggaaggccgcgacattcacactcaaacggcaagctggatgtttggattatcagctgaagcgatcgatcctttgatgcgtcgtgcagcgaagaccattaatttcggtgttctctacggtatgagtgcccatcgtttgtcgcaggaattaggcattccctatgaagaagctgcggcgttcattcagcgctactttcaaagctatcccaaagttaaagcatggatcgagaagactctcgaagaaggccgcacacgtggttacgtagagaccttatttggacgtcgccgctatgttcccgatttaaacgctcgcgtgaaatctgtccgtgaagccgccgaacgcatggcgttcaacatgcctgtacagggcacggcagctgacctcatgaaacttgcaatggtgcgcctttttccacaattgcgtgaagttggtgcccgcatgctcttgcaggtccacgatgaactcttgttagaagcgccaaaagagcgtgcggaagaggtggcagccctcgcgaaagaggttatggaaggcgtgtggcccttagcggtgcctcttgaagtcgaagttggtattggcgaggattggttggctgccaaaggataatga

SEQ ID NO: 660 - protein, 841 aa, synthetic construct
  REGION 1..841: note = Variant of DNA polymerase I from Thermus sp. strain 2.9
MHHHHHHGGSGMLPLFEPKGRVLLVDGHHLAYRNFFALKGLTTSRGEPVQGVYGFAKSLLKALKEDGDVVIVVFDAKAPSFRHEAYEAYKAGRAPTPEDFPRQLALMKELVDLLGLERLEVPGFEADDVLATLAKKAEREGYEVQILTADRDLFQLLSPRVAVLHPEGHLITPEWLWEKYGLRPEQWVDFRALAGDPSDNIPGVKGIGEKTALKLLKEWGSLENLLKNLDQVKPESVREKILAHLEDLRLSLELSRVRTDLPLEVDFRGRREPDWEGLKAFLERLEFGSLLHEFGLLESPLPAEEAPWPPPEGAFLGYRLSRPEPMWAELLALAASAQGRVYRAEDPHGALRGLKEVRGLLAKDLAVVALREGLDLPPTDDPMLLAYLLDPSNTTPEGVARRYGGEWTEDAGERALLAERLHANLLGRLQGEERLLWLYEEVEKPLSRVLAHMEATGVKLDVAYLEALSLEVAAEMRRLEEEVFRLAGHSFNLNSRDQLERVLFDELGLPPIGKTEKTGKRSTSAAVLEALREVHPIVDKILQYRELAKLKGTYIDPLPALVHPKTGRLHTRFNQTATATGRLSSSDPNLQNIPVRTPLGQKIRKAFVAEEGWRLVALDYSQIELRVLAHLSGDENLIRVFQEGRDIHTQTASWMFGLSAEAIDPLMRRAAKTINFGVLYGMSAHRLSQELGIPYEEAAAFIQRYFQSYPKVKAWIEKTLEEGRTRGYVETLFGRRRYVPDLNARVKSVREAAERMAFNMPVQGTAADLMKLAMVRLFPQLREVGARMLLQVHDELLLEAPKERAEEVAALAKEVMEGVWPLAVPLEVEVGIGEDWLAAKG

SEQ ID NO: 661 - DNA, 2529 bp, synthetic construct
  misc_feature 1..2529: note = Variant of DNA polymerase I from Thermus sp. strain 2.9
  source 1..2529: mol_type = other DNA
atgcaccatcatcatcatcatggcggtagcggcatgttaccgttgttcgaacctaaaggtcgcgtgcttctggttgatggccatcatctcgcgtatcgtaacttctttgccctgaaaggattaaccaccagccgtggcgagccggtacagggtgtctacggctttgcaaagtcgctcctgaaagctctgaaagaagacggtgatgtggtgattgttgtctttgatgcgaaagcgccaagttttcgccacgaagcgtacgaagcttacaaagccgggcgtgctccaacgccggaagactttcctcgccaattggcgcttatgaaggaattagtggatttgcttggcctcgaacgcttggaagttcccggtttcgaggcagacgacgtattagcgactctcgcaaagaaagccgaacgtgagggctatgaagtccagatcttgacagcagatcgcgatcttttccagcttttatctccgcgcatttccgtgttacacccggaagggcatcgtatcaccccggaatggctctgggagaaatatggtttgcgtcccgaacaatgggtggattttcgcgccttagcgggcgatccgagcgacaatattccgggagttaaaggtatcggcgagaagacggcgctcaagctccttaaagaatgggggtcgttggagaacttgcttaagaatttagatcaggtcaaaccagcttcagtgcgtgagaagattcttgcacacctcgaagacctcaaattaagccgcgaattgtcccgtgtacgcaccgatttgccgctcgaagttgatttccgtggccgccgcgaacctgactgggagggtcttaaagcgtttttagagcgtcttgaatttggttcgctcttgcatgaattcggccttttagaaagcccgttaccagccgaagaagcaccttggccaccgcccgaaggcgcgtttttaggttaccgtttgagtcgcccggaaccgatgtgggccgaattattggctcttgcagcgtctgcccagggacgtgtgtatcgcgcggaagacatccatggtgcgctccgtggcctcaaagaagtccgtggactccttgccaaagacttagctgttgttgcattgcgcgaaggtcttgatttacctccgactgatgatccaatgcttcttgcgtacctcttggacccgtcaaacacgacgcccgaaggcgtagcccgtcgttacggcggcgagtggaccgaagatgcaggtgagcgcgcgttattggccgaacgtttgcacgccaatttattaggacgtttgcaaggcgaggaacgtctcctctggctttacgaagaagtggagaaaccattgagtcgcgtgctcgcgcatatggaagctaccggtgtcaaattagacgtggcgtatttggaggcactcagccttgaagttgctgccgaaatgcgccgcttggaggaagaagtattccgtttagcaggccactcctttaaccttaattctcgcgatcagttagaacgtgtgttgttcgatgaacttggtctccctcctatcggcaagacagagaagaccggtaaacgtagcacttcagcggcggttttagaagctcttcgcgaagtccatcccattgtggacaagatcttgcagtaccgcgaactcgcgaaattgaaaggcacctatattgaccctcttccggcattagtccacccgaaaacgggacgcctccatacccgcttcaaccaaacagccacggcgaccggtcgtttgtcctcctctgatccaaaccttcagaatattccagtacgtaccccattgggccagaagatccgcaaagcgtttgtagctgaggagggttggcgtttagtggccctcgattatagccaaattgaattacgtgtccttgcccatctttctggcgatgagaacctcatccgcgtgtttcaggaaggccgcgacattcacactcaaacggcaagctggatgtttggattatcagctgaagcgatcgatcctttgatgcgtcgtgcagcgaagaccatcaatttcggtgttctctacggtatgagtgcccatcgtttgtcgcaggaattaggcattccctatgaagaagctgcggcgttcattcagcgctactttcaaagctatcccaaagttaaagcatggatcgagaagactctcgaagaaggccgcacacgtggttacgtagagaccttatttggacgtcgccgctatgttcccgatttaaacgctcgcgtgaaatctgtccgtgaagccgccgaacgcatggcgttcaacatgcctgtacagggcacggcagctgacctcatgaaacttgcaatggtgcgcctttttccacaattgcgtgaagttggtgcccgcatgctcttgcaggtccacgatgaactcttgttagaagcgccaaaagagcgtgcggaagaggtggcagccctcgcgaaagaggttatggaaggcgtgtggcccttagcggtgcctcttgaagtcgaagttggtattggcgaggattggttggctgccaaaggataatga

SEQ ID NO: 662 - protein, 841 aa, synthetic construct
  REGION 1..841: note = Variant of DNA polymerase I from Thermus sp. strain 2.9
MHHHHHHGGSGMLPLFEPKGRVLLVDGHHLAYRNFFALKGLTTSRGEPVQGVYGFAKSLLKALKEDGDVVIVVFDAKAPSFRHEAYEAYKAGRAPTPEDFPRQLALMKELVDLLGLERLEVPGFEADDVLATLAKKAEREGYEVQILTADRDLFQLLSPRISVLHPEGHRITPEWLWEKYGLRPEQWVDFRALAGDPSDNIPGVKGIGEKTALKLLKEWGSLENLLKNLDQVKPASVREKILAHLEDLKLSRELSRVRTDLPLEVDFRGRREPDWEGLKAFLERLEFGSLLHEFGLLESPLPAEEAPWPPPEGAFLGYRLSRPEPMWAELLALAASAQGRVYRAEDIHGALRGLKEVRGLLAKDLAVVALREGLDLPPTDDPMLLAYLLDPSNTTPEGVARRYGGEWTEDAGERALLAERLHANLLGRLQGEERLLWLYEEVEKPLSRVLAHMEATGVKLDVAYLEALSLEVAAEMRRLEEEVFRLAGHSFNLNSRDQLERVLFDELGLPPIGKTEKTGKRSTSAAVLEALREVHPIVDKILQYRELAKLKGTYIDPLPALVHPKTGRLHTRFNQTATATGRLSSSDPNLQNIPVRTPLGQKIRKAFVAEEGWRLVALDYSQIELRVLAHLSGDENLIRVFQEGRDIHTQTASWMFGLSAEAIDPLMRRAAKTINFGVLYGMSAHRLSQELGIPYEEAAAFIQRYFQSYPKVKAWIEKTLEEGRTRGYVETLFGRRRYVPDLNARVKSVREAAERMAFNMPVQGTAADLMKLAMVRLFPQLREVGARMLLQVHDELLLEAPKERAEEVAALAKEVMEGVWPLAVPLEVEVGIGEDWLAAKG

SEQ ID NO: 663 - DNA, 2529 bp, synthetic construct
  misc_feature 1..2529: note = Variant of DNA polymerase I from Thermus sp. strain 2.9
  source 1..2529: mol_type = other DNA
atgcaccatcatcatcatcatggcggtagcggcatgttaccgttgttcgaacctaaaggtcgcgtgcttctggttgatggccatcatctcgcgtatcgtaacttctttgccctgaaaggattaaccaccagccgtggcgagccggtacagggtgtctacggctttgcaaagtcgctcctgaaagctctgaaagaagacggtgatgtggtgattgttgtctttgatgcgaaagcgccaagttttcgccacgaagcgtacgaagcttacaaagccgggcgtgctccaacgccggaagactttcctcgccaattggcgcttatgaaggaattagtggatttgcttggcctcgaacgcttggaagttcccggtttcgaggcagacgacgtattagcgactctcgcaaagaaagccgaacgtgagggctatgaagtccagatcttgacagcagatcgcgatcttttccagcttttatctccgcgcgtctcggtgttacacccggaagggcatcgtatcaccccggaatggctctgggagaaatatggtttgcgtcccgaacaatgggtggattttcgcgccttagcgggcgatccgagcgacaatattccgggagttaaaggtatcggcgagaagacggcgctcaagctccttaaagaatgggggtcgttggagaacttgcttaagaatttagatcaggtcaaaccagcgtcagtgcgtgagaagattcttgcacacctcgaagacctcaaattaagccgcgaattgtcccgtgtacgcaccgatttgccgctcgaagttgatttccgtggccgccgcgaacctgactgggagggtcttaaagcgtttttagagcgtcttgaatttggttcgctcttgcatgaattcggccttttagaaagcccgttaccagccgaagaagcaccttggccaccgcccgaaggcgcgtttttaggttaccgtttgagtcgcccggaaccgatgtgggccgaattattggctcttgcagcgtctgcccagggacgtgtgtatcgcgcggaagaccctcatggtgcgctccgtggcctcaaagaagtccgtggactccttgccaaagacttagctgttgttgcattgcgcgaaggtcttgatttacctccgactgatgatccaatgcttcttgcgtacctcttggacccgtcaaacacgacgcccgaaggcgtagcccgtcgttacggcggcgagtggaccgaagatgcaggtgagcgcgcgttattggccgaacgtttgcaccagaatttattaggacgtttgcaaggcgaggaacgtctcctctggctttacgaagaagtggagaaaccattgagtcgcgtgctcgcgcatatggaagctaccggtgtcaaattagacgtggcgtatttggaggcactcagccttgaagttgctgccgaaatgcgccgcttggaggaagaagtattccgtttagcaggccactcctttaaccttaattctcgcgatcagttagaacgtgtgttgttcgatgaacttggtctccctcctatcggcaagacagagaagaccggtaaacgtagcacttcagcggcggttttagaagctcttcgcgaagtccatcccattgtggacaagatcttgcagtaccgcgaactcgcgaaattgaaaggcacctatattgaccctcttccggcattagtccacccgaaaacgggacgcctccatacccgcttcaaccaaacagccacggcgaccggtcgtttgtcctcctctgatccaaaccttcagaatattccagtacgtaccccattgggccagaagatccgcaaagcgtttgtagctgaggagggttggcgtttagtggccctcgattatagccaaattgaattacgtgtccttgcccatctttctggcgatgagaacctcatccgcgtgtttcaggaaggcaaagacattcacactcaaacggcaagctggatgtttggattatcagctgaagcgatcgatcctttgatgcgtcgtgcagcgaagaccatcaatttcggtgttctctacggtatgagtgcccatcgtttgtcgcaggaattaggcattccctatgaagaagctgcggcgttcattcagcgctactttcaaagctatcccaaagttaaagcatggatcgagaagactctcgaagaaggccgcacacgtggttacgtagagaccttatttggacgtcgccgctatgttcccgatttaaacgctcgcgtgaaatctgtccgtgaagccgccgaacgcatggcgttcaacatgcctgtacagggcacggcagctgacctcatgaaacttgcaatggtgcgcctttttccacaattgcgtgaagttggtgcccgcatgctcttgcaggtccacgatgaactcttgttagaagcgccaaaagagcgtgcggaagaggtggcagccctcgcgaaagaggttatggaaggcgtgtggcccttagcggtgcctcttgaagtcgaagttggtattggcgaggattggttggctgccaaaggataatga

SEQ ID NO: 664 - protein, 841 aa, synthetic construct
  REGION 1..841: note = Variant of DNA polymerase I from Thermus sp. strain 2.9
MHHHHHHGGSGMLPLFEPKGRVLLVDGHHLAYRNFFALKGLTTSRGEPVQGVYGFAKSLLKALKEDGDVVIVVFDAKAPSFRHEAYEAYKAGRAPTPEDFPRQLALMKELVDLLGLERLEVPGFEADDVLATLAKKAEREGYEVQILTADRDLFQLLSPRVSVLHPEGHRITPEWLWEKYGLRPEQWVDFRALAGDPSDNIPGVKGIGEKTALKLLKEWGSLENLLKNLDQVKPASVREKILAHLEDLKLSRELSRVRTDLPLEVDFRGRREPDWEGLKAFLERLEFGSLLHEFGLLESPLPAEEAPWPPPEGAFLGYRLSRPEPMWAELLALAASAQGRVYRAEDPHGALRGLKEVRGLLAKDLAVVALREGLDLPPTDDPMLLAYLLDPSNTTPEGVARRYGGEWTEDAGERALLAERLHQNLLGRLQGEERLLWLYEEVEKPLSRVLAHMEATGVKLDVAYLEALSLEVAAEMRRLEEEVFRLAGHSFNLNSRDQLERVLFDELGLPPIGKTEKTGKRSTSAAVLEALREVHPIVDKILQYRELAKLKGTYIDPLPALVHPKTGRLHTRFNQTATATGRLSSSDPNLQNIPVRTPLGQKIRKAFVAEEGWRLVALDYSQIELRVLAHLSGDENLIRVFQEGKDIHTQTASWMFGLSAEAIDPLMRRAAKTINFGVLYGMSAHRLSQELGIPYEEAAAFIQRYFQSYPKVKAWIEKTLEEGRTRGYVETLFGRRRYVPDLNARVKSVREAAERMAFNMPVQGTAADLMKLAMVRLFPQLREVGARMLLQVHDELLLEAPKERAEEVAALAKEVMEGVWPLAVPLEVEVGIGEDWLAAKG

SEQ ID NO: 665 - DNA, 2529 bp, synthetic construct
  misc_feature 1..2529: note = Variant of DNA polymerase I from Thermus sp. strain 2.9
  source 1..2529: mol_type = other DNA
atgcaccatcatcatcatcatggcggtagcggcatgttaccgttgttcgaacctaaaggtcgcgtgcttctggttgatggccatcatctcgcgtatcgtaacttctttgccctgaaaggattaaccaccagccgtggcgagccggtacagggtgtctacggctttgcaaagtcgctcctgaaagctctgaaagaagacggtgatgtggtgattgttgtctttgatgcgaaagcgccaagttttcgccacgaagcgtacgaagcttacaaagccgggcgtgctccaacgccggaagactttcctcgccaattggcgcttatgaaggaattagtggatttgcttggcctcgaacgcttggaagttcccggtttcgaggcagacgacgtattagcgactctcgcaaagaaagccgaacgtgagggctatgaagtccagatcttgacagcagatcgcgatcttttccagcttttatctccgcgcatttccgtgttacacccggaagggcatcgtatcaccccggaatggctctgggagaaatatggtttgcgtcccgaacaatgggtggattttcgcgccttagcgggcgatccgagcgacaatattccgggagttaaaggtatcggcgagaagacggcgctcaagctccttaaagaatgggggtcgttggagaacttgcttaagaatttagatcaggtcaaaccagcttcagtgcgtgagaagattcttgcacacctcgaagacctcaaattaagccgcgaattgtcgcgtgtacgcaccgatttgccgctcgaagttgatttccgtggccgccgcgaacctgactgggagggtcttaaagcgtttttagagcgtcttgaactgggttcgctcttgcatgaattcggccttttagaaagcccgttaccagccgaagaagcaccttggccaccgcccgaaggcgcgtttttaggttaccgtttgagtcgcccggaaccgatgtgggccgaattattggctcttgcagcgtctgcccagggacgtgtgtatcgcgcggaagaccctcatggtgcgctccgtggcctcaaagaagtccgtggactccttgccaaagacttagctgttgttgcattgcgcgaaggtcttgatttacctccgactgatgatccaatgcttcttgcgtacctcttggactcgtcaaacacgacgcccgaaggcgtagcccgtcgttacggcggcgagtggaccgaagatgcaggtgagcgcgcgttattggccgaacgtttgcacgccaatttattaggacgtttgcaaggcgaggaacgtctcctctggctttacgaagaagtggagaaaccattgagtcgcgtgctcgcgcatatggaagctaccggtgtcaaattagacgtggcgtatttggaggcactcagccttgaagttgctgccgaaatgcgccgcttggaggaagaagtattccgtttagcaggccactcctttaaccttaattctcgcgatcagttagaacgtgtgttgttcgatgaacttggtctccctcctatcggcaagacagagaagaccggtaaacgtagcacttcagcggcggttttagaagctcttcgcgaagtccatcccattgtggacaagatcttgcagtaccgcgaactcgcgaaattgaaaggcacctatattgaccctcttccggcattagtccacccgaaaacgggacgcctccatacccgcttcaaccaaacagccacggcgaccggtcgtttgtcctcctctgatccaaaccttcagaatattccagtacgtaccccattgggccagcatatccgcaaagcgtttgtagctgaggagggttggcgtttagtggccctcgattatagccaaattgaattacgtgtccttgcccatctttctggcgatgagaacctcatccgcgtgtttcaggaaggccgcgacattcacactcaaacggcaagctggatgtttggactgtcagcggaagcgatcgatcctttgatgcgtcgtgcagcgaagaccatcaatttcggtgttctctacggtatgagtgcccatcgtttgtcgcaggaattaggcattccctatgaagaagctgcggcgttcattcagcgctactttcaaagctatcccaaagttaaagcatggatcgagaagactctcgaagaaggccgcacacgtggttacgtagagaccttatttggacgtcgccgctatgttcccgatttaaacgctcgcgtgaaatctgtccgtgaagccgccgaacgcatggcgttcaacatgcctgtacagggcacggcagctgacctcatgaaacttgcaatggtgcgcctttttccacaattgcgtgaagttggtgcccgcatgctcttgcaggtccacgatgaactcttgttagaagcgccaaaagagcgtgcggaagaggtggcagccctcgcgaaagaggttatggaaggcgtgtggcccttagcggtgcctcttgaagtcgaagttggtattggcgaggattggttggctgccaaaggataatga

SEQ ID NO: 666 - protein, 841 aa, synthetic construct
  REGION 1..841: note = Variant of DNA polymerase I from Thermus sp. strain 2.9
MHHHHHHGGSGMLPLFEPKGRVLLVDGHHLAYRNFFALKGLTTSRGEPVQGVYGFAKSLLKALKEDGDVVIVVFDAKAPSFRHEAYEAYKAGRAPTPEDFPRQLALMKELVDLLGLERLEVPGFEADDVLATLAKKAEREGYEVQILTADRDLFQLLSPRISVLHPEGHRITPEWLWEKYGLRPEQWVDFRALAGDPSDNIPGVKGIGEKTALKLLKEWGSLENLLKNLDQVKPASVREKILAHLEDLKLSRELSRVRTDLPLEVDFRGRREPDWEGLKAFLERLELGSLLHEFGLLESPLPAEEAPWPPPEGAFLGYRLSRPEPMWAELLALAASAQGRVYRAEDPHGALRGLKEVRGLLAKDLAVVALREGLDLPPTDDPMLLAYLLDSSNTTPEGVARRYGGEWTEDAGERALLAERLHANLLGRLQGEERLLWLYEEVEKPLSRVLAHMEATGVKLDVAYLEALSLEVAAEMRRLEEEVFRLAGHSFNLNSRDQLERVLFDELGLPPIGKTEKTGKRSTSAAVLEALREVHPIVDKILQYRELAKLKGTYIDPLPALVHPKTGRLHTRFNQTATATGRLSSSDPNLQNIPVRTPLGQHIRKAFVAEEGWRLVALDYSQIELRVLAHLSGDENLIRVFQEGRDIHTQTASWMFGLSAEAIDPLMRRAAKTINFGVLYGMSAHRLSQELGIPYEEAAAFIQRYFQSYPKVKAWIEKTLEEGRTRGYVETLFGRRRYVPDLNARVKSVREAAERMAFNMPVQGTAADLMKLAMVRLFPQLREVGARMLLQVHDELLLEAPKERAEEVAALAKEVMEGVWPLAVPLEVEVGIGEDWLAAKG

SEQ ID NO: 667 - DNA, 2529 bp, synthetic construct
  misc_feature 1..2529: note = Variant of DNA polymerase I from Thermus sp. strain 2.9
  source 1..2529: mol_type = other DNA
atgcaccatcatcatcatcatggcggtagcggcatgttaccgttgttcgaacctaaaggtcgcgtgcttctggttgatggccatcatctcgcgtatcgtaacttctttgccctgaaaggattaaccaccagccgtggcgagccggtacagggtgtctacggctttgcaaagtcgctcctgaaagctctgaaagaagacggtgatgtggtgattgttgtctttgatgcgaaagcgccaagttttcgccacgaagcgtacgaagcttacaaagccgggcgtgctccaacgccggaagactttcctcgccaattggcgcttatgaaggaattagtggatttgcttggcctcgaacgcttggaagttcccggtttcgaggcagacgacgtattagcgactctcgcaaagaaagccgaacgtgagggctatgaagtccagatcttgacagcagatcgcgatcttttccagcttttatctccgcgcatttccgtgttacacccggaagtacatcgtatcaccccggaatggctctgggagaaatatggtttgcgtcccgaacaatgggtggattttcgcgccttagcgggcgatccgagcgacaatattccgggagttaaaggtatcggcgagaagacggcgctcaagctccttaaagaatgggggtcgttggagaacttgcttaagaatttagatcaggtcaaaccagcttcagtgcgtgagaagattcttgcacacctcgaagacctcaaattaagccgcgaattgtcccgtgtacgcaccgatttgccgctcgaagttgatttccgtggccgccgcgaacctgactgggagggtcttaaagcgtttttagagcgtcttgaatttggttcgctcttgcatgaattcggccttttagaaagcccgttaccagccgaagaagcaccttggccaccgcccgaaggcgcgtttttaggttaccgtttgagtcgcccggaaccgatgtgggccgaattattggctcttgcagcgtctgcccagggacgtgtgtatcgcgcggaagaccctcatggtgcgctccgtggcctcaaagaagtccgtggactccttgccaaagacttagctgttgttgcattgcgcgaaggtcttgatttacctccgactgatgatccaatgcttcttgcgtacctcttggacccgtcaaacacgacgcccgaaggcgtagcccgtcgttacggcggcgagtggaccgaagatgcaggtgagcgcgcgttattggccgaacgtttgcacgccaatttattaggacgtttgcaaggcgaggaacgtctcctctggctttacgaagaagtggagaaaccattgagtcgcgtgctcgcgcatatggaagctaccggtgtcaaattagacgtggcgtatttggaggcactcagccttgaagttgctgccgaaatgcgccgcttggaggaagaagtattccgtttagcaggccactcctttaaccttaattctcgcgatcagttagaacgtgtgttgttcgatgaacttggtctccctcctatcggcaagacagagaagaccggtaaacgtagcacttcagcggcggttttagaagctcttcgcgaagtccatcccattgtggacaagatcttgcagtaccgcgaactcgcgaaattgaaaggcacctatattgaccctcttccggcattagtccacccgaaaacgggacgcctccatacccgcttcaaccaaacagccacggcgaccggtcgtttgtcctcctctgatccaaaccttcagaatattccagtacgtaccccattgggccagaagatccgcaaagcgtttgtagctgaggagggttggcgtttagtggccctcgattatagccaaattgaattacgtgtccttgcccatctttctggcgatgagaacctcatccgcgtgtttcaggaaggccgcgacattcacactcaaacggcaagctggatgtttggattatcagctgaagcgatcgatcctttgatgcgtcgtgcagcgaagaccatcaatttcggtgttctctacggtatgagtgcccatcgtttgtcgcaggaattaggcattccctatgaagaagctgcggcgttcattcagcgctactttcaaagctatcccaaagttaaagcatggatcgagaagactctcgaagaaggccgcacacgtggttacgtagagaccttatttggacgtcgccgctatgttcccgatttaaacgctcgcgtgaaatctgtccgtgaagccgccgaacgcatggcgttcaacatgcctgtacagggcacggcagctgacctcatgaaacttgcaatggtgcgcctttttccacaattgcgtgaagttggtgcccgcatgctcttgcaggtccacgatgaactcttgttagaagcgccaaaagagcgtgcggaagaggtggcagccctcgcgaaagaggttatggaaggcgtgtggcccttagcggtgcctcttgaagtcgaagttggtattggcgaggattggttggctgccaaaggataatga

SEQ ID NO: 668 - protein, 841 aa, synthetic construct
  REGION 1..841: note = Variant of DNA polymerase I from Thermus sp. strain 2.9
MHHHHHHGGSGMLPLFEPKGRVLLVDGHHLAYRNFFALKGLTTSRGEPVQGVYGFAKSLLKALKEDGDVVIVVFDAKAPSFRHEAYEAYKAGRAPTPEDFPRQLALMKELVDLLGLERLEVPGFEADDVLATLAKKAEREGYEVQILTADRDLFQLLSPRISVLHPEVHRITPEWLWEKYGLRPEQWVDFRALAGDPSDNIPGVKGIGEKTALKLLKEWGSLENLLKNLDQVKPASVREKILAHLEDLKLSRELSRVRTDLPLEVDFRGRREPDWEGLKAFLERLEFGSLLHEFGLLESPLPAEEAPWPPPEGAFLGYRLSRPEPMWAELLALAASAQGRVYRAEDPHGALRGLKEVRGLLAKDLAVVALREGLDLPPTDDPMLLAYLLDPSNTTPEGVARRYGGEWTEDAGERALLAERLHANLLGRLQGEERLLWLYEEVEKPLSRVLAHMEATGVKLDVAYLEALSLEVAAEMRRLEEEVFRLAGHSFNLNSRDQLERVLFDELGLPPIGKTEKTGKRSTSAAVLEALREVHPIVDKILQYRELAKLKGTYIDPLPALVHPKTGRLHTRFNQTATATGRLSSSDPNLQNIPVRTPLGQKIRKAFVAEEGWRLVALDYSQIELRVLAHLSGDENLIRVFQEGRDIHTQTASWMFGLSAEAIDPLMRRAAKTINFGVLYGMSAHRLSQELGIPYEEAAAFIQRYFQSYPKVKAWIEKTLEEGRTRGYVETLFGRRRYVPDLNARVKSVREAAERMAFNMPVQGTAADLMKLAMVRLFPQLREVGARMLLQVHDELLLEAPKERAEEVAALAKEVMEGVWPLAVPLEVEVGIGEDWLAAKG

SEQ ID NO: 669 - DNA, 2529 bp, synthetic construct
  misc_feature 1..2529: note = Variant of DNA polymerase I from Thermus sp. strain 2.9
  source 1..2529: mol_type = other DNA
atgcaccatcatcatcatcatggcggtagcggcatgttaccgttgttcgaacctaaaggtcgcgtgcttctggttgatggccatcatctcgcgtatcgtaacttctttgccctgaaaggattaaccaccagccgtggcgagccggtacagggtgtctacggctttgcaaagtcgctcctgaaagctctgaaagaagacggtgatgtggtgattgttgtctttgatgcgaaagcgccaagttttcgccacgaagcgtacgaagcttacaaagccgggcgtgctccaacgccggaagactttcctcgccaattggcgcttatgaaggaattagtggatttgcttggcctcgaacgcttggaagttcccggtttcgaggcagacgacgtattagcgactctcgcaaagaaagccgaacgtgagggctatgaagtccagatcttgacagcagatcgcgatcttttccagcttttatctccgcgcatttccgtgttacacccggaagggcatcgtatcaccccggaatggctctgggagaaatatggtttgcgtcccgaacaatgggtggattttcgcgccttagcgggcgatccgagcgacaatattccgggagttaaaggtatcggcgagaagacggcgctcaagctccttaaagaatgggggtcgttggagaacttgcttaagaatttagatcaggtcaaaccagcttcagtgcgtgagaagattcttgcacacctcgaagacctcaaattaagccgcgaattgtcccgtgtacgcaccgatttgccgctcgaagttgatttccgtggccgccgcgaacctgactgggagggtcttatcgcgtttttagagcgtcttgaatttggttcgctcttgcatgaattcggccttttagaaagcccgttaccagccgaagaagcaccttggccaccgcccgaaggcgcgtttttaggttaccgtttgagtcgcccggaaccgatgtgggccgaattattggctcttgcagcgtctgcccagggacgtgtgtatcgcgcggaagaccctcatggtgcgctccgtggcctcaaagaagtccgtggactccttgccaaagacttagctgttgttgcattgcgcgaaggtcttgatttacctccgactgatgatccaatgcttcttgcgtacctcttggacccgtcaaacacgacgcccgaaggcgtagcccgtcgttacggcggcgagtggaccgaagatgcaggtgagcgcgcgttattggccgaacgtttgcacgccaatttattaggacgtttgcaaggcgaggaacgtctcctctggctttacgaagaagtggagaaaccattgagtcgcgtgctcgcgcatatggaagctaccggtgtcaaattagacgtggcgtatttggaggcactcagccttgaagttgctgccgaaatgcgccgcttggaggaagaagtattccgtttagcaggccactcctttaaccttaattctcgcgatcagttagaacgtgtgttgttcgatgaacttggtctccctcctatcggcaagacagagaagaccggtaaacgtagcacttcagcggcggttttagaagctcttcgcgaagtccatcccattgtggacaagatcttgcagtaccgcgaactcgcgaaattgaaaggcacctatattgaccctcttccggcattagtccacccgaaaacgggacgcctccatacccgcttcaaccaaacagccacggcgaccggtcgtttgtcctcctctgatccaaaccttcagaatattccagtacgtaccccattgggccagaagatccgcaaagcgtttgtagctgaggagggttggcgtttagtggccctcgattatagccaaattgaattacgtgtccttgcccatctttctggcgatgagaacctcatccgcgtgtttcaggaaggccgcgacattcacactcaaacggcaagctggatgtttggattatcagctgaagcgatcgatcctttgatgcgtcgtgcagcgaagaccatcaatttcggtgttctctacggtatgagtgcccatcgtttgtcgcaggaattaggcattccctatgaagaagctgcggcgttcattcagcgctactttcaaagctatcccaaagttaaagcatggatcgagaagactctcgaagaaggccgcacacgtggttacgtagagaccttatttggacgtcgccgctatgttcccgatttaaacgctcgcgtgaaatctgtccgtgaagccgccgaacgcatggcgttcaacatgcctgtacagggcacggcagctgacctcatgaaacttgcaatggtgcgcctttttccacaattgcgtgaagttggtgcccgcatgctcttgcaggtccacgatgaactcttgttagaagcgccaaaagagcgtgcggaagaggtggcagccctcgcgaaagaggttatggaaggcgtgtggcccttagcggtgcctcttgaagtcgaagttggtattggcgaggattggttggctgccaaaggataatga

SEQ ID NO: 670 - protein, 841 aa, synthetic construct
  REGION 1..841: note = Variant of DNA polymerase I from Thermus sp. strain 2.9
MHHHHHHGGSGMLPLFEPKGRVLLVDGHHLAYRNFFALKGLTTSRGEPVQGVYGFAKSLLKALKEDGDVVIVVFDAKAPSFRHEAYEAYKAGRAPTPEDFPRQLALMKELVDLLGLERLEVPGFEADDVLATLAKKAEREGYEVQILTADRDLFQLLSPRISVLHPEGHRITPEWLWEKYGLRPEQWVDFRALAGDPSDNIPGVKGIGEKTALKLLKEWGSLENLLKNLDQVKPASVREKILAHLEDLKLSRELSRVRTDLPLEVDFRGRREPDWEGLIAFLERLEFGSLLHEFGLLESPLPAEEAPWPPPEGAFLGYRLSRPEPMWAELLALAASAQGRVYRAEDPHGALRGLKEVRGLLAKDLAVVALREGLDLPPTDDPMLLAYLLDPSNTTPEGVARRYGGEWTEDAGERALLAERLHANLLGRLQGEERLLWLYEEVEKPLSRVLAHMEATGVKLDVAYLEALSLEVAAEMRRLEEEVFRLAGHSFNLNSRDQLERVLFDELGLPPIGKTEKTGKRSTSAAVLEALREVHPIVDKILQYRELAKLKGTYIDPLPALVHPKTGRLHTRFNQTATATGRLSSSDPNLQNIPVRTPLGQKIRKAFVAEEGWRLVALDYSQIELRVLAHLSGDENLIRVFQEGRDIHTQTASWMFGLSAEAIDPLMRRAAKTINFGVLYGMSAHRLSQELGIPYEEAAAFIQRYFQSYPKVKAWIEKTLEEGRTRGYVETLFGRRRYVPDLNARVKSVREAAERMAFNMPVQGTAADLMKLAMVRLFPQLREVGARMLLQVHDELLLEAPKERAEEVAALAKEVMEGVWPLAVPLEVEVGIGEDWLAAKG

SEQ ID NO: 671 - DNA, 2529 bp, synthetic construct
  misc_feature 1..2529: note = Variant of DNA polymerase I from Thermus sp. strain 2.9
  source 1..2529: mol_type = other DNA
atgcaccatcatcatcatcatggcggtagcggcatgttaccgttgttcgaacctaaaggtcgcgtgcttctggttgatggccatcatctcgcgtatcgtaacttctttgccctgaaaggattaaccaccagccgtggcgagccggtacagggtgtctacggctttgcaaagtcgctcctgaaagctctgaaagaagacggtgatgtggtgattgttgtctttgatgcgaaagcgccaagttttcgccacgaagcgtacgaagcttacaaagccgggcgtgctccaacgccggaagactttcctcgccaattggcgcttatgaaggaattagtggatttgcttggcctcgaacgcttggaagttcccggtttcgaggcagacgacgtattagcgactctcgcaaagaaagccgaacgtgagggctatgaagtccagatcttgacagcagatcgcgatcttttccagcttttatctccgcgcatctcggtgttacacccggaagggcatcgcatcaccccggaatggctctgggagaaatatggtttgcgtcccgaacaatgggtggattttcgcgccttagtaggcgatccgagcgacaatattccgggagttaaaggtatcggcgagaagacggcgctcaagctccttaaagaatgggggtcgttggagaacttgcttaagaatttagatcaggtcaaaccagcgtcagtgcgtgagaagattcttgcacacctcgaagacctccgtttaagccgcgaattgtcccgtgtacgcaccgatttgccgctcgaagttgatttccgtggccgccgcgaacctgactgggagggtcttaaagcgtttttagagcgtcttgaatttggttcgctcttgcatgaattcggccttttagaaagcccgttaccagccgaagaagcaccttggccaccgcccgaaggcgcgtttttaggttaccgtttgagtcgcccggaaccgatgtgggccgaattattggctcttgcagcgtctgcccagggacgtgtgtatcgcgcggaagaccctcatggtgcgctccgtggcctcaaagaagtccgtggactccttgccaaagacttagctgttgttgcattgcgcgaaggtcttgatttacctccgactgatgatccaatgcttcttgcgtacctcttggacccgtcaaacacgacgcccgaaggcgtagcccgtcgttacggcggcgagtggaccgaagatgcagccgagcgcgcgttattggccgaacgtttgcacgccaatttattaggacgtttgcaaggcgaggaacgtctcctctggctttacgaagaagtggagaaaccattgagtcgcgtgctcgcgcatatggaagctaccggtgtcaaattagacgtggcgtatttggaggcactcagccttgaagttgctgccgaaattcgccgcttggaggaagaagtattccgtttagcaggccactcctttaaccttaattctcgcgatcagttagaacgtgtgttgttcgatgaacttggtctccctcctatcggcaagacagagaagaccggtaaacgtagcacttcagcggcggttttagaagctcttcgcgaagtccatcccattgtggacaagatcttgcagtaccgcgaactcgcgaaattgaaaggcacctatattgaccctcttccggcattagtccacccgaaaacgggacgcctccatacccgcttcaaccaaacagccacggcgaccggtcgtttgtcctcctctgatccaaaccttcagaatattccagtacgtaccccattgggccagaagatccgccgcgcgtttgtagctgaggagggttggcgtttagtggccctcgattatagccaaattgaattacgtgtccttgcccatctttctggcgatgagaacctcatccgcgtgtttcaggaaggcaaagacattcacactcaaacggcaagctggatgtttggattatcagctgaagcgatcgatcctttgatgcgtcgtgcagcgaagaccattaatttcggtgttctctacggtatgagtgcccatcgtttgtcgcaggaattaggcattccctatgaagaagctgtggcgttcattcagcgctactttcaaagctatcccaaagttaaagcatggatcgagaagactctcgaagaaggccgcacacgtggttacgtagagaccttatttggacgtcgccgctatgttcccgatttaaacgctcgcgtgaaatctgtccgtgaagccgccgaacgcatggcgttcaacatgcctgtacagggcacggcagctgacctcatgaaacttgcaatggtgcgcctttttccacaattgcgtgaagttggtgcccgcatgctcttgcaggtccacgatgaactcttgttagaagcgccaaaagagcgtgcggaagaggtggcagccctcgcgaaagaggttatggaaggcgtgtggcccttagcggtgcctcttgaagtcgaagttggtattggcgaggattggttggctgccaaaggataatga

SEQ ID NO: 672 - protein, 841 aa, synthetic construct
  REGION 1..841: note = Variant of DNA polymerase I from Thermus sp. strain 2.9
MHHHHHHGGSGMLPLFEPKGRVLLVDGHHLAYRNFFALKGLTTSRGEPVQGVYGFAKSLLKALKEDGDVVIVVFDAKAPSFRHEAYEAYKAGRAPTPEDFPRQLALMKELVDLLGLERLEVPGFEADDVLATLAKKAEREGYEVQILTADRDLFQLLSPRISVLHPEGHRITPEWLWEKYGLRPEQWVDFRALVGDPSDNIPGVKGIGEKTALKLLKEWGSLENLLKNLDQVKPASVREKILAHLEDLRLSRELSRVRTDLPLEVDFRGRREPDWEGLKAFLERLEFGSLLHEFGLLESPLPAEEAPWPPPEGAFLGYRLSRPEPMWAELLALAASAQGRVYRAEDPHGALRGLKEVRGLLAKDLAVVALREGLDLPPTDDPMLLAYLLDPSNTTPEGVARRYGGEWTEDAAERALLAERLHANLLGRLQGEERLLWLYEEVEKPLSRVLAHMEATGVKLDVAYLEALSLEVAAEIRRLEEEVFRLAGHSFNLNSRDQLERVLFDELGLPPIGKTEKTGKRSTSAAVLEALREVHPIVDKILQYRELAKLKGTYIDPLPALVHPKTGRLHTRFNQTATATGRLSSSDPNLQNIPVRTPLGQKIRRAFVAEEGWRLVALDYSQIELRVLAHLSGDENLIRVFQEGKDIHTQTASWMFGLSAEAIDPLMRRAAKTINFGVLYGMSAHRLSQELGIPYEEAVAFIQRYFQSYPKVKAWIEKTLEEGRTRGYVETLFGRRRYVPDLNARVKSVREAAERMAFNMPVQGTAADLMKLAMVRLFPQLREVGARMLLQVHDELLLEAPKERAEEVAALAKEVMEGVWPLAVPLEVEVGIGEDWLAAKG

SEQ ID NO: 673 - DNA, 2529 bp, synthetic construct
  misc_feature 1..2529: note = Variant of DNA polymerase I from Thermus sp. strain 2.9
  source 1..2529: mol_type = other DNA
atgcaccatcatcatcatcatggcggtagcggcatgttaccgttgttcgaacctaaaggtcgcgtgcttctggttgatggccatcatctcgcgtatcgtaacttctttgccctgaaaggattaaccaccagccgtggcgagccggtacagggtgtctacggctttgcaaagtcgctcctgaaagctctgaaagaagacggtgatgtggtgattgttgtctttgatgcgaaagcgccaagttttcgccacgaagcgtacgaagcttacaaagccgggcgtgctccaacgccggaagactttcctcgccaattggcgcttatgaaggaattagtggatttgcttggcctcgaacgcttggaagttcccggtttcgaggcagacgacgtattagcgactctcgcaaagaaagccgaacgtgagggctatgaagtccagatcttgacagcagatcgcgatcttttccagcttttatctccgcgcatttccgtgttacacccggaagggcatcgtatcaccccggaatggctctgggagaaatatggtttgcgtcccgaacaatgggtggattttcgcgccttagcgggcgatccgagcgacaatattccgggagttaaaggtatcggcgagaagacggcgctcaagctccttaaagaatgggggtcgttggagaacttgcttaagaatttagatcaggtcaaaccagcttcagtgcgtgagaagattcttgcacacctcgaagacctcaaattaagccgcgaattgtcccgtgtacgcaccgatttgccgctcgaagttgatttccgtggccgccgcgaacctgactgggagggtcttaaagcgtttttagagcgtcttgaatttggttcgctcttgcatgaattcggccttttagaaagcccgttaccagccgaagaagcaccttggccaccgcccgaaggcgcgtttttaggttaccgtttgagtcgcccggaaccgatgtgggccgaattattggctcttgcagcgtctgcccagggacgtgtgtatcgcgcggaagaccctcatggtgcgctccgtggcctcaaagaagtccgtggactccttgccaaagacttagctgttgttgcattgcgcgaaggtcttgatttacctccgactgatgatccaatgcttcttgcgtacctcttggactcgtcaaacacgacgcccgaaggcgtagcccgtcgttacggcggcgagtggaccgaagatgcaggtgagcgcgcgttattggccgaacgtttgcacgccaatttattaggacgtttgcaaggcgaggaacgtctcctctggctttacgaagaagtggagaaaccattgagtcgcgtgctcgcgcatatggaagctaccggtgtcaaattagacgtggcgtatttggaggcactcagccttgaagccgctgccgaaatgcgccgcttggaggaagaagtattccgtttagcaggccactcctttaaccttaattctcgcgatcagttagaacgtgtgttgttcgatgaacttggtctccctcctatcaccaagacagagaagaccggtaaacgtagcacttcagcggcggttttagaagctcttcgcgaagtccatcccattgtggacaagatcttgcagtaccgcgaactcgcgaaattgaaaggcacctatattgaccctcttccggcattagtccacccgaaaacgggacgcctccatacccgcttcaaccaaacagccacggcgaccggtcgtttgtcctcctctgatccaaaccttcagaatattccagtacgtaccccattgggccagcatatccgcaaagcgtttgtagctgaggagggttggcgtttagtggccctcgattatagccaaattgaattacgtgtccttgcccatctttctggcgatgagaacctcatccgcgtgtttcaggaaggccgcgacattcacactcaaacggcaagctggatgtttggagtgtcagcggaagcgatcgatcctttgatgcgtcgtgcagcgaagaccatcaatttcggtgttctctacggtatgagtgcccatcgtttgtcgcaggaattaggcattccctatgaagaagctgcggcgttcattcagcgctactttcaaagctatcccaaagttaaagcatggatcgagaagactctcgaagaaggccgcacacgtggttacgtagagaccttatttggacgtcgccgctatgttcccgatttaaacgctcgcgtgaaatctgtccgtgaagccgccgaacgcatggcgttcaacatgcctgtacagggcacggcagctgacctcatgaaacttgcaatggtgcgcctttttccacaattgcgtgaagttggtgcccgcatgctcttgcaggtccacgatgaactcttgttagaagcgccaaaagagcgtgcggaagaggtggcagccctcgcgaaagaggttatggaaggcgtgtggcccttagcggtgcctcttgaagtcgaagttggtattggcgaggattggttggctgccaaaggataatga

SEQ ID NO: 674 - protein, 841 aa, synthetic construct
  REGION 1..841: note = Variant of DNA polymerase I from Thermus sp. strain 2.9
MHHHHHHGGSGMLPLFEPKGRVLLVDGHHLAYRNFFALKGLTTSRGEPVQGVYGFAKSLLKALKEDGDVVIVVFDAKAPSFRHEAYEAYKAGRAPTPEDFPRQLALMKELVDLLGLERLEVPGFEADDVLATLAKKAEREGYEVQILTADRDLFQLLSPRISVLHPEGHRITPEWLWEKYGLRPEQWVDFRALAGDPSDNIPGVKGIGEKTALKLLKEWGSLENLLKNLDQVKPASVREKILAHLEDLKLSRELSRVRTDLPLEVDFRGRREPDWEGLKAFLERLEFGSLLHEFGLLESPLPAEEAPWPPPEGAFLGYRLSRPEPMWAELLALAASAQGRVYRAEDPHGALRGLKEVRGLLAKDLAVVALREGLDLPPTDDPMLLAYLLDSSNTTPEGVARRYGGEWTEDAGERALLAERLHANLLGRLQGEERLLWLYEEVEKPLSRVLAHMEATGVKLDVAYLEALSLEAAAEMRRLEEEVFRLAGHSFNLNSRDQLERVLFDELGLPPITKTEKTGKRSTSAAVLEALREVHPIVDKILQYRELAKLKGTYIDPLPALVHPKTGRLHTRFNQTATATGRLSSSDPNLQNIPVRTPLGQHIRKAFVAEEGWRLVALDYSQIELRVLAHLSGDENLIRVFQEGRDIHTQTASWMFGVSAEAIDPLMRRAAKTINFGVLYGMSAHRLSQELGIPYEEAAAFIQRYFQSYPKVKAWIEKTLEEGRTRGYVETLFGRRRYVPDLNARVKSVREAAERMAFNMPVQGTAADLMKLAMVRLFPQLREVGARMLLQVHDELLLEAPKERAEEVAALAKEVMEGVWPLAVPLEVEVGIGEDWLAAKG

SEQ ID NO: 675 - DNA, 2529 bp, synthetic construct
  misc_feature 1..2529: note = Variant of DNA polymerase I from Thermus sp. strain 2.9
  source 1..2529: mol_type = other DNA
atgcaccatcatcatcatcatggcggtagcggcatgttaccgttgttcgaacctaaaggtcgcgtgcttctggttgatggccatcatctcgcgtatcgtaacttctttgccctgaaaggattaaccaccagccgtggcgagccggtacagggtgtctacggctttgcaaagtcgctcctgaaagctctgaaagaagacggtgatgtggtgattgttgtctttgatgcgaaagcgccaagttttcgccacgaagcgtacgaagcttacaaagccgggcgtgctccaacgccggaagactttcctcgccaattggcgcttatgaaggaattagtggatttgcttggcctcgaacgcttggaagttcccggtttcgaggcagacgacgtattagcgactctcgcaaagaaagccgaacgtgagggctatgaagtccagatcttgacagcagatcgcgatcttttccagcttttatctccgcgcgtcgcggtgttacacccggaagggcatcgtatcaccccggaatggctctgggagaaatatggtttgcgtcccgaacaatgggtggattttcgcgccttagcgggcgatccgagcgacaatattccgggagttaaaggtatcggcgagaagacggcgctcaagctccttaaagaatgggggtcgttggagaacttgcttaagaatttagatcaggtcaaaccagcttcagtgcgtgagaagattcttgcacacctcgaagacctcaaattaagccgcgaattgtcccgtgtacgcaccgatttgccgctcgaagttgatttccgtggccgccgcgaacctgactgggagggtcttaaagcgtttttagagcgtcttgaatttggttcgctcttgcatgaattcggccttttagaaagcccgttaccagccgaagaagcaccttggccaccgcccgaaggcgcgtttttaggttaccgtttgagtcgcccggaaccgatgtgggccgaattattggctcttgcagcgtctgcccagggacgtgtgtatcgcgcggaagaccctcatggtgcgctcaaaggcctcaaagaagtccgtggactccttgccaaagacttagctgttgttgcattgcgcgaaggtcttgatttacctccgactgatgatccaatgcttcttgcgtacctcttggacccgtcaaacacgacgcccgaaggcgtagcccgtcgttacggcggcgagtggaccgaagatgcaggtgagcgcgcgttattggccgaacgtttgcacgccaatttattaggacgtttgcaaggcgaggaaaagctcctctggctttacgaagaagtggagaaaccattgagtcgcgtgctcgcgcatatggaagctaccggtgtcaaattagacgtggcgtatttggaggcactcagccttgaagttgctgccgaaatgcgccgcttggaggaagaagtattccgtttagcaggccactcctttaaccttaattctcgcgatcagttagaacgtgtgttgttcgatgaacttggtctccctcctatcggcaagacagagaagaccggtaaacgtagcacttcagcggcggttttagaagctcttcgcgaagtccatcccattgtggacaagatcttgcagtaccgcgaactcgcgaaattgaaaggcacctatattgaccctcttccggcattagtccacccgaaaacgggacgcctccatacccgcttcaaccaaacagccacggcgaccggtcgtttgtcctcctctgatccaaaccttcagaatattccagtacgtaccccattgggccagaagatccgccgcgcgtttgtagctgaggagggttggcgtttagtggccctcgattatagccaaattgaattacgtgtccttgcccatctttctggcgatgagaacctcatccgcgtgtttcaggaaggccgcgacattcacactcaaacggcaagctggatgtttggattatcggcggaagcgatcgatcctttgatgcgtcgtgcagcgaagaccatcaatttcggtgttctctacggtatgagtgcccatcgtttgtcgcaggaattaggcattccctatgaagaagctgcggcgttcattcagcgctactttcaaagctatcccaaagttaaagcatggatcgagaagactctcgaagaaggccgcacacgtggttacgtagagaccttatttggacgtcgccgctatgttcccgatttaaacgctcgcgtgaaatctgtccgtgaagccgccgaacgcatggcgttcaacatgcctgtacagggcacggcagctgacctcatgaaacttgcaatggtgcgcctttttccacaattgcgtgaagttggtgcccgcatgctcttgcaggtccacgatgaactcttgttagaagcgccaaaagagcgtgcggaagaggtggcagccctcgcgaaagaggttatggaaggcgtgtggcccttagcggtgcctcttgaagtcgaagttggtattggcgaggattggttggctgccaaaggataatga

SEQ ID NO: 676 - protein, 841 aa, synthetic construct
  REGION 1..841: note = Variant of DNA polymerase I from Thermus sp. strain 2.9
MHHHHHHGGSGMLPLFEPKGRVLLVDGHHLAYRNFFALKGLTTSRGEPVQGVYGFAKSLLKALKEDGDVVIVVFDAKAPSFRHEAYEAYKAGRAPTPEDFPRQLALMKELVDLLGLERLEVPGFEADDVLATLAKKAEREGYEVQILTADRDLFQLLSPRVAVLHPEGHRITPEWLWEKYGLRPEQWVDFRALAGDPSDNIPGVKGIGEKTALKLLKEWGSLENLLKNLDQVKPASVREKILAHLEDLKLSRELSRVRTDLPLEVDFRGRREPDWEGLKAFLERLEFGSLLHEFGLLESPLPAEEAPWPPPEGAFLGYRLSRPEPMWAELLALAASAQGRVYRAEDPHGALKGLKEVRGLLAKDLAVVALREGLDLPPTDDPMLLAYLLDPSNTTPEGVARRYGGEWTEDAGERALLAERLHANLLGRLQGEEKLLWLYEEVEKPLSRVLAHMEATGVKLDVAYLEALSLEVAAEMRRLEEEVFRLAGHSFNLNSRDQLERVLFDELGLPPIGKTEKTGKRSTSAAVLEALREVHPIVDKILQYRELAKLKGTYIDPLPALVHPKTGRLHTRFNQTATATGRLSSSDPNLQNIPVRTPLGQKIRRAFVAEEGWRLVALDYSQIELRVLAHLSGDENLIRVFQEGRDIHTQTASWMFGLSAEAIDPLMRRAAKTINFGVLYGMSAHRLSQELGIPYEEAAAFIQRYFQSYPKVKAWIEKTLEEGRTRGYVETLFGRRRYVPDLNARVKSVREAAERMAFNMPVQGTAADLMKLAMVRLFPQLREVGARMLLQVHDELLLEAPKERAEEVAALAKEVMEGVWPLAVPLEVEVGIGEDWLAAKG

SEQ ID NO: 677 - DNA, 2529 bp, synthetic construct
  misc_feature 1..2529: note = Variant of DNA polymerase I from Thermus sp. strain 2.9
  source 1..2529: mol_type = other DNA
atgcaccatcatcatcatcatggcggtagcggcatgttaccgttgttcgaacctaaaggtcgcgtgcttctggttgatggccatcatctcgcgtatcgtaacttctttgccctgaaaggattaaccaccagccgtggcgagccggtacagggtgtctacggctttgcaaagtcgctcctgaaagctctgaaagaagacggtgatgtggtgattgttgtctttgatgcgaaagcgccaagttttcgccacgaagcgtacgaagcttacaaagccgggcgtgctccaacgccggaagactttcctcgccaattggcgcttatgaaggaattagtggatttgcttggcctcgaacgcttggaagttcccggtttcgaggcagacgacgtattagcgactctcgcaaagaaagccgaacgtgagggctatgaagtccatatcttgacagcagatcgcgatcttttccagcttttatctccgcgcatttccgtgttacacccggaagggcatcgtatcaccccggaatggctctgggagaaatatggtttgcgtcccgaacaatgggtggattttcgcgccttagcgggcgatccgagcgacaatattccgggagttaaaggtatcggcgagaagacggcgctcaagctccttaaagaatgggggtcgttggagaacttgcttaagaatttagatcaggtcaaaccagcttcagtgcgtgagaagattcttgcacacctcgaagacctcaaattaagccgcgaattgtcgcgtgtacgcaccgatttgccgctcgaagttgatttccgtggccgccgcgaacctgactgggagggtcttaaagcgtttttagagcgtcttgaatttggttcgctcttgcatgaattcggccttttagaaagcccgttaccagccgaagaagcaccttggccaccgcccgaaggcgcgtttttaggttaccgtttgagtcgcccggaaccgatgtgggccgaattattggctcttgcagcgtctgcccagggacgtgtgtatcgcgcggaagaccctcatggtgcgctccgtggcctcaaagaagtccgtggactccttgccaaagacttagctgttgttgcattgcgcgaaggtcttgatttacctccgactgatgatccaatgcttcttgcgtacctcttggacccgtcaaacacgacgcccgaaggcgtagcccgtcgttacggcggcgagtggaccgaagatgcaggtgagcgcgcgttattggccgaacgtttgcacgccaatttattaggacgtttgcaaggcgaggaacgtctcctctggctttacgaagaagtggagaaaccattgagtcgcgtgctcgcgcatatggaagctaccggtgtcaaattagacgtggcgtatttggaggcactcagccttgaagttgctgccgaaatgcgccgcttggaggaagaagtattccgtttagcaggccactcctttaaccttaattctcgcgatcagttagaacgtgtgttgttcgatgaacttggtctccctcctatcggcaagacagagaagaccggtaaacgtagcacttcagcggcggttttagaagctcttcgcgaagtccatcccattgtggacaagatcttgcagtaccgcgaactcgcgaaattgaaaggcacctatattgaccctcttccggcattagtccacccgaaaacgggacgcctccatacccgcttcaaccaaacagccacggcgaccggtcgtttgtcctcctctgatccaaaccttcagaatattccagtacgtaccccattgggccagaaaatccgcaaagcgtttgtagctgaggagggttggcgtttagtggccctcgattatagccaaattgaattacgtgtccttgcccatctttctggcgatgagaacctcatccgcgtgtttcaggaaggccgcgacattcacactcaaacggcaagctggatgtttggattatcagctgaagcgatcgatcctttgatgcgtcgtgcagcgaagaccatcaatttcggtgttctctacggtatgagtgcccatcgtttgtcgcaggaattaggcattccctatgaagaagctgcggcgttcattcagcgctactttcaaagctatcccaaagttaaagcatggatcgagaagactctcgaagaaggccgcacacgtggttacgtagagaccttatttggacgtcgccgctatgttcccgatttaaacgctcgcgtgaaatctgtccgtgaagccgccgaacgcatggcgttcaacatgcctgtacagggcacggcagctgacctcatgaaacttgcaatggtgcgcctttttccacaattgcgtgaagttggtgcccgcatgctcttgcaggtccacgatgaactcttgttagaagcgccaaaagagcgtgcggaagaggtggcagccctcgcgaaagaggttatggaaggcgtgtggcccttagcggtgcctcttgaagtcgaagttggtattggcgaggattggttggctgccaaaggataatga

SEQ ID NO: 678 - protein, 841 aa, synthetic construct
  REGION 1..841: note = Variant of DNA polymerase I from Thermus sp. strain 2.9
MHHHHHHGGSGMLPLFEPKGRVLLVDGHHLAYRNFFALKGLTTSRGEPVQGVYGFAKSLLKALKEDGDVVIVVFDAKAPSFRHEAYEAYKAGRAPTPEDFPRQLALMKELVDLLGLERLEVPGFEADDVLATLAKKAEREGYEVHILTADRDLFQLLSPRISVLHPEGHRITPEWLWEKYGLRPEQWVDFRALAGDPSDNIPGVKGIGEKTALKLLKEWGSLENLLKNLDQVKPASVREKILAHLEDLKLSRELSRVRTDLPLEVDFRGRREPDWEGLKAFLERLEFGSLLHEFGLLESPLPAEEAPWPPPEGAFLGYRLSRPEPMWAELLALAASAQGRVYRAEDPHGALRGLKEVRGLLAKDLAVVALREGLDLPPTDDPMLLAYLLDPSNTTPEGVARRYGGEWTEDAGERALLAERLHANLLGRLQGEERLLWLYEEVEKPLSRVLAHMEATGVKLDVAYLEALSLEVAAEMRRLEEEVFRLAGHSFNLNSRDQLERVLFDELGLPPIGKTEKTGKRSTSAAVLEALREVHPIVDKILQYRELAKLKGTYIDPLPALVHPKTGRLHTRFNQTATATGRLSSSDPNLQNIPVRTPLGQKIRKAFVAEEGWRLVALDYSQIELRVLAHLSGDENLIRVFQEGRDIHTQTASWMFGLSAEAIDPLMRRAAKTINFGVLYGMSAHRLSQELGIPYEEAAAFIQRYFQSYPKVKAWIEKTLEEGRTRGYVETLFGRRRYVPDLNARVKSVREAAERMAFNMPVQGTAADLMKLAMVRLFPQLREVGARMLLQVHDELLLEAPKERAEEVAALAKEVMEGVWPLAVPLEVEVGIGEDWLAAKG

SEQ ID NO: 679 - DNA, 2529 bp, synthetic construct
  misc_feature 1..2529: note = Variant of DNA polymerase I from Thermus sp. strain 2.9
  source 1..2529: mol_type = other DNA
atgcaccatcatcatcatcatggcggtagcggcatgttaccgttgttcgaacctaaaggtcgcgtgcttctggttgatggccatcatctcgcgtatcgtaacttctttgccctgaaaggattaaccaccagccgtggcgagccggtacagggtgtctacggctttgcaaagtcgctcctgaaagctctgaaagaagacggtgatgtggtgattgttgtctttgatgcgaaagcgccaagttttcgccacgaagcgtacgaagcttacaaagccgggcgtgctccaacgccggaagactttcctcgccaattggcgcttatgaaggaattagtggatttgcttggcctcgaacgcttggaagttcccggtttcgaggcagacgacgtattagcgactctcgcaaagaaagccgaacgtgagggctatgaagtccagatcttgacagcagatcgcgatcttttccagcttttatctccgcgcatctcggtgttacacccggaagggcatcgcatcaccccggaatggctctgggagaaatatggtttgcgtcccgaacaatgggtggattttcgcgccttagcaggcgatccgagcgacaatattccgggagttaaaggtatcggcgagaagacggcgctcaagctccttaaagaatgggggtcgttggagaacttgcttaagaatttagatcaggtcaaaccagcgtcagtgcgtgagaagattcttgcacacctcgaagacctccgtttaagcctggaattgtcccgtgtacgcaccgatttgccgctcgaagttgatttccgtggccgccgcgaacctgactgggagggtcttaaagcgtttttagagcgtcttgaatttggttcgctcttgcatgaattcggccttttagaaagcccgttaccagccgaagaagcaccttggccaccgcccgaaggcgcgtttttaggttaccgtttgagtcgcccggaaccgatgtgggccgaattattggctcttgcagcgtctgcccagggacgtgtgtatcgcgcggaagaccctcatggtgcgctccgcggcctcaaagaagtccgtggactccttgccaaagacttagctgttgttgcattgcgcgaaggtcttgatttacctccgactgatgatccaatgcttcttgcgtacctcttggacccgtcaaacacgacgcccgaaggcgtagcccgtcgttacggcggcgagtggaccgaagatgcagccgagcgcgcgttattggccgaacgtttgcaccagaatttattaggacgtttgcaaggcgaggaacgcctcctctggctttacgaagaagtggagaaaccattgagtcgcgtgctcgcgcatatggaagctaccggtgtcaaattagacgtggcgtatttggaggcactcagccttgaagttgctgccgaaatgcgccgcttggaggaagaagtattccgtttagcaggccactcctttaaccttaattctcgcgatcagttagaacgtgtgttgttcgatgaacttggtctccctcctatcggcaagacagagaagaccggtaaacgtagcacttcagcggcggttttagaagctcttcgcgaagtccatcccattgtggacaagatcttgcagtaccgcgaactcgcgaaattgaaaggcacctatattgaccctcttccggcattagtccacccgaaaacgggacgcctccatacccgcttcaaccaaacagccacggcgaccggtcgtttgtcctcctctgatccaaaccttcagaatattccagtacgtaccccattgggccagaagatccgcaaagcgtttgtagctgaggagggttggcgtttagtggccctcgattatagccaaattgaattacgtgtccttgcccatctttctggcgatgagaacctcatccgcgtgtttcaggaaggcaaagacattcacactcaaacggcaagctggatgtttggattatcggcggaagcgatcgatcctttgatgcgtcgtgcagcgaagaccgttaatttcggtgttctctacggtatgagtgcccatcgtttgtcgcaggaattaggcattccctatgaagaagctgtggcgttcattcagcgctactttcaaagctatcccaaagttaaagcatggatcgagaagactctcgaagaaggccgcacacgtggttacgtagagaccttatttggacgtcgccgctatgttcccgatttaaacgctcgcgtgaaatctgtccgtgaagccgccgaacgcatggcgttcaacatgcctgtacagggcacggcagctgacctcatgaaacttgcaatggtgcgcctttttccacaattgcgtgaagttggtgcccgcatgctcttgcaggtccacgatgaactcttgttagaagcgccaaaagagcgtgcggaagaggtggcagccctcgcgaaagaggttatggaaggcgtgtggcccttagcggtgcctcttgaagtcgaagttggtattggcgaggattggttggctgccaaaggataatga

SEQ ID NO: 680 - protein, 841 aa, synthetic construct
  REGION 1..841: note = Variant of DNA polymerase I from Thermus sp. strain 2.9
MHHHHHHGGSGMLPLFEPKGRVLLVDGHHLAYRNFFALKGLTTSRGEPVQGVYGFAKSLLKALKEDGDVVIVVFDAKAPSFRHEAYEAYKAGRAPTPEDFPRQLALMKELVDLLGLERLEVPGFEADDVLATLAKKAEREGYEVQILTADRDLFQLLSPRISVLHPEGHRITPEWLWEKYGLRPEQWVDFRALAGDPSDNIPGVKGIGEKTALKLLKEWGSLENLLKNLDQVKPASVREKILAHLEDLRLSLELSRVRTDLPLEVDFRGRREPDWEGLKAFLERLEFGSLLHEFGLLESPLPAEEAPWPPPEGAFLGYRLSRPEPMWAELLALAASAQGRVYRAEDPHGALRGLKEVRGLLAKDLAVVALREGLDLPPTDDPMLLAYLLDPSNTTPEGVARRYGGEWTEDAAERALLAERLHQNLLGRLQGEERLLWLYEEVEKPLSRVLAHMEATGVKLDVAYLEALSLEVAAEMRRLEEEVFRLAGHSFNLNSRDQLERVLFDELGLPPIGKTEKTGKRSTSAAVLEALREVHPIVDKILQYRELAKLKGTYIDPLPALVHPKTGRLHTRFNQTATATGRLSSSDPNLQNIPVRTPLGQKIRKAFVAEEGWRLVALDYSQIELRVLAHLSGDENLIRVFQEGKDIHTQTASWMFGLSAEAIDPLMRRAAKTVNFGVLYGMSAHRLSQELGIPYEEAVAFIQRYFQSYPKVKAWIEKTLEEGRTRGYVETLFGRRRYVPDLNARVKSVREAAERMAFNMPVQGTAADLMKLAMVRLFPQLREVGARMLLQVHDELLLEAPKERAEEVAALAKEVMEGVWPLAVPLEVEVGIGEDWLAAKG

SEQ ID NO: 681 - DNA, 2529 bp, synthetic construct
  misc_feature 1..2529: note = Variant of DNA polymerase I from Thermus sp. strain 2.9
  source 1..2529: mol_type = other DNA
atgcaccatcatcatcatcatggcggtagcggcatgttaccgttgttcgaacctaaaggtcgcgtgcttctggttgatggccatcatctcgcgtatcgtaacttctttgccctgaaaggattaaccaccagccgtggcgagccggtacagggtgtctacggctttgcaaagtcgctcctgaaagctctgaaagaagacggtgatgtggtgattgttgtctttgatgcgaaagcgccaagttttcgccacgaagcgtacgaagcttacaaagccgggcgtgctccaacgccggaagactttcctcgccaattggcgcttatgaaggaattagtggatttgcttggcctcgaacgcttggaagttcccggtttcgaggcagacgacgtattagcgactctcgcaaagaaagccgaacgtgagggctatgaagtccagatcttgacagcagatcgcgatcttttccagcttttatctccgcgcatctcggtgttacacccggaagggcatcgcatcaccccggaatggctctgggagaaatatggtttgcgtcccgaacaatgggtggattttcgcgccttagcaggcgatccgagcgacaatattccgggagttaaaggtatcggcgagaagacggcgctcaagctccttaaagaatgggggtcgttggagaacttgcttaagaatttagatcaggtcaaaccagagtcagtgcgtgagaagattcttgcacacctcgaagacctcaaattaagccgcgaattgtcccgtgtacgcaccgatttgccgctcgaagttgatttccgtcgccgccgcgaacctgactgggagggtcttaaagcgtttttagagcgtcttgaatttggttcgctcttgcatgaattcggccttttagaaagcccgttaccagccgaagaagcaccttggccaccgcccgaaggcgcgtttttaggttaccgtttgagtcgcccggaaccgatgtgggccgaattattggctcttgcagcgtctgcccagggacgtgtgtatcgcgcggaagaccctcatggtgcgctccgcggcctcaaagaagtccgtggactccttgccaaagacttagctgttgttgcattgcgcgaaggtcttgatttacctccgactgatgatccaatgcttcttgcgtacctcttggacccgtcaaacacgacgcccgaaggcgtagcccgtcgttacggcggcgagtggaccgaagatgcaggcgagcgcgcgttattggccgaacgtttgcacgccaatttattaggacgtttgcaaggcgaggaacgtctcctctggctttacgaagaagtggagaaaccattgagtcgcgtgctcgcgcatatggaagctaccggtgtcaaattagacgtggcgtatttggaggcactcagccttgaagttgctgccgaaatgcgccgcttggaggaagaagtattccgtttagcaggccactcctttaaccttaattctcgcgatcagttagaacgtgtgttgttcgatgaacttggtctccctcctatcggcaagacagagaagaccggtaaacgtagcacttcagcggcggttttagaagctcttcgcgaagtccatcccattgtggacaagatcttgcagtaccgcgaactcgcgaaattgaaaggcacctatattgaccctcttccggcattagtccacccgaaaacgggacgcctccatacccgcttcaaccaaacagccacggcgaccggtcgtttgtcctcctctgatccaaaccttcagaatattccagtacgtaccccattgggccagaagatccgcaaagcgtttgtagctgaggagggttggcgtttagtggccctcgattatagccaaattgaattacgtgtccttgcccatctttctggcgatgagaacctcatccgcgtgtttcaggaaggccgcgacattcacactcaaacggcaagctggatgtttggattatcagctgaagcgatcgatcctttgatgcgtcgtgcagcgaagaccgttaatttcggtgttctctacggtatgagtgcccatcgtttgtcgcaggaattaggcattccctatgaagaagctgtggcgttcattcagcgctactttcaaagctatcccaaagttaaagcatggatcgagaagactctcgaagaaggccgcacacgtggttacgtagagaccttatttggacgtcgccgctatgttcccgatttaaacgctcgcgtgaaatctgtccgtgaagccgccgaacgcatggcgttcaacatgcctgtacagggcacggcagctgacctcatgaaacttgcaatggtgcgcctttttccacaattgcgtgaagttggtgcccgcatgctcttgcaggtccacgatgaactcttgttagaagcgccaaaagagcgtgcggaagaggtggcagccctcgcgaaagaggttatggaaggcgtgtggcccttagcggtgcctcttgaagtcgaagttggtattggcgaggattggttggctgccaaaggataatga

SEQ ID NO: 682 - protein, 841 aa, synthetic construct
  REGION 1..841: note = Variant of DNA polymerase I from Thermus sp. strain 2.9
MHHHHHHGGSGMLPLFEPKGRVLLVDGHHLAYRNFFALKGLTTSRGEPVQGVYGFAKSLLKALKEDGDVVIVVFDAKAPSFRHEAYEAYKAGRAPTPEDFPRQLALMKELVDLLGLERLEVPGFEADDVLATLAKKAEREGYEVQILTADRDLFQLLSPRISVLHPEGHRITPEWLWEKYGLRPEQWVDFRALAGDPSDNIPGVKGIGEKTALKLLKEWGSLENLLKNLDQVKPESVREKILAHLEDLKLSRELSRVRTDLPLEVDFRRRREPDWEGLKAFLERLEFGSLLHEFGLLESPLPAEEAPWPPPEGAFLGYRLSRPEPMWAELLALAASAQGRVYRAEDPHGALRGLKEVRGLLAKDLAVVALREGLDLPPTDDPMLLAYLLDPSNTTPEGVARRYGGEWTEDAGERALLAERLHANLLGRLQGEERLLWLYEEVEKPLSRVLAHMEATGVKLDVAYLEALSLEVAAEMRRLEEEVFRLAGHSFNLNSRDQLERVLFDELGLPPIGKTEKTGKRSTSAAVLEALREVHPIVDKILQYRELAKLKGTYIDPLPALVHPKTGRLHTRFNQTATATGRLSSSDPNLQNIPVRTPLGQKIRKAFVAEEGWRLVALDYSQIELRVLAHLSGDENLIRVFQEGRDIHTQTASWMFGLSAEAIDPLMRRAAKTVNFGVLYGMSAHRLSQELGIPYEEAVAFIQRYFQSYPKVKAWIEKTLEEGRTRGYVETLFGRRRYVPDLNARVKSVREAAERMAFNMPVQGTAADLMKLAMVRLFPQLREVGARMLLQVHDELLLEAPKERAEEVAALAKEVMEGVWPLAVPLEVEVGIGEDWLAAKG

SEQ ID NO: 683 - DNA, 2529 bp, synthetic construct
  misc_feature 1..2529: note = Variant of DNA polymerase I from Thermus sp. strain 2.9
  source 1..2529: mol_type = other DNA
atgcaccatcatcatcatcatggcggtagcggcatgttaccgttgttcgaacctaaaggtcgcgtgcttctggttgatggccatcatctcgcgtatcgtaacttctttgccctgaaaggattaaccaccagccgtggcgagccggtacagggtgtctacggctttgcaaagtcgctcctgaaagctctgaaagaagacggtgatgtggtgattgttgtctttgatgcgaaagcgccaagttttcgccacgaagcgtacgaagcttacaaagccgggcgtgctccaacgccggaagactttcctcgccaattggcgcttatgaaggaattagtggatttgcttggcctcgaacgcttggaagttcccggtttcgaggcagacgacgtattagcgactctcgcaaagaaagccgaacgtgagggctatgaagtccagatcttgacagcagatcgcgatcttttccagcttttatctccgcgcgtcgcggtgttacacccggaagggcatctgatcaccccggaatggctctgggagaaatatggtttgcgtcccgaacaatgggtggattttcgcgccttagtaggcgatccgagcgacaatattccgggagttaaaggtatcggcgagaagacggcgctcaagctccttaaagaatgggggtcgttggagaacttgcttaagaatttagatcaggtcaaaccagagtcagtgcgtgagaagattcttgcacacctcgaagacctcaaattaagccgcgaattgtcccgtgtacgcaccgatttgccgctcgaagttgatttccgtggccgccgcgaacctgactgggagggtcttaaagcgtttttagagcgtcttgaatttggttcgctcttgcatgaattcggccttttagaaagcccgttaccagccgaagaagcaccttggccaccgcccgaaggcgcgtttttaggttaccgtttgagtcgcccggaaccgatgtgggccgaattattggctcttgcagcgtctgcccagggacgtgtgtatcgcgcggaagaccctcatggtgcgctccgtggcctcaaagaagtccgtggactccttgccaaagacttagctgttgttgcattgcgcgaaggtcttgatttacctccgactgatgatccaatgcttcttgcgtacctcttggacccgtcaaacacgacgcccgaaggcgtagcccgtcgttacggcggcgagtggaccgaagatgcaggcgagcgcgcgttattggccgaacgtttgcaccagaatttattaggacgtttgcaaggcgaggaacgtctcctctggctttacgaagaagtggagaaaccattgagtcgcgtgctcgcgcatatggaagctaccggtgtcaaattagacgtggcgtatttggaggcactcagccttgaagttgctgccgaaatgcgccgcttggaggaagaagtattccgtttagcaggccactcctttaaccttaattctcgcgatcagttagaacgtgtgttgttcgatgaacttggtctccctcctatcggcaagacagagaagaccggtaaacgtagcacttcagcggcggttttagaagctcttcgcgaagtccatcccattgtggacaagatcttgcagtaccgcgaactcgcgaaattgaaaggcacctatattgaccctcttccggcattagtccacccgaaaacgggacgcctccatacccgcttcaaccaaacagccacggcgaccggtcgtttgtcctcctctgatccaaaccttcagaatattccagtacgtaccccattgggccagaagatccgcaaagcgtttgtagctgaggagggttggcgtttagtggccctcgattatagccaaattgaattacgtgtccttgcccatctttctggcgatgagaacctcatccgcgtgtttcaggaaggccgcgacattcacactcaaacggcaagctggatgtttggattatcagctgaagcgatcgatcctttgatgcgtcgtgcagcgaagaccatcaatttcggtgttctctacggtatgagtgcccatcgtttgtcgcaggaattaggcattccctatgaagaagctgtggcgttcattcagcgctactttcaaagctatcccaaagttaaagcatggatcgagaagactctcgaagaaggccgcacacgtggttacgtagagaccttatttggacgtcgccgctatgttcccgatttaaacgctcgcgtgaaatctgtccgtgaagccgccgaacgcatggcgttcaacatgcctgtacagggcacggcagctgacctcatgaaacttgcaatggtgcgcctttttccacaattgcgtgaagttggtgcccgcatgctcttgcaggtccacgatgaactcttgttagaagcgccaaaagagcgtgcggaagaggtggcagccctcgcgaaagaggttatggaaggcgtgtggcccttagcggtgcctcttgaagtcgaagttggtattggcgaggattggttggctgccaaaggataatga

SEQ ID NO: 684 - protein, 841 aa, synthetic construct
  REGION 1..841: note = Variant of DNA polymerase I from Thermus sp. strain 2.9
MHHHHHHGGSGMLPLFEPKGRVLLVDGHHLAYRNFFALKGLTTSRGEPVQGVYGFAKSLLKALKEDGDVVIVVFDAKAPSFRHEAYEAYKAGRAPTPEDFPRQLALMKELVDLLGLERLEVPGFEADDVLATLAKKAEREGYEVQILTADRDLFQLLSPRVAVLHPEGHLITPEWLWEKYGLRPEQWVDFRALVGDPSDNIPGVKGIGEKTALKLLKEWGSLENLLKNLDQVKPESVREKILAHLEDLKLSRELSRVRTDLPLEVDFRGRREPDWEGLKAFLERLEFGSLLHEFGLLESPLPAEEAPWPPPEGAFLGYRLSRPEPMWAELLALAASAQGRVYRAEDPHGALRGLKEVRGLLAKDLAVVALREGLDLPPTDDPMLLAYLLDPSNTTPEGVARRYGGEWTEDAGERALLAERLHQNLLGRLQGEERLLWLYEEVEKPLSRVLAHMEATGVKLDVAYLEALSLEVAAEMRRLEEEVFRLAGHSFNLNSRDQLERVLFDELGLPPIGKTEKTGKRSTSAAVLEALREVHPIVDKILQYRELAKLKGTYIDPLPALVHPKTGRLHTRFNQTATATGRLSSSDPNLQNIPVRTPLGQKIRKAFVAEEGWRLVALDYSQIELRVLAHLSGDENLIRVFQEGRDIHTQTASWMFGLSAEAIDPLMRRAAKTINFGVLYGMSAHRLSQELGIPYEEAVAFIQRYFQSYPKVKAWIEKTLEEGRTRGYVETLFGRRRYVPDLNARVKSVREAAERMAFNMPVQGTAADLMKLAMVRLFPQLREVGARMLLQVHDELLLEAPKERAEEVAALAKEVMEGVWPLAVPLEVEVGIGEDWLAAKG

SEQ ID NO: 685 - DNA, 2529 bp, synthetic construct
  misc_feature 1..2529: note = Variant of DNA polymerase I from Thermus sp. strain 2.9
  source 1..2529: mol_type = other DNA
atgcaccatcatcatcatcatggcggtagcggcatgttaccgttgttcgaacctaaaggtcgcgtgcttctggttgatggccatcatctcgcgtatcgtaacttctttgccctgaaaggattaaccaccagccgtggcgagccggtacagggtgtctacggctttgcaaagtcgctcctgaaagctctgaaagaagacggtgatgtggtgattgttgtctttgatgcgaaagcgccaagttttcgccacgaagcgtacgaagcttacaaagccgggcgtgctccaacgccggaagactttcctcgccaattggcgcttatgaaggaattagtggatttgcttggcctcgaacgcttggaagttcccggtttcgaggcagacgacgtattagcgactctcgcaaagaaagccgaacgtgagggctatgaagtccagatcttgacagcagatcgcgatcttttccagcttttatctccgcgcatttccgtgttacacccggaagggcatcgtatcaccccggaatggctctgggagaaatatggtttgcgtcccgaacaatgggtggattttcgcgccttagcgggcgatccgagcgacaatattccgggagttaaaggtatcggcgagaagacggcgctcaagctccttaaagaatgggggtcgttggagaacttgcttaagaatttagatcaggtcaaaccagcttcagtgcgtgagaagattcttgcacacctcgaagacctcaaattaagccgcgaattgtcccgtgtacgcaccgatttgccgctcgaagttgatttccgtggccgccgcgaacctgactgggagggtcttaaagcgtttttagagcgtcttgaatttggttcgctcttgcatgaattcggccttttagaaagcccgttaccagccgaagaagcaccttggccaccgcccgaaggcgcgtttttaggttaccgtttgagtcgcccggaaccgatgtgggccgaattattggctcttgcagcgtctgcccagggacgtgtgtatcgcgcggaagaccctcatggtgcgctccgtggcctcaaagaagtccgtggactccttgccaaagacttagctgttgttgcattgcgcgaaggtcttgatttacctccgactgatgatccaatgcttcttgcgtacctcttggacccgtcaaacacgacgcccgaaggcgtagcccgtcgttacggcggcgagtggaccgaagatgcaggtgagcgcgcgttattggccgaacgtttgcacgccaatttattaggacgtttgcaaggcgaggaacgtctcctctggctttacgaagaagtggagaaaccattgagtcgcgtgctcgcgcatatggaagctaccggtgtcaaattagacgtggcgtatttggaggcactcagccttgaagttgctgccgaaatgcgccgcttggaggaagaagtattccgtttagcaggccactcctttaaccttaattctcgcgatcagttagaacgtgtgttgttcgatgaacttggtctccctcctatcggcaagacagagaagaccggtaaacgtagcacttcagcggcggttttagaagctcttcgcgaagtccatcccattgtggacaagatcttgcagtaccgcgaactcgcgaaattgaaaggcacctatattgaccctcttccggcattagtccacccgaaaacgggacgcctccatacccgcttcaaccaaacagccacggcgaccggtcgtttgtcctcctctgatccaaaccttcagaatattccagtacgtaccccattgggccagaagatccgcaaagcgtttgtagctgaggagggttggcgtttagtggccctcgattatagccaaattgaattacgtgtccttgcccatctttctggcgatgagaacctcatccgcgtgtttcaggaaggccgcgacattcacactcaaacggcaagctggatgtttggattatcagctgaagcgatcgatcctttgatgcgtcgtgcagcgaagaccatcaatttcggtgttctctacggtatgagtgcccatcgtttgtcgcaggaattaggcattccctatgaagaagctgcggcgttcattcagcgctactttcaaagctatcccaaagttaaagcatggatcgagaagactctcgaagaaggccgcacacgtggttacgtagagaccttatttggacgtcgccgctatgttcccgatttaacggctcgcgtgaaatctgtccgtgaagccgccgaacgcatggcgttcaacatgcctgtacagggcacggcagctgacctcatgaaacttgcaatggtgcgcctttttccacaattgcgtgaagttggtgcccgcatgctcttgcaggtccacgatgaactcttgttagaagcgccaaaagagcgtgcggaagaggtggcagccctcgcgaaagaggttatggaaggcgtgtggcccttagcggtgcctcttgaagtcgaagttggtattggcgaggattggttggctgccaaaggataatga

SEQ ID NO: 686 - protein, 841 aa, synthetic construct
  REGION 1..841: note = Variant of DNA polymerase I from Thermus sp. strain 2.9
MHHHHHHGGSGMLPLFEPKGRVLLVDGHHLAYRNFFALKGLTTSRGEPVQGVYGFAKSLLKALKEDGDVVIVVFDAKAPSFRHEAYEAYKAGRAPTPEDFPRQLALMKELVDLLGLERLEVPGFEADDVLATLAKKAEREGYEVQILTADRDLFQLLSPRISVLHPEGHRITPEWLWEKYGLRPEQWVDFRALAGDPSDNIPGVKGIGEKTALKLLKEWGSLENLLKNLDQVKPASVREKILAHLEDLKLSRELSRVRTDLPLEVDFRGRREPDWEGLKAFLERLEFGSLLHEFGLLESPLPAEEAPWPPPEGAFLGYRLSRPEPMWAELLALAASAQGRVYRAEDPHGALRGLKEVRGLLAKDLAVVALREGLDLPPTDDPMLLAYLLDPSNTTPEGVARRYGGEWTEDAGERALLAERLHANLLGRLQGEERLLWLYEEVEKPLSRVLAHMEATGVKLDVAYLEALSLEVAAEMRRLEEEVFRLAGHSFNLNSRDQLERVLFDELGLPPIGKTEKTGKRSTSAAVLEALREVHPIVDKILQYRELAKLKGTYIDPLPALVHPKTGRLHTRFNQTATATGRLSSSDPNLQNIPVRTPLGQKIRKAFVAEEGWRLVALDYSQIELRVLAHLSGDENLIRVFQEGRDIHTQTASWMFGLSAEAIDPLMRRAAKTINFGVLYGMSAHRLSQELGIPYEEAAAFIQRYFQSYPKVKAWIEKTLEEGRTRGYVETLFGRRRYVPDLTARVKSVREAAERMAFNMPVQGTAADLMKLAMVRLFPQLREVGARMLLQVHDELLLEAPKERAEEVAALAKEVMEGVWPLAVPLEVEVGIGEDWLAAKG

SEQ ID NO: 687 - DNA, 2529 bp, synthetic construct
  misc_feature 1..2529: note = Variant of DNA polymerase I from Thermus sp. strain 2.9
  source 1..2529: mol_type = other DNA
atgcaccatcatcatcatcatggcggtagcggcatgttaccgttgttcgaacctaaaggtcgcgtgcttctggttgatggccatcatctcgcgtatcgtaacttctttgccctgaaaggattaaccaccagccgtggcgagccggtacagggtgtctacggctttgcaaagtcgctcctgaaagctctgaaagaagacggtgatgtggtgattgttgtctttgatgcgaaagcgccaagttttcgccacgaagcgtacgaagcttacaaagccgggcgtgctccaacgccggaagactttcctcgccaattggcgcttatgaaggaattagtggatttgcttggcctcgaacgcttggaagttcccggtttcgaggcagacgacgtattagcgactctcgcaaagaaagccgaacgtgagggctatgaagtccagatcttgacagcagatcgcgatcttttccagcttttatctccgcgcatttccgtgttacacccggaagggcatcgtatcaccccggaatggctctgggagaaatatggtttgcgtcccgaacaatgggtggattttcgcgccttagcgggcgatccgagcgacaatattccgggagttaaaggtatcggcgagaagacggcgctcaagctccttaaagaatgggggtcgttggagaacttgcttaagaatttagatcaggtcaaaccagcttcagtgcgtgagaagattcttgcacacctcgaagacctcaaattaagccgcgaattgtcccgtgtacgcaccgatttgccgctcgaagttgatttccgtggccgccgcgaacctgactgggagggtcttaaagcgtttttagagcgtcttgaatttggttcgctcttgcatgaattcggccttttagaaagcccgttaccagccgaagaagcaccttggccaccgcccgaaggcgcgtttttaggttaccgtttgagtcgcccggaaccgatgtgggccgaattattggctcttgcagcgtctgcccagggacgtgtgtatcgcgcggaagaccctcatggtgcgctccgtggcctcaaagaagtccgtggactccttgccaaagacttagctgttgttgcattgcgcgaaggtcttgatttacctccgactgatgatccaatgcttcttgcgtacctcttggactcgtcaaacacgacgcccgaaggcgtagcccgtcgttacggcggcgagtggaccgaagatgcaggtgagcgcgcgttattggccgaacgtttgcacgccaatttattaggacgtttgcaaggcgaggaacgtctcctctggctttacgaagaagtggagaaaccattgagtcgcgtgctcgcgcatatggaagctaccggtgtcaaattagacgtggcgtatttggaggcactcagccttgaagttgctgccgaaatgcgccgcttggaggaagaagtattccgtttagcaggccactcctttaaccttaattctcgcgatcagttagaacgtgtgttgttcgatgaacttggtctccctcctatcggcaagacagagaagaccggtaaacgtagcacttcagcggcggttttagaagctcttcgcgaagtccatcccattgtggacaagatcttgcagtaccgcgaactcgcgaaattgaaaggcacctatattgaccctcttccggcattagtccacccgaaaacgggacgcctccatacccgcttcaaccaaacagccacggcgaccgatcgtttgtcctcctctgatccaaaccttcagaatattccagtacgtaccccattgggccagaagatccgcaaagcgtttgtagctgaggagggttggcgtttagtggccctcgattatagccaaattgaattacgtgtccttgcccatctttctggcgatgagaacctcatccgcgtgtttcaggaaggccgcgacattcacactcaaacggcaagctggatgtttggattatcagctgaagcgatcgatcctttgatgcgtcgtgcagcgaagaccatcaatttcggtgttctctacggtatgagtgcccatcgtttgtcgcaggaattaggcattccctatgaagaagctgcggcgttcattcagcgctactttcaaagctatcccaaagttaaagcatggatcgagaagactctcgaagaaggccgcacacgtggttacgtagagaccttatttggacgtcgccgctatgttcccgatttaaacgctcgcgtgaaatctgtccgtgaagccgccgaacgcatggcgttcaacatgcctgtacagggcacggcagctgacctcatgaaacttgcaatggtgcgcctttttccacaattgcgtgaagttggtgcccgcatgctcttgcaggtccacgatgaactcttgttagaagcgccaaaagagcgtgcggaagaggtggcagccctcgcgaaagaggttatggaaggcgtgtggcccttagcggtgcctcttgaagtcgaagttggtattggcgaggattggttggctgccaaaggataatga

SEQ ID NO: 688 - protein, 841 aa, synthetic construct
  REGION 1..841: note = Variant of DNA polymerase I from Thermus sp. strain 2.9
MHHHHHHGGSGMLPLFEPKGRVLLVDGHHLAYRNFFALKGLTTSRGEPVQGVYGFAKSLLKALKEDGDVVIVVFDAKAPSFRHEAYEAYKAGRAPTPEDFPRQLALMKELVDLLGLERLEVPGFEADDVLATLAKKAEREGYEVQILTADRDLFQLLSPRISVLHPEGHRITPEWLWEKYGLRPEQWVDFRALAGDPSDNIPGVKGIGEKTALKLLKEWGSLENLLKNLDQVKPASVREKILAHLEDLKLSRELSRVRTDLPLEVDFRGRREPDWEGLKAFLERLEFGSLLHEFGLLESPLPAEEAPWPPPEGAFLGYRLSRPEPMWAELLALAASAQGRVYRAEDPHGALRGLKEVRGLLAKDLAVVALREGLDLPPTDDPMLLAYLLDSSNTTPEGVARRYGGEWTEDAGERALLAERLHANLLGRLQGEERLLWLYEEVEKPLSRVLAHMEATGVKLDVAYLEALSLEVAAEMRRLEEEVFRLAGHSFNLNSRDQLERVLFDELGLPPIGKTEKTGKRSTSAAVLEALREVHPIVDKILQYRELAKLKGTYIDPLPALVHPKTGRLHTRFNQTATATDRLSSSDPNLQNIPVRTPLGQKIRKAFVAEEGWRLVALDYSQIELRVLAHLSGDENLIRVFQEGRDIHTQTASWMFGLSAEAIDPLMRRAAKTINFGVLYGMSAHRLSQELGIPYEEAAAFIQRYFQSYPKVKAWIEKTLEEGRTRGYVETLFGRRRYVPDLNARVKSVREAAERMAFNMPVQGTAADLMKLAMVRLFPQLREVGARMLLQVHDELLLEAPKERAEEVAALAKEVMEGVWPLAVPLEVEVGIGEDWLAAKG

SEQ ID NO: 689 - DNA, 2529 bp, synthetic construct
  misc_feature 1..2529: note = Variant of DNA polymerase I from Thermus sp. strain 2.9
  source 1..2529: mol_type = other DNA
atgcaccatcatcatcatcatggcggtagcggcatgttaccgttgttcgaacctaaaggtcgcgtgcttctggttgatggccatcatctcgcgtatcgtaacttctttgccctgaaaggattaaccaccagccgtggcgagccggtacagggtgtctacggctttgcaaagtcgctcctgaaagctctgaaagaagacggtgatgtggtgattgttgtctttgatgcgaaagcgccaagttttcgccacgaagcgtacgaagcttacaaagccgggcgtgctccaacgccggaagactttcctcgccaattggcgcttatgaaggaattagtggatttgcttggcctcgaacgcttggaagttcccggtttcgaggcagacgacgtattagcgactctcgcaaagaaagccgaacgtgagggctatgaagtccatatcttgacagcagatcgcgatcttttccagcttttatctccgcgcatttccgtgttacacccggaagggcatcgtatcaccccggaatggctctgggagaaatatggtttgcgtcccgaacaatgggtggattttcgcgccttagcgggcgatccgagcgacaatattccgggagttaaaggtatcggcgagaagacggcgctcaagctccttaaagaatgggggtcgttggagaacttgcttaagaatttagatcaggtcaaaccagcttcagtgcgtgagaagattcttgcacacctcgaagacctcaaattaagccgcgaattgtcccgtgtacgcaccgatttgccgctcgaagttgatttccgtggccgccgcgaacctgactgggagggtcttaaagcgtttttagagcgtcttgaatttggttcgctcttgcatgaattcggccttttagaaagcccgttaccagccgaagaagcaccttggccaccgcccgaaggcgcgtttttaggttaccgtttgagtcgcccggaaccgatgtgggccgaattattggctcttgcagcgtctgcccagggacgtgtgtatcgcgcggaagaccctcatggtgcgctccgtggcctcaaagaagtccgtggactccttgccaaagacttagctgttgttgcattgcgcgaaggtcttgatttacctccgactgatgatccaatgcttcttgcgtacctcttggacccgtcaaacacgacgcccgaaggcgtagcccgtcgttacggcggcgagtggaccgaagatgcaggtgagcgcgcgttattggccgaacgtttgcacgccaatttattaggacgtttgcaaggcgaggaacgtctcctctggctttacgaagaagtggagaaaccattgagtcgcgtgctcgcgcatatggaagctaccggtgtcaaattagacgtggcgtatttggaggcactcagccttgaagttgctgccgaaatgcgccgcttggaggaagaagtattccgtttagcaggccactcctttaaccttaattctcgcgatcagttagaacgtgtgttgttcgatgaacttggtctccctcctatcggcaagacagagaagaccggtaaacgtagcacttcagcggcggttttagaagctcttcgcgaagtccatcccattgtggacaagatcttgcagtaccgcgaactcgcgaaattgaaaggcacctatattgaccctcttccggcattagtccacccgaaaacgggacgcctccatacccgcttcaaccaaacagccacggcgaccggtcgtttgtcctcctctgatccaaaccttcagaatattccagtacgtaccccattgggccagaagatccgcaaagcgtttgtagctgaggagggttggcgtttagtggccctcgattatagccaaattgaattacgtgtccttgcccatctttctggcgatgagaacctcatccgcgtgtttcaggaaggccgcgacattcacactcaaacggcaagctggatgtttggattatcagctgaagcgatcgatcctttgatgcgtcgtgcagcgaagaccatcaatttcggtgttctctacggtatgagtgcccatcgtttgtcgcaggaattaggcattccctatgaagaagctgcggcgttcattcagcgctactttcaaagctatcccaaagttaaagcatggatcgagaagactctcgaagaaggccgcacacgtggttacgtagagaccttatttggacgtcgccgctatgttcccgatttaactgctcgcgtgaaatctgtccgtgaagccgccgaacgcatggcgttcaacatgcctgtacagggcacggcagctgacctcatgaaacttgcaatggtgcgcctttttccacaattgcgtgaagttggtgcccgcatgctcttgcaggtccacgatgaactcttgttagaagcgccaaaagagcgtgcggaagaggtggcagccctcgcgaaagaggttatggaaggcgtgtggcccttagcggtgcctcttgaagtcgaagttggtattggcgaggattggttggctgccaaaggataatga

SEQ ID NO: 690 - protein, 841 aa, synthetic construct
  REGION 1..841: note = Variant of DNA polymerase I from Thermus sp. strain 2.9
MHHHHHHGGSGMLPLFEPKGRVLLVDGHHLAYRNFFALKGLTTSRGEPVQGVYGFAKSLLKALKEDGDVVIVVFDAKAPSFRHEAYEAYKAGRAPTPEDFPRQLALMKELVDLLGLERLEVPGFEADDVLATLAKKAEREGYEVHILTADRDLFQLLSPRISVLHPEGHRITPEWLWEKYGLRPEQWVDFRALAGDPSDNIPGVKGIGEKTALKLLKEWGSLENLLKNLDQVKPASVREKILAHLEDLKLSRELSRVRTDLPLEVDFRGRREPDWEGLKAFLERLEFGSLLHEFGLLESPLPAEEAPWPPPEGAFLGYRLSRPEPMWAELLALAASAQGRVYRAEDPHGALRGLKEVRGLLAKDLAVVALREGLDLPPTDDPMLLAYLLDPSNTTPEGVARRYGGEWTEDAGERALLAERLHANLLGRLQGEERLLWLYEEVEKPLSRVLAHMEATGVKLDVAYLEALSLEVAAEMRRLEEEVFRLAGHSFNLNSRDQLERVLFDELGLPPIGKTEKTGKRSTSAAVLEALREVHPIVDKILQYRELAKLKGTYIDPLPALVHPKTGRLHTRFNQTATATGRLSSSDPNLQNIPVRTPLGQKIRKAFVAEEGWRLVALDYSQIELRVLAHLSGDENLIRVFQEGRDIHTQTASWMFGLSAEAIDPLMRRAAKTINFGVLYGMSAHRLSQELGIPYEEAAAFIQRYFQSYPKVKAWIEKTLEEGRTRGYVETLFGRRRYVPDLTARVKSVREAAERMAFNMPVQGTAADLMKLAMVRLFPQLREVGARMLLQVHDELLLEAPKERAEEVAALAKEVMEGVWPLAVPLEVEVGIGEDWLAAKG

SEQ ID NO: 691 - DNA, 2529 bp, synthetic construct
  misc_feature 1..2529: note = Variant of DNA polymerase I from Thermus sp. strain 2.9
  source 1..2529: mol_type = other DNA
atgcaccatcatcatcatcatggcggtagcggcatgttaccgttgttcgaacctaaaggtcgcgtgcttctggttgatggccatcatctcgcgtatcgtaacttctttgccctgaaaggattaaccaccagccgtggcgagccggtacagggtgtctacggctttgcaaagtcgctcctgaaagctctgaaagaagacggtgatgtggtgattgttgtctttgatgcgaaagcgccaagttttcgccacgaagcgtacgaagcttacaaagccgggcgtgctccaacgccggaagactttcctcgccaattggcgcttatgaaggaattagtggatttgcttggcctcgaacgcttggaagttcccggtttcgaggcagacgacgtattagcgactctcgcaaagaaagccgaacgtgagggctatgaagtccagatcttgacagcagatcgcgatcttttccagcttttatctccgcgcatttccgtgttacacccggaagggcatcgtatcaccccggaatggctctgggagaaatatggtttgcgtcccgaacaatgggtggattttcgcgccttagcgggcgatccgagcgacaatattccgggagttaaaggtatcggcgagaagacggcgctcaagctccttaaagaatgggggtcgttggagaacttgcttaagaatttagatcaggtcaaaccagcttcagtgcgtgagaagattcttgcacacctcgaagacctcaaattaagccgcgaattggtccgtgtacgcaccgatttgccgctcgaagttgatttccgtggccgccgcgaacctgactgggagggtcttaaagcgtttttagagcgtcttgaatttggttcgctcttgcatgaattcggccttttagaaagcccgttaccagccgaagaagcaccttggccaccgcccgaaggcgcgtttttaggttaccgtttgagtcgcccggaaccgatgtgggccgaattattggctcttgcagcgtctgcccagggacgtgtgtatcgcgcggaagaccctcatggtgcgctccgtggcctcaaagaagtccgtggactccttgccaaagacttagctgttgttgcattgcgcgaaggtcttgatttacctccgactgatgatccaatgcttcttgcgtacctcttggactcgtcaaacacgacgcccgaaggcgtagcccgtcgttacggcggcgagtggaccgaagatgcaggtgagcgcgcgttattggccgaacgtttgcacgccaatttattaggacgtttgcaaggcgaggaacgtctcctctggctttacgaagaagtggagaaaccattgagtcgcgtgctcgcgcatatggaagctaccggtgtcaaattagacgtggcgtatttggaggcactcagccttgaagccgctgccgaaatgcgccgcttggaggaagaagtattccgtttagcaggccactcctttaaccttaattctcgcgatcagttagaacgtgtgttgttcgatgaacttggtctccctcctatcggcaagacagagaagaccggtaaacgtagcacttcagcggcggttttagaagctcttcgcgaagtccatcccattgtggacaagatcttgcagtaccgcgaactcgcgaaattgaaaggcacctatattgaccgtcttccggcattagtccacccgaaaacgggacgcctccatacccgcttcaaccaaacagccacggcgaccggtcgtttgtcctcctctgatccaaaccttcagaatattccagtacgtaccccattgggccagaaaatccgcaaagcgtttgtagctgaggagggttggcgtttagtggccctcgattatagccaaattgaattacgtgtccttgcccatctttctggcgatgagaacctcatccgcgtgtttcaggaaggccgcgacattcacactcaaacggcaagctggatgtttggactgtcatcggaagcgatcgatcctttgatgcgtcgtgcagcgaagaccatcaatttcggtgttctctacggtatgagtgcccatcgtttgtcgcaggaattaggcattccctatgaagaagctgcggcgttcattcagcgctactttcaaagctatcccaaagttaaagcatggatcgagaagactctcgaagaaggccgcacacgtggttacgtagagaccttatttggacgtcgccgctatgttcccgatttaactgctcgcgtgaaatctgtccgtgaagccgccgaacgcatggcgtttaacatgcctgtacagggcacggcagctgacctcatgaaacttgcaatggtgcgcctttttccacaattgcgtgaagttggtgcccgcatgctcttgcaggtccacgatgaactcttgttagaagcgccaaaagagcgtgcggaagaggtggcagccctcgcgaaagaggttatggaaggcgtgtggcccttagcggtgcctcttgaagtcgaagttggtattggcgaggattggttggctgccaaaggataatga

SEQ ID NO: 692 - protein, 841 aa, synthetic construct
  REGION 1..841: note = Variant of DNA polymerase I from Thermus sp. strain 2.9
MHHHHHHGGSGMLPLFEPKGRVLLVDGHHLAYRNFFALKGLTTSRGEPVQGVYGFAKSLLKALKEDGDVVIVVFDAKAPSFRHEAYEAYKAGRAPTPEDFPRQLALMKELVDLLGLERLEVPGFEADDVLATLAKKAEREGYEVQILTADRDLFQLLSPRISVLHPEGHRITPEWLWEKYGLRPEQWVDFRALAGDPSDNIPGVKGIGEKTALKLLKEWGSLENLLKNLDQVKPASVREKILAHLEDLKLSRELVRVRTDLPLEVDFRGRREPDWEGLKAFLERLEFGSLLHEFGLLESPLPAEEAPWPPPEGAFLGYRLSRPEPMWAELLALAASAQGRVYRAEDPHGALRGLKEVRGLLAKDLAVVALREGLDLPPTDDPMLLAYLLDSSNTTPEGVARRYGGEWTEDAGERALLAERLHANLLGRLQGEERLLWLYEEVEKPLSRVLAHMEATGVKLDVAYLEALSLEAAAEMRRLEEEVFRLAGHSFNLNSRDQLERVLFDELGLPPIGKTEKTGKRSTSAAVLEALREVHPIVDKILQYRELAKLKGTYIDRLPALVHPKTGRLHTRFNQTATATGRLSSSDPNLQNIPVRTPLGQKIRKAFVAEEGWRLVALDYSQIELRVLAHLSGDENLIRVFQEGRDIHTQTASWMFGLSSEAIDPLMRRAAKTINFGVLYGMSAHRLSQELGIPYEEAAAFIQRYFQSYPKVKAWIEKTLEEGRTRGYVETLFGRRRYVPDLTARVKSVREAAERMAFNMPVQGTAADLMKLAMVRLFPQLREVGARMLLQVHDELLLEAPKERAEEVAALAKEVMEGVWPLAVPLEVEVGIGEDWLAAKG

SEQ ID NO: 693 - DNA, 2529 bp, synthetic construct
  misc_feature 1..2529: note = Variant of DNA polymerase I from Thermus sp. strain 2.9
  source 1..2529: mol_type = other DNA
atgcaccatcatcatcatcatggcggtagcggcatgttaccgttgttcgaacctaaaggtcgcgtgcttctggttgatggccatcatctcgcgtatcgtaacttctttgccctgaaaggattaaccaccagccgtggcgagccggtacagggtgtctacggctttgcaaagtcgctcctgaaagctctgaaagaagacggtgatgtggtgattgttgtctttgatgcgaaagcgccaagttttcgccacgaagcgtacgaagcttacaaagccgggcgtgctccaacgccggaagactttcctcgccaattggcgcttatgaaggaattagtggatttgcttggcctcgaacgcttggaagttcccggtttcgaggcagacgacgtattagcgactctcgcaaagaaagccgaacgtgagggctatgaagtccagatcttgacagcagatcgcgatcttttccagcttttatctccgcgcatttccgtgttacacccggaagggcatcgtatcaccccggaatggctctgggagaaatatggtttgcgtcccgaacaatgggtggattttcgcgccttagcgggcgatccgagcgacaatattccgggagttaaaggtatcggcgagaagacggcgctcaagctccttaaagaatgggggtcgttggagaacttgcttaagaatttagatcaggtcaaaccagcttcagtgcgtgagaagattcttgcacacctcgaagacctcaaattaagccgcgaattgtcccgtgtacgcaccgatttgccgctcgaagttgatttccgtggccgccgcgaacctgactgggagggtcttaaagcgtttttagagcgtcttgaatttggttcgctcttgcatgaattcggccttttagaaagcccgttaccagccgaagaagcaccttggccaccgcccgaaggcgcgtttttaggttaccgtttgagtcgcccggaaccgatgtgggccgaattattggctcttgcagcgtctgcccagggacgtgtgtatcgcgcggaagaccctcatggtgcgctccgtggcctcaaagaagtccgtggactccttgccaaagacttagctgttgttgcattgcgcgaaggtcttgatttacctccgactgatgatccaatgcttcttgcgtacctcttggacccgtcaaacacgacgcccgaaggcgtagcccgtcgttacggcggcgagtggaccgaagatgcaggtgagcgcgcgttattggccgaacgtttgcacgccaatttattaggacgtttgcaaggcgaggaacgtctcctctggctttacgaagaagtggagaaaccattgagtcgcgtgctcgcgcatatggaagctaccggtgtcaaattagacgtggcgtatttggaggcactcagccttgaagttgctgccgaaatgcgccgcttggaggaagaagtattccgtttagcaggccactcctttaaccttaattctcgcgatcagttagaacgtgtgttgttcgatgaacttggtctccctcctatcggcaagacagagaagaccggtaaacgtagcacttcagcggcggttttagaagctcttcgcgaagtccatcccattgtggacaagatcttgcagtaccgcgaactcgcgaaattgaaaggcacctatattgaccctcttccggcattagtccacccgaaaacgggacgcctccatacccgcttcaaccaaacagccacggcgaccggtcgtttgtcctcctctgatccaaaccttcagaatattccagtacgtaccccattgggccagcacatccgcaaagcgtttgtagctgaggagggttggcgtttagtggccctcgattatagccaaattgaattacgtgtccttgcccatctttctggcgatgagaacctcatccgcgtgtttcaggaaggccgcgacattcacactcaaacggcaagctggatgtttggattatcagctgaagcgatcgatcctttgatgcgtcgtgcagcgaagaccatcaatttcggtgttctctacggtatgagtgcccatcgtttgtcgcaggaattaggcattccctatgaagaagctgcggcgctcattcagcgctactttcaaagctatcccaaagttaaagcatggatcgagaagactctcgaagaaggccgcacacgtggttacgtagagaccttatttggacgtcgccgctatgttcccgatttaaacgctcgcgtgaaatctgtccgtgaagccgccgaacgcatggcgttcaacatgcctgtacagggcacggcagctgacctcatgaaacttgcaatggtgcgcctttttccacaattgcgtgaagttggtgcccgcatgctcttgcaggtccacgatgaactcttgttagaagcgccaaaagagcgtgcggaagaggtggcagccctcgcgaaagaggttatggaaggcgtgtggcccttagcggtgcctcttgaagtcgaagttggtattggcgaggattggttggctgccaaaggataatga

SEQ ID NO: 694 - protein, 841 aa, synthetic construct
  REGION 1..841: note = Variant of DNA polymerase I from Thermus sp. strain 2.9
MHHHHHHGGSGMLPLFEPKGRVLLVDGHHLAYRNFFALKGLTTSRGEPVQGVYGFAKSLLKALKEDGDVVIVVFDAKAPSFRHEAYEAYKAGRAPTPEDFPRQLALMKELVDLLGLERLEVPGFEADDVLATLAKKAEREGYEVQILTADRDLFQLLSPRISVLHPEGHRITPEWLWEKYGLRPEQWVDFRALAGDPSDNIPGVKGIGEKTALKLLKEWGSLENLLKNLDQVKPASVREKILAHLEDLKLSRELSRVRTDLPLEVDFRGRREPDWEGLKAFLERLEFGSLLHEFGLLESPLPAEEAPWPPPEGAFLGYRLSRPEPMWAELLALAASAQGRVYRAEDPHGALRGLKEVRGLLAKDLAVVALREGLDLPPTDDPMLLAYLLDPSNTTPEGVARRYGGEWTEDAGERALLAERLHANLLGRLQGEERLLWLYEEVEKPLSRVLAHMEATGVKLDVAYLEALSLEVAAEMRRLEEEVFRLAGHSFNLNSRDQLERVLFDELGLPPIGKTEKTGKRSTSAAVLEALREVHPIVDKILQYRELAKLKGTYIDPLPALVHPKTGRLHTRFNQTATATGRLSSSDPNLQNIPVRTPLGQHIRKAFVAEEGWRLVALDYSQIELRVLAHLSGDENLIRVFQEGRDIHTQTASWMFGLSAEAIDPLMRRAAKTINFGVLYGMSAHRLSQELGIPYEEAAALIQRYFQSYPKVKAWIEKTLEEGRTRGYVETLFGRRRYVPDLNARVKSVREAAERMAFNMPVQGTAADLMKLAMVRLFPQLREVGARMLLQVHDELLLEAPKERAEEVAALAKEVMEGVWPLAVPLEVEVGIGEDWLAAKG

SEQ ID NO: 695 - DNA, 2529 bp, synthetic construct
  misc_feature 1..2529: note = Variant of DNA polymerase I from Thermus sp. strain 2.9
  source 1..2529: mol_type = other DNA
atgcaccatcatcatcatcatggcggtagcggcatgttaccgttgttcgaacctaaaggtcgcgtgcttctggttgatggccatcatctcgcgtatcgtaacttctttgccctgaaaggattaaccaccagccgtggcgagccggtacagggtgtctacggctttgcaaagtcgctcctgaaagctctgaaagaagacggtgatgtggtgattgttgtctttgatgcgaaagcgccaagttttcgccacgaagcgtacgaagcttacaaagccgggcgtgctccaacgccggaagactttcctcgccaattggcgcttatgaaggaattagtggatttgcttggcctcgaacgcttggaagttcccggtttcgaggcagacgacgtattagcgactctcgcaaagaaagccgaacgtgagggctatgaagtccagatcttgacagcagatcgcgatcttttccagcttttatctccgcgcatctcggtgttacacccggaagggcatcgcatcaccccggaatggctctgggagaaatatggtttgcgtcccgaacaatgggtggattttcgcgccttagcgggcgatccgagcgacaatattccgggagttaaaggtatcggcgagaagacggcgctcaagctccttaaagaatgggggtcgttggagaacttgcttaagaatttagatcaggtcaaaccagcttcagtgcgtgagaagattcttgcacacctcgaagacctcaaattaagccgcgaattgtcccgtgtacgcaccgatttgccgctcgaagttgatttccgtggccgccgcgaacctgactgggagggtcttaaagcgtttttagagcgtcttgaatttggttcgctcttgcatgaattcggccttttagaaagcccgttaccagccgaagaagcaccttggccaccgcccgaaggcgcgtttttaggttaccgtttgagtcgcccggaaccgatgtgggccgaattattggctcttgcagcgtctgcccagggacgtgtgtatcgcgcggaagaccctcatggtgcgctccgtggcctcaaagaagtccgtggactccttgccaaagacttagctgttgttgcattgcgcgaaggtcttgatttacctccgactgatgatccaatgcttcttgcgtacctcttggacccgtcaaacacgacgcccgaaggcgtagcccgtcgttacggcggcgagtggaccgaagatgcaggcgagcgcgcgttattggccgaacgtttgcacgccaatttattaggacgtttgcaaggcgaggaacgtctcctctggctttacgaagaagtggagaaaccattgagtcgcgtgctcgcgcatatggaagctaccggtgtcaaattagacgtggcgtatttggaggcactcagccttgaagttgctgccgaaatgcgccgcttggaggaagaagtattccgtttagcaggccactcctttaaccttaattctcgcgatcagttagaacgtgtgttgttcgatgaacttggtctccctcctatcggcaagacagagaagaccggtaaacgtagcacttcagcggcggttttagaagctcttcgcgaagtccatcccattgtggacaagatcttgcagtaccgcgaactcgcgaaattgaaaggcacctatattgaccctcttccggcattagtccacccgaaaacgggacgcctccatacccgcttcaaccaaacagccacggcgaccggtcgtttgtcctcctctgatccaaaccttcagaatattccagtacgtaccccattgggccagaagatccgcaaagcgtttgtagctgaggagggttggcgtttagtggccctcgattatagccaaattgaattacgtgtccttgcccatctttctggcgatgagaacctcatccgcgtgtttcaggaaggccgcgacattcacactcaaacggcaagctggatgtttggattatcagctgaagcgatcgatcctttgatgcgtcgtgcagcgaagaccatcaatttcggtgttctctacggtatgagtgcccatcgtttgtcgcaggaattaggcattccctatgaagaagctgtggcgttcattcagcgctactttcaaagctatcccaaagttaaagcatggatcgagaagactctcgaagaaggccgcacacgtggttacgtagagaccttatttggacgtcgccgctatgttcccgatttaaacgctcgcgtgaaatctgtccgtgaagccgccgaacgcatggcgttcaacatgcctgtacagggcacggcagctgacctcatgaaacttgcaatggtgcgcctttttccacaattgcgtgaagttggtgcccgcatgctcttgcaggtccacgatgaactcttgttagaagcgccaaaagagcgtgcggaagaggtggcagccctcgcgaaagaggttatggaaggcgtgtggcccttagcggtgcctcttgaagtcgaagttggtattggcgaggattggttggctgccaaaggataatga

SEQ ID NO: 696 - protein, 841 aa, synthetic construct
  REGION 1..841: note = Variant of DNA polymerase I from Thermus sp. strain 2.9
MHHHHHHGGSGMLPLFEPKGRVLLVDGHHLAYRNFFALKGLTTSRGEPVQGVYGFAKSLLKALKEDGDVVIVVFDAKAPSFRHEAYEAYKAGRAPTPEDFPRQLALMKELVDLLGLERLEVPGFEADDVLATLAKKAEREGYEVQILTADRDLFQLLSPRISVLHPEGHRITPEWLWEKYGLRPEQWVDFRALAGDPSDNIPGVKGIGEKTALKLLKEWGSLENLLKNLDQVKPASVREKILAHLEDLKLSRELSRVRTDLPLEVDFRGRREPDWEGLKAFLERLEFGSLLHEFGLLESPLPAEEAPWPPPEGAFLGYRLSRPEPMWAELLALAASAQGRVYRAEDPHGALRGLKEVRGLLAKDLAVVALREGLDLPPTDDPMLLAYLLDPSNTTPEGVARRYGGEWTEDAGERALLAERLHANLLGRLQGEERLLWLYEEVEKPLSRVLAHMEATGVKLDVAYLEALSLEVAAEMRRLEEEVFRLAGHSFNLNSRDQLERVLFDELGLPPIGKTEKTGKRSTSAAVLEALREVHPIVDKILQYRELAKLKGTYIDPLPALVHPKTGRLHTRFNQTATATGRLSSSDPNLQNIPVRTPLGQKIRKAFVAEEGWRLVALDYSQIELRVLAHLSGDENLIRVFQEGRDIHTQTASWMFGLSAEAIDPLMRRAAKTINFGVLYGMSAHRLSQELGIPYEEAVAFIQRYFQSYPKVKAWIEKTLEEGRTRGYVETLFGRRRYVPDLNARVKSVREAAERMAFNMPVQGTAADLMKLAMVRLFPQLREVGARMLLQVHDELLLEAPKERAEEVAALAKEVMEGVWPLAVPLEVEVGIGEDWLAAKG

SEQ ID NO: 697 - DNA, 2529 bp, synthetic construct
  misc_feature 1..2529: note = Variant of DNA polymerase I from Thermus sp. strain 2.9
  source 1..2529: mol_type = other DNA
atgcaccatcatcatcatcatggcggtagcggcatgttaccgttgttcgaacctaaaggtcgcgtgcttctggttgatggccatcatctcgcgtatcgtaacttctttgccctgaaaggattaaccaccagccgtggcgagccggtacagggtgtctacggctttgcaaagtcgctcctgaaagctctgaaagaagacggtgatgtggtgattgttgtctttgatgcgaaagcgccaagttttcgccacgaagcgtacgaagcttacaaagccgggcgtgctccaacgccggaagactttcctcgccaattggcgcttatgaaggaattagtggatttgcttggcctcgaacgcttggaagttcccggtttcgaggcagacgacgtattagcgactctcgcaaagaaagccgaacgtgagggctatgaagtccagatcttgacagcagatcgcgatcttttccagcttttatctccgcgcatttccgtgttacacccggaagggcatcgtatcaccccggaatggctctgggagaaatatggtttgcgtcccgaacaatgggtggattttcgcgccttagcgggcgatccgagcgacaatattccgggagttaaaggtatcggcgagaagacggcgctcaagctccttaaagaatgggggtcgttggagaacttgcttaagaatttagatcaggtcaaaccagcttcagtgcgtgagaagattcttgcacacctcgaagacctcaaattaagccgcgaattggtccgtgtacgcaccgatttgccgctcgaagttgatttccgtggccgccgcgaacctgactgggagggtcttaaagcgtttttagagcgtcttgaatttggttcgctcttgcatgaattcggccttttagaaagcccgttaccagccgaagaagcaccttggccaccgcccgaaggcgcgtttttaggttaccgtttgagtcgcccggaaccgatgtgggccgaattattggctcttgcagcgtctgcccagggacgtgtgtatcgcgcggaagaccctcatggtgcgctccgtggcctcaaagaagtccgtggactccttgccaaagacttagctgttgttgcattgcgcgaaggtcttgatttacctccgactgatgatccaatgcttcttgcgtacctcttggactcgtcaaacacgacgcccgaaggcgtagcccgtcgttacggcggcgagtggaccgaagatgcaggtgagcgcgcgttattggccgaacgtttgcacgccaatttattaggacgtttgcaaggcgaggaacgtctcctctggctttacgaagaagtggagaaaccattgagtcgcgtgctcgcgcatatggaagctaccggtgtcaaattagacgtggcgtatttggaggcactcagccttgaagttgctgccgaaatgcgccgcttggaggaagaagtattccgtttagcaggccactcctttaaccttaattctcgcgatcagttagaacgtgtgttgttcgatgaacttggtctccctcctatcggcaagacagagaagaccggtaaacgtagcacttcagcggcggttttagaagctcttcgcgaagtccatcccattgtggacaagatcttgcagtaccgcgaactcgcgaaattgaaaggcacctatattgaccgtcttccggcattagtccacccgaaaacgggacgcctccatacccgcttcaaccaaacagccacggcgaccggtcgtttgtcctcctctgatccaaaccttcagaatattccagtacgtaccccattgggccagaaaatccgcaaagcgtttgtagctgaggagggttggcgtttagtggccctcgattatagccaaattgaattacgtgtccttgcccatctttctggcgatgagaacctcatccgcgtgtttcaggaaggccgcgacattcacactcaaacggcaagctggatgtttggattatcagctgaagcgatcgatcctttgatgcgtcgtgcagcgaagaccatcaatttcggtgttctctacggtatgagtgcccatcgtttgtcgcaggaattaggcattccctatgaagaagctgcggcgttcattcagcgctactttcaaagctatcccaaagttaaagcatggatcgagaagactctcgaagaaggccgcacacgtggttacgtagagaccttatttggacgtcgccgctatgttcccgatttaaacgctcgcgtgaaatctgtccgtgaagccgccgaacgcatggcgtttaacatgcctgtacagggcacggcagctgacctcatgaaacttgcaatggtgcgcctttttccacaattgcgtgaagttggtgcccgcatgctcttgcaggtccacgatgaactcttgttagaagcgccaaaagagcgtgcggaagaggtggcagccctcgcgaaagaggttatggaaggcgtgtggcccttagcggtgcctcttgaagtcgaagttggtattggcgaggattggttggctgccaaaggataatga

SEQ ID NO: 698 - protein, 841 aa, synthetic construct; identical to SEQ ID NO: 144
  REGION 1..841: note = Variant of DNA polymerase I from Thermus sp. strain 2.9

SEQ ID NO: 699 - DNA, 2529 bp, synthetic construct; identical to SEQ ID NO: 525
  misc_feature 1..2529: note = Variant of DNA polymerase I from Thermus sp. strain 2.9
  source 1..2529: mol_type = other DNA

SEQ ID NO: 700 - protein, 841 aa, synthetic construct; identical to SEQ ID NO: 526
  REGION 1..841: note = Variant of DNA polymerase I from Thermus sp. strain 2.9

SEQ ID NO: 701 - DNA, 2529 bp, synthetic construct
  misc_feature 1..2529: note = Variant of DNA polymerase I from Thermus sp. strain 2.9
  source 1..2529: mol_type = other DNA
atgcaccatcatcatcatcatggcggtagcggcatgttaccgttgttcgaacctaaaggtcgcgtgcttctggttgatggccatcatctcgcgtatcgtaacttctttgccctgaaaggattaaccaccagccgtggcgagccggtacagggtgtctacggctttgcaaagtcgctcctgaaagctctgaaagaagacggtgatgtggtgattgttgtctttgatgcgaaagcgccaagttttcgccacgaagcgtacgaagcttacaaagccgggcgtgctccaacgccggaagactttcctcgccaattggcgcttatgaaggaattagtggatttgcttggcctcgaacgcttggaagttcccggtttcgaggcagacgacgtattagcgactctcgcaaagaaagccgaacgtgagggctatgaagtccagatcttgacagcagatcgcgatcttttccagcttttatctccgcgcatttccgtgttacacccggaagggcatcgtatcaccccggaatggctctgggagaaatatggtttgcgtcccgaacaatgggtggattttcgcgccttagcgggcgatccgagcgacaatattccgggagttaaaggtatcggcgagaagacggcgctcaagctccttaaagaatgggggtcgttggagaacttgcttaagaatttagatcaggtcaaaccagcttcagtgcgtgagaagattcttgcacacctcgaagacctcaaattaagccgcgaattgtcccgtgtacgcaccgatttgccgctcgaagttgatttccgtggccgccgcgaacctgactgggagggtcttaaagcgtttttagagcgtcttgaatttggttcgctcttgcatgaattcggccttttagaaagcccgttaccagccgaagaagcaccttggccaccgcccgaaggcgcgtttttaggttaccgtttgagtcgcccggaaccgatgtgggccgaattattggctcttgcagcgtctgcccagggacgtgtgtatcgcgcggaagaccctcatggtgcgctccgtggcctcaaagaagtccgtggactccttgccaaagacttagctgttgttgcattgcgcgaaggtcttgatttacctccgactgatgatccaatgcttcttgcgtacctcttggacccgtcaaacacgacgcccgaaggcgtagcccgtcgttacggcggcgagtggaccgaagatgcaggtgagcgcgcgttattggccgaacgtttgcacgccaatttattaggacgtttgcaaggcgaggaacgtctcctctggctttacgaagaagtggagaaaccattgagtcgcgtgctcgcgcatatggaagctaccggtgtcaaattagacgtggcgtatttggaggcactcagccttgaagttgctgccgaaatgcgccgcttggaggaagaagtattccgtttagcaggccactcctttaaccttaattctcgcgatcagttagaacgtgtgttgttcgatgaacttggtctccctcctatcggcaagacagagaagaccggtaaacgtagcacttcagcggcggttttagaagctcttcgcgaagtccatcccattgtggacaagatcttgcagtaccgcgaactcgcgaaattgaaaggcacctatattgaccgtcttccggcattagtccacccgaaaacgggacgcctccatacccgcttcaaccaaacagccacggcgaccggtcgtttgtcctcctctgatccaaaccttcagaatattccagtacgtaccccattgggccagaagatccgcaaagcgtttgtagctgaggagggttggcgtttagtggccctcgattatagccaaattgaattacgtgtccttgcccatctttctggcgatgagaacctcatccgcgtgtttcaggaaggccgcgacattcacactcaaacggcaagctggatgtttggattatcagctgaagcgatcgatcctttgatgcgtcgtgcagcgaagaccatcaatttcggtgttctctacggtatgagtgcccatcgtttgtcgcaggaattaggcattccctatgaagaagctgcggcgttcattcagcgctactttcaaagctatcccaaagttaaagcatggatcgagaagactctcgaagaaggccgcacacgtggttacgtagagaccttatttggacgtcgccgctatgttcccgatttaaacgctcgcgtgaaatctgtccgtgaagccgccgaacgcatggcgttcaacatgcctgtacagggcacggcagctgacctcatgaaacttgcaatggtgcgcctttttccacaattgcgtgaagttggtgcccgcatgctcttgcaggtccacgatgaactcttgttagaagcgccaaaagagcgtgcggaagaggtggcagccctcgcgaaagaggttatggaaggcgtgtggcccttagcggtgcctcttgaagtcgaagttggtattggcgaggattggttggctgccaaaggataatga

SEQ ID NO: 702 - protein, 841 aa, synthetic construct; identical to SEQ ID NO: 626
  REGION 1..841: note = Variant of DNA polymerase I from Thermus sp. strain 2.9

SEQ ID NO: 703 - DNA, 2529 bp, synthetic construct
  misc_feature 1..2529: note = Variant of DNA polymerase I from Thermus sp. strain 2.9
  source 1..2529: mol_type = other DNA
atgcaccatcatcatcatcatggcggtagcggcatgttaccgttgttcgaacctaaaggtcgcgtgcttctggttgatggccatcatctcgcgtatcgtaacttctttgccctgaaaggattaaccaccagccgtggcgagccggtacagggtgtctacggctttgcaaagtcgctcctgaaagctctgaaagaagacggtgatgtggtgattgttgtctttgatgcgaaagcgccaagttttcgccacgaagcgtacgaagcttacaaagccgggcgtgctccaacgccggaagactttcctcgccaattggcgcttatgaaggaattagtggatttgcttggcctcgaacgcttggaagttcccggtttcgaggcagacgacgtattagcgactctcgcaaagaaagccgaacgtgagggctatgaagtccagatcttgacagcagatcgcgatcttttccagcttttatctccgcgcatttccgtgttacacccggaagggcatcgtatcaccccggaatggctctgggagaaatatggtttgcgtcccgaacaatgggtggattttcgcgccttagcgggcgatccgagcgacaatattccgggagttaaaggtatcggcgagaagacggcgctcaagctccttaaagaatgggggtcgttggagaacttgcttaagaatttagatcaggtcaaaccagcttcagtgcgtgagaagattcttgcacacctcgaagacctcaaattaagccgcgaattggtccgtgtacgcaccgatttgccgctcgaagttgatttccgtggccgccgcgaacctgactgggagggtcttaaagcgtttttagagcgtcttgaatttggttcgctcttgcatgaattcggccttttagaaagcccgttaccagccgaagaagcaccttggccaccgcccgaaggcgcgtttttaggttaccgtttgagtcgcccggaaccgatgtgggccgaattattggctcttgcagcgtctgcccagggacgtgtgtatcgcgcggaagaccctcatggtgcgctccgtggcctcaaagaagtccgtggactccttgccaaagacttagctgttgttgcattgcgcgaaggtcttgatttacctccgactgatgatccaatgcttcttgcgtacctcttggacccgtcaaacacgacgcccgaaggcgtagcccgtcgttacggcggcgagtggaccgaagatgcaggtgagcgcgcgttattggccgaacgtttgcacgccaatttattaggacgtttgcaaggcgaggaacgtctcctctggctttacgaagaagtggagaaaccattgagtcgcgtgctcgcgcatatggaagctaccggtgtcaaattagacgtggcgtatttggaggcactcagccttgaagtcgctgccgaaatgcgccgcttggaggaagaagtattccgtttagcaggccactcctttaaccttaattctcgcgatcagttagaacgtgtgttgttcgatgaacttggtctccctcctatcggtaagacagagaagaccggtaaacgtagcacttcagcggcggttttagaagctcttcgcgaagtccatcccattgtggacaagatcttgcagtaccgcgaactcgcgaaattgaaaggcacctatattgaccctcttccggcattagtccacccgaaaacgggacgcctccatacccgcttcaaccaaacagccacggcgaccggtcgtttgtcctcctctgatccaaaccttcagaatattccagtacgtaccccattgggccagaagatccgcaaagcgtttgtagctgaggagggttggcgtttagtggccctcgattatagccaaattgaattacgtgtccttgcccatctttctggcgatgagaacctcatccgcgtgtttcaggaaggccgcgacattcacactcaaacggcaagctggatgtttggattatcagctgaagcgatcgatcctttgatgcgtcgtgcagcgaagaccatcaatttcggtgttctctacggtatgagtgcccatcgtttgtcgcaggaattaggcattccctatgaagaagctgcggcgttcattcagcgctactttcaaagctatcccaaagttaaagcatggatcgagaagactctcgaagaaggccgcacacgtggttacgtagagaccttatttggacgtcgccgctatgttcccgatttaaacgctcgcgtgaaatctgtccgtgaagccgccgaacgcatggcgtttaacatgcctgtacagggcacggcagctgacctcatgaaacttgcaatggtgcgcctttttccacaattgcgtgaagttggtgcccgcatgctcttgcaggtccacgatgaactcttgttagaagcgccaaaagagcgtgcggaagaggtggcagccctcgcgaaagaggttatggaaggcgtgtggcccttagcggtgcctcttgaagtcgaagttggtattggcgaggattggttggctgccaaaggataatga

SEQ ID NO: 704 - protein, 841 aa, synthetic construct
  REGION 1..841: note = Variant of DNA polymerase I from Thermus sp. strain 2.9
MHHHHHHGGSGMLPLFEPKGRVLLVDGHHLAYRNFFALKGLTTSRGEPVQGVYGFAKSLLKALKEDGDVVIVVFDAKAPSFRHEAYEAYKAGRAPTPEDFPRQLALMKELVDLLGLERLEVPGFEADDVLATLAKKAEREGYEVQILTADRDLFQLLSPRISVLHPEGHRITPEWLWEKYGLRPEQWVDFRALAGDPSDNIPGVKGIGEKTALKLLKEWGSLENLLKNLDQVKPASVREKILAHLEDLKLSRELVRVRTDLPLEVDFRGRREPDWEGLKAFLERLEFGSLLHEFGLLESPLPAEEAPWPPPEGAFLGYRLSRPEPMWAELLALAASAQGRVYRAEDPHGALRGLKEVRGLLAKDLAVVALREGLDLPPTDDPMLLAYLLDPSNTTPEGVARRYGGEWTEDAGERALLAERLHANLLGRLQGEERLLWLYEEVEKPLSRVLAHMEATGVKLDVAYLEALSLEVAAEMRRLEEEVFRLAGHSFNLNSRDQLERVLFDELGLPPIGKTEKTGKRSTSAAVLEALREVHPIVDKILQYRELAKLKGTYIDPLPALVHPKTGRLHTRFNQTATATGRLSSSDPNLQNIPVRTPLGQKIRKAFVAEEGWRLVALDYSQIELRVLAHLSGDENLIRVFQEGRDIHTQTASWMFGLSAEAIDPLMRRAAKTINFGVLYGMSAHRLSQELGIPYEEAAAFIQRYFQSYPKVKAWIEKTLEEGRTRGYVETLFGRRRYVPDLNARVKSVREAAERMAFNMPVQGTAADLMKLAMVRLFPQLREVGARMLLQVHDELLLEAPKERAEEVAALAKEVMEGVWPLAVPLEVEVGIGEDWLAAKG

SEQ ID NO: 705 - DNA, 2529 bp, synthetic construct; identical to SEQ ID NO: 601
  misc_feature 1..2529: note = Variant of DNA polymerase I from Thermus sp. strain 2.9
  source 1..2529: mol_type = other DNA

SEQ ID NO: 706 - protein, 841 aa, synthetic construct; identical to SEQ ID NO: 602
  REGION 1..841: note = Variant of DNA polymerase I from Thermus sp. strain 2.9

SEQ ID NO: 707 - DNA, 2529 bp, synthetic construct; identical to SEQ ID NO: 419
  misc_feature 1..2529: note = Variant of DNA polymerase I from Thermus sp. strain 2.9
  source 1..2529: mol_type = other DNA

SEQ ID NO: 708 - protein, 841 aa, synthetic construct; identical to SEQ ID NO: 420
  REGION 1..841: note = Variant of DNA polymerase I from Thermus sp. strain 2.9

SEQ ID NO: 709 - DNA, 2529 bp, synthetic construct
  misc_feature 1..2529: note = Variant of DNA polymerase I from Thermus sp. strain 2.9
  source 1..2529: mol_type = other DNA
atgcaccatcatcatcatcatggcggtagcggcatgttaccgttgttcgaacctaaaggtcgcgtgcttctggttgatggccatcatctcgcgtatcgtaacttctttgccctgaaaggattaaccaccagccgtggcgagccggtacagggtgtctacggctttgcaaagtcgctcctgaaagctctgaaagaagacggtgatgtggtgattgttgtctttgatgcgaaagcgccaagttttcgccacgaagcgtacgaagcttacaaagccgggcgtgctccaacgccggaagactttcctcgccaattggcgcttatgaaggaattagtggatttgcttggcctcgaacgcttggaagttcccggtttcgaggcagacgacgtattagcgactctcgcaaagaaagccgaacgtgagggctatgaagtccagatcttgacagcagatcgcgatcttttccagcttttatctccgcgcatttccgtgttacacccggaagggcatcgtatcaccccggaatggctctgggagaaatatggtttgcgtcccgaacaatgggtggattttcgcgccttagcgggcgatccgagcgacaatattccgggagttaaaggtatcggcgagaagacggcgctcaagctccttaaagaatgggggtcgttggagaacttgcttaagaatttagatcaggtcaaaccagcttcagtgcgtgagaagattcttgcacacctcgaagacctcaaattaagccgcgaattgtcgcgtgtacgcaccgatttgccgctcgaagttgatttccgtggccgccgcgaacctgactgggagggtcttaaagcgtttttagagcgtcttgaatttggttcgctcttgcatgaattcggccttttagaaagcccgttaccagccgaagaagcaccttggccaccgcccgaaggcgcgtttttaggttaccgtttgagtcgcccggaaccgatgtgggccgaattattggctcttgcagcgtctgcccagggacgtgtgtatcgcgcggaagaccctcatggtgcgctccgtggcctcaaagaagtccgtggactccttgccaaagacttagctgttgttgcattgcgcgaaggtcttgatttacctccgactgatgatccaatgcttcttgcgtacctcttggactcgtcaaacacgacgcccgaaggcgtagcccgtcgttacggcggcgagtggaccgaagatgcaggtgagcgcgcgttattggccgaacgtttgcacgccaatttattaggacgtttgcaaggcgaggaacgtctcctctggctttacgaagaagtggagaaaccattgagtcgcgtgctcgcgcatatggaagctaccggtgtcaaattagacgtggcgtatttggaggcactcagccttgaagccgctgccgaactgcgccgcttggaggaagaagtattccgtttagcaggccactcctttaaccttaattctcgcgatcagttagaacgtgtgttgttcgatgaacttggtctccctcctatcggcaagacagagaagaccggtaaacgtagcacttcagcggcggttttagaagctcttcgcgaagtccatcccattgtggacaagatcttgcagtaccgcgaactcgcgaaattgaaaggcacctatattgaccgtcttccggcattagtccacccgaaaacgggacgcctccatacccgcttcaaccaaacagccacggcgaccggtcgtttgtcctcctctgatccaaaccttcagaatattccagtacgtaccccattgggccagaaaatccgcaaagcgtttgtagctgaggagggttggcgtttagtggccctcgattatagccaaattgaattacgtgtccttgcccatctttctggcgatgagaacctcatccgcgtgtttcaggaaggccgcgacattcacactcaaacggcaagctggatgtttggagtgtcatcggaagcgatcgatcctttgatgcgtcgtgcagcgaagaccatcaatttcggtgttctctacggtatgagtgcccatcgtttgtcgcaggaattaggcattccctatgaagaagctgcggcgttcattcagcgctactttcaaagctatcccaaagttaaagcatggatcgagaagactctcgaagaaggccgcacacgtggttacgtagagaccttatttggacgtcgccgctatgttcccgatttaactgctcgcgtgaaatctgtccgtgaagccgccgaacgcatggcgtggaacatgcctgtacagggcacggcagctgacctcatgaaacttgcaatggtgcgcctttttccacaattgcgtgaagttggtgcccgcatgctcttgcaggtccacgatgaactcttgttagaagcgccaaaagagcgtgcggaagaggtggcagccctcgcgaaagaggttatggaaggcgtgtggcccttagcggtgcctcttgaagtcgaagttggtattggcgaggattggttggctgccaaaggataatga

SEQ ID NO: 710 - protein, 841 aa, synthetic construct
  REGION 1..841: note = Variant of DNA polymerase I from Thermus sp. strain 2.9
MHHHHHHGGSGMLPLFEPKGRVLLVDGHHLAYRNFFALKGLTTSRGEPVQGVYGFAKSLLKALKEDGDVVIVVFDAKAPSFRHEAYEAYKAGRAPTPEDFPRQLALMKELVDLLGLERLEVPGFEADDVLATLAKKAEREGYEVQILTADRDLFQLLSPRISVLHPEGHRITPEWLWEKYGLRPEQWVDFRALAGDPSDNIPGVKGIGEKTALKLLKEWGSLENLLKNLDQVKPASVREKILAHLEDLKLSRELSRVRTDLPLEVDFRGRREPDWEGLKAFLERLEFGSLLHEFGLLESPLPAEEAPWPPPEGAFLGYRLSRPEPMWAELLALAASAQGRVYRAEDPHGALRGLKEVRGLLAKDLAVVALREGLDLPPTDDPMLLAYLLDSSNTTPEGVARRYGGEWTEDAGERALLAERLHANLLGRLQGEERLLWLYEEVEKPLSRVLAHMEATGVKLDVAYLEALSLEAAAELRRLEEEVFRLAGHSFNLNSRDQLERVLFDELGLPPIGKTEKTGKRSTSAAVLEALREVHPIVDKILQYRELAKLKGTYIDRLPALVHPKTGRLHTRFNQTATATGRLSSSDPNLQNIPVRTPLGQKIRKAFVAEEGWRLVALDYSQIELRVLAHLSGDENLIRVFQEGRDIHTQTASWMFGVSSEAIDPLMRRAAKTINFGVLYGMSAHRLSQELGIPYEEAAAFIQRYFQSYPKVKAWIEKTLEEGRTRGYVETLFGRRRYVPDLTARVKSVREAAERMAWNMPVQGTAADLMKLAMVRLFPQLREVGARMLLQVHDELLLEAPKERAEEVAALAKEVMEGVWPLAVPLEVEVGIGEDWLAAKG

SEQ ID NO: 711 - DNA, 2529 bp, synthetic construct
  misc_feature 1..2529: note = Variant of DNA polymerase I from Thermus sp. strain 2.9
  source 1..2529: mol_type = other DNA
atgcaccatcatcatcatcatggcggtagcggcatgttaccgttgttcgaacctaaaggtcgcgtgcttctggttgatggccatcatctcgcgtatcgtaacttctttgccctgaaaggattaaccaccagccgtggcgagccggtacagggtgtctacggctttgcaaagtcgctcctgaaagctctgaaagaagacggtgatgtggtgattgttgtctttgatgcgaaagcgccaagttttcgccacgaagcgtacgaagcttacaaagccgggcgtgctccaacgccggaagactttcctcgccaattggcgcttatgaaggaattagtggatttgcttggcctcgaacgcttggaagttcccggtttcgaggcagacgacgtattagcgactctcgcaaagaaagccgaacgtgagggctatgaagtccagatcttgacagcagatcgcgatcttttccagcttttatctccgcgcatttccgtgttacacccggaagggcatcgtatcaccccggaatggctctgggagaaatatggtttgcgtcccgaacaatgggtggattttcgcgccttagcgggcgatccgagcgacaatattccgggagttaaaggtatcggcgagaagacggcgctcaagctccttaaagaatgggggtcgttggagaacttgcttaagaatttagatcaggtcaaaccagcttcagtgcgtgagaagattcttgcacacctcgaagacctcaaattaagccgcgaattggtccgtgtacgcaccgatttgccgctcgaagttgatttccgtggccgccgcgaacctgactgggagggtcttaaagcgtttttagagcgtcttgaatttggttcgctcttgcatgaattcggccttttagaaagcccgttaccagccgaagaagcaccttggccaccgcccgaaggcgcgtttttaggttaccgtttgagtcgcccggaaccgatgtgggccgaattattggctcttgcagcgtctgcccagggacgtgtgtatcgcgcggaagaccctcatggtgcgctccgtggcctcaaagaagtccgtggactccttgccaaagacttagctgttgttgcattgcgcgaaggtcttgatttacctccgactgatgatccaatgcttcttgcgtacctcttggacccgtcaaacacgacgcccgaaggcgtagcccgtcgttacggcggcgagtggaccgaagatgcaggtgagcgcgcgttattggccgaacgtttgcacgccaatttattaggacgtttgcaaggcgaggaacgtctcctctggctttacgaagaagtggagaaaccattgagtcgcgtgctcgcgcatatggaagctaccggtgtcaaattagacgtggcgtatttggaggcactcagccttgaagtcgctgccgaactgcgccgcttggaggaagaagtattccgtttagcaggccactcctttaaccttaattctcgcgatcagttagaacgtgtgttgttcgatgaacttggtctccctcctatcggcaagacagagaagaccggtaaacgtagcacttcagcggcggttttagaagctcttcgcgaagtccatcccattgtggacaagatcttgcagtaccgcgaactcgcgaaattgaaaggcacctatattgaccctcttccggcattagtccacccgaaaacgggacgcctccatacccgcttcaaccaaacagccacggcgaccggtcgtttgtcctcctctgatccaaaccttcagaatattccagtacgtaccccattgggccagaagatccgcaaagcgtttgtagctgaggagggttggcgtttagtggccctcgattatagccaaattgaattacgtgtccttgcccatctttctggcgatgagaacctcatccgcgtgtttcaggaaggccgcgacattcacactcaaacggcaagctggatgtttggattatcagctgaagcgatcgatcctttgatgcgtcgtgcagcgaagaccatcaatttcggtgttctctacggtatgagtgcccatcgtttgtcgcaggaattaggcattccctatgaagaagctgcggcgttcattcagcgctactttcaaagctatcccaaagttaaagcatggatcgagaagactctcgaagaaggccgcacacgtggttacgtagagaccttatttggacgtcgccgctatgttcccgatttaaatgctcgcgtgaaatctgtccgtgaagccgccgaacgcatggcgttcaacatgcctgtacagggcacggcagctgacctcatgaaacttgcaatggtgcgcctttttccacaattgcgtgaagttggtgcccgcatgctcttgcaggtccacgatgaactcttgttagaagcgccaaaagagcgtgcggaagaggtggcagccctcgcgaaagaggttatggaaggcgtgtggcccttagcggtgcctcttgaagtcgaagttggtattggcgaggattggttggctgccaaaggataatga

SEQ ID NO: 712 - protein, 841 aa, synthetic construct
  REGION 1..841: note = Variant of DNA polymerase I from Thermus sp. strain 2.9
MHHHHHHGGSGMLPLFEPKGRVLLVDGHHLAYRNFFALKGLTTSRGEPVQGVYGFAKSLLKALKEDGDVVIVVFDAKAPSFRHEAYEAYKAGRAPTPEDFPRQLALMKELVDLLGLERLEVPGFEADDVLATLAKKAEREGYEVQILTADRDLFQLLSPRISVLHPEGHRITPEWLWEKYGLRPEQWVDFRALAGDPSDNIPGVKGIGEKTALKLLKEWGSLENLLKNLDQVKPASVREKILAHLEDLKLSRELVRVRTDLPLEVDFRGRREPDWEGLKAFLERLEFGSLLHEFGLLESPLPAEEAPWPPPEGAFLGYRLSRPEPMWAELLALAASAQGRVYRAEDPHGALRGLKEVRGLLAKDLAVVALREGLDLPPTDDPMLLAYLLDPSNTTPEGVARRYGGEWTEDAGERALLAERLHANLLGRLQGEERLLWLYEEVEKPLSRVLAHMEATGVKLDVAYLEALSLEVAAELRRLEEEVFRLAGHSFNLNSRDQLERVLFDELGLPPIGKTEKTGKRSTSAAVLEALREVHPIVDKILQYRELAKLKGTYIDPLPALVHPKTGRLHTRFNQTATATGRLSSSDPNLQNIPVRTPLGQKIRKAFVAEEGWRLVALDYSQIELRVLAHLSGDENLIRVFQEGRDIHTQTASWMFGLSAEAIDPLMRRAAKTINFGVLYGMSAHRLSQELGIPYEEAAAFIQRYFQSYPKVKAWIEKTLEEGRTRGYVETLFGRRRYVPDLNARVKSVREAAERMAFNMPVQGTAADLMKLAMVRLFPQLREVGARMLLQVHDELLLEAPKERAEEVAALAKEVMEGVWPLAVPLEVEVGIGEDWLAAKG

SEQ ID NO: 713 - DNA, 2529 bp, synthetic construct; identical to SEQ ID NO: 535
  misc_feature 1..2529: note = Variant of DNA polymerase I from Thermus sp. strain 2.9
  source 1..2529: mol_type = other DNA

SEQ ID NO: 714 - protein, 841 aa, synthetic construct; identical to SEQ ID NO: 536
  REGION 1..841: note = Variant of DNA polymerase I from Thermus sp. strain 2.9

SEQ ID NO: 715 - DNA, 2529 bp, synthetic construct
  misc_feature 1..2529: note = Variant of DNA polymerase I from Thermus sp. strain 2.9
  source 1..2529: mol_type = other DNA
atgcaccatcatcatcatcatggcggtagcggcatgttaccgttgttcgaacctaaaggtcgcgtgcttctggttgatggccatcatctcgcgtatcgtaacttctttgccctgaaaggattaaccaccagccgtggcgagccggtacagggtgtctacggctttgcaaagtcgctcctgaaagctctgaaagaagacggtgatgtggtgattgttgtctttgatgcgaaagcgccaagttttcgccacgaagcgtacgaagcttacaaagccgggcgtgctccaacgccggaagactttcctcgccaattggcgcttatgaaggaattagtggatttgcttggcctcgaacgcttggaagttcccggtttcgaggcagacgacgtattagcgactctcgcaaagaaagccgaacgtgagggctatgaagtccatatcttgacagcagatcgcgatcttttccagcttttatctccgcgcatttccgtgttacacccggaagggcatcgtatcaccccggaatggctctgggagaaatatggtttgcgtcccgaacaatgggtggattttcgcgccttagcgggcgatccgagcgacaatattccgggagttaaaggtatcggcgagaagacggcgctcaagctccttaaagaatgggggtcgttggagaacttgcttaagaatttagatcaggtcaaaccagcttcagtgcgtgagaagattcttgcacacctcgaagacctcaaattaagccgcgaattggtccgtgtacgcaccgatttgccgctcgaagttgatttccgtggccgccgcgaacctgactgggagggtcttaaagcgtttttagagcgtcttgaatttggttcgctcttgcatgaattcggccttttagaaagcccgttaccagccgaagaagcaccttggccaccgcccgaaggcgcgtttttaggttaccgtttgagtcgcccggaaccgatgtgggccgaattattggctcttgcagcgtctgcccagggacgtgtgtatcgcgcggaagaccctcatggtgcgctccgtggcctcaaagaagtccgtggactccttgccaaagacttagctgttgttgcattgcgcgaaggtcttgatttacctccgactgatgatccaatgcttcttgcgtacctcttggactcgtcaaacacgacgcccgaaggcgtagcccgtcgttacggcggcgagtggaccgaagatgcaggtgagcgcgcgttattggccgaacgtttgcacgccaatttattaggacgtttgcaaggcgaggaacgtctcctctggctttacgaagaagtggagaaaccattgagtcgcgtgctcgcgcatatggaagctaccggtgtcaaattagacgtggcgtatttggaggcactcagccttgaagttgctgccgaaatgcgccgcttggaggaagaagtattccgtttagcaggccactcctttaaccttaattctcgcgatcagttagaacgtgtgttgttcgatgaacttggtctccctcctatcggcaagacagagaagaccggtaaacgtagcacttcagcggcggttttagaagctcttcgcgaagtccatcccattgtggacaagatcttgcagtaccgcgaactcgcgaaattgaaaggcacctatattgaccctcttccggcattagtccacccgaaaacgggacgcctccatacccgcttcaaccaaacagccacggcgaccggtcgtttgtcctcctctgatccaaaccttcagaatattccagtacgtaccccattgggccagaagatccgcaaagcgtttgtagctgaggagggttggcgtttagtggccctcgattatagccaaattgaattacgtgtccttgcccatctttctggcgatgagaacctcatccgcgtgtttcaggaaggccgcgacattcacactcaaacggcaagctggatgtttggattatcagctgaagcgatcgatcctttgatgcgtcgtgcagcgaagaccatcaatttcggtgttctctacggtatgagtgccgcgcgtttgtcgcaggaattaggcattccctatgaagaagctgcggcgttcattcagcgctactttcaaagctatcccaaagttaaagcatggatcgagaagactctcgaagaaggccgcacacgtggttacgtagagaccttatttggacgtcgccgctatgttcccgatttaaatgctcgcgtgaaatctgtccgtgaagccgccgaacgcatggcgttcaacatgcctgtacagggcacggcagctgacctcatgaaacttgcaatggtgcgcctttttccacaattgcgtgaagttggtgcccgcatgctcttgcaggtccacgatgaactcttgttagaagcgccaaaagagcgtgcggaagaggtggcagccctcgcgaaagaggttatggaaggcgtgtggcccttagcggtgcctcttgaagtcgaagttggtattggcgaggattggttggctgccaaaggataatga

SEQ ID NO: 716 - protein, 841 aa, synthetic construct
  REGION 1..841: note = Variant of DNA polymerase I from Thermus sp. strain 2.9
MHHHHHHGGSGMLPLFEPKGRVLLVDGHHLAYRNFFALKGLTTSRGEPVQGVYGFAKSLLKALKEDGDVVIVVFDAKAPSFRHEAYEAYKAGRAPTPEDFPRQLALMKELVDLLGLERLEVPGFEADDVLATLAKKAEREGYEVHILTADRDLFQLLSPRISVLHPEGHRITPEWLWEKYGLRPEQWVDFRALAGDPSDNIPGVKGIGEKTALKLLKEWGSLENLLKNLDQVKPASVREKILAHLEDLKLSRELVRVRTDLPLEVDFRGRREPDWEGLKAFLERLEFGSLLHEFGLLESPLPAEEAPWPPPEGAFLGYRLSRPEPMWAELLALAASAQGRVYRAEDPHGALRGLKEVRGLLAKDLAVVALREGLDLPPTDDPMLLAYLLDSSNTTPEGVARRYGGEWTEDAGERALLAERLHANLLGRLQGEERLLWLYEEVEKPLSRVLAHMEATGVKLDVAYLEALSLEVAAEMRRLEEEVFRLAGHSFNLNSRDQLERVLFDELGLPPIGKTEKTGKRSTSAAVLEALREVHPIVDKILQYRELAKLKGTYIDPLPALVHPKTGRLHTRFNQTATATGRLSSSDPNLQNIPVRTPLGQKIRKAFVAEEGWRLVALDYSQIELRVLAHLSGDENLIRVFQEGRDIHTQTASWMFGLSAEAIDPLMRRAAKTINFGVLYGMSAARLSQELGIPYEEAAAFIQRYFQSYPKVKAWIEKTLEEGRTRGYVETLFGRRRYVPDLNARVKSVREAAERMAFNMPVQGTAADLMKLAMVRLFPQLREVGARMLLQVHDELLLEAPKERAEEVAALAKEVMEGVWPLAVPLEVEVGIGEDWLAAKG

SEQ ID NO: 717 - DNA, 2529 bp, synthetic construct
  misc_feature 1..2529: note = Variant of DNA polymerase I from Thermus sp. strain 2.9
  source 1..2529: mol_type = other DNA
atgcaccatcatcatcatcatggcggtagcggcatgttaccgttgttcgaacctaaaggtcgcgtgcttctggttgatggccatcatctcgcgtatcgtaacttctttgccctgaaaggattaaccaccagccgtggcgagccggtacagggtgtctacggctttgcaaagtcgctcctgaaagctctgaaagaagacggtgatgtggtgattgttgtctttgatgcgaaagcgccaagttttcgccacgaagcgtacgaagcttacaaagccgggcgtgctccaacgccggaagactttcctcgccaattggcgcttatgaaggaattagtggatttgcttggcctcgaacgcttggaagttcccggtttcgaggcagacgacgtattagcgactctcgcaaagaaagccgaacgtgagggctatgaagtccagatcttgacagcagatcgcgatcttttccagcttttatctccgcgcatttccgtgttacacccggaagggcatcgtatcaccccggaatggctctgggagaaatatggtttgcgtcccgaacaatgggtggattttcgcgccttagcgggcgatccgagcgacaatattccgggagttaaaggtatcggcgagaagacggcgctcaagctccttaaagaatgggggtcgttggagaacttgcttaagaatttagatcaggtcaaaccagcttcagtgcgtgagaagattcttgcacacctcgaagacctcaaattaagccgcgaattgtcccgtgtacgcaccgatttgccgctcgaagttgatttccgtggccgccgcgaacctgactgggagggtcttaaagcgtttttagagcgtcttgaatttggttcgctcttgcatgaattcggccttttagaaagcccgttaccagccgaagaagcaccttggccaccgcccgaaggcgcgtttttaggttaccgtttgagtcgcccggaaccgatgtgggccgaattattggctcttgcagcgtctgcccagggacgtgtgtatcgcgcggaagaccctcatggtgcgctccgtggcctcaaagaagtccgtggactccttgccaaagacttagctgttgttgcattgcgcgaaggtcttgatttacctccgactgatgatccaatgcttcttgcgtacctcttggactcgtcaaacacgacgcccgaaggcgtagcccgtcgttacggcggcgagtggaccgaagatgcaggtgagcgcgcgttattggccgaacgtttgcacgccaatttattaggacgtttgcaaggcgaggaacgtctcctctggctttacgaagaagtggagaaaccattgagtcgcgtgctcgcgcatatggaagctaccggtgtcaaattagacgtggcgtatttggaggcactcagccttgaagtcgctgccgaaatgcgccgcttggaggaagaagtattccgtttagcaggccactcctttaaccttaattctcgcgatcagttagaacgtgtgttgttcgatgaacttggtctccctcctatcggcaagacagagaagaccggtaaacgtagcacttcagcggcggttttagaagctcttcgcgaagtccatcccattgtggacaagatcttgcagtaccgcgaactcgcgaaattgaaaggcacctatattgaccctcttccggcattagtccacccgaaaacgggacgcctccatacccgcttcaaccaaacagccacggcgaccggtcgtttgtcctcctctgatccaaaccttcagaatattccagtacgtaccccattgggccagaagatccgcaaagcgtttgtagctgaggagggttggcgtttagtggccctcgattatagccaaattgaattacgtgtccttgcccatctttctggcgatgagaacctcatccgcgtgtttcaggaaggccgcgacattcacactcaaacggcaagctggatgtttggattatcagctgaagcgatcgatcctttgatgcgtcgtgcagcgaagaccatcaatttcggtgttctctacggtatgagtgcccatcgtttgtcgcaggaattaggcattccctatgaagaagctgcggcgttcattcagcgctactttcaaagctatcccaaagttaaagcatggatcgagaagactctcgaagaaggccgcacacgtggttacgtagagaccttatttggacgtcgccgctatgttcccgatttaaacgctcgcgtgaaatctgtccgtgaagccgccgaacgcatggcgttcaacatgcctgtacagggcacggcagctgacctcatgaaacttgcaatggtgcgcctttttccacaattgcgtgaagttggtgcccgcatgctcttgcaggtccacgatgaactcttgttagaagcgccaaaagagcgtgcggaagaggtggcagccctcgcgaaagaggttatggaaggcgtgtggcccttagcggtgcctcttgaagtcgaagttggtattggcgaggattggttggctgccaaaggataatga

SEQ ID NO: 718 - protein, 841 aa, synthetic construct; identical to SEQ ID NO: 380
  REGION 1..841: note = Variant of DNA polymerase I from Thermus sp. strain 2.9

SEQ ID NO: 719 - DNA, 2529 bp, synthetic construct
  misc_feature 1..2529: note = Variant of DNA polymerase I from Thermus sp. strain 2.9
  source 1..2529: mol_type = other DNA
atgcaccatcatcatcatcatggcggtagcggcatgttaccgttgttcgaacctaaaggtcgcgtgcttctggttgatggccatcatctcgcgtatcgtaacttctttgccctgaaaggattaaccaccagccgtggcgagccggtacagggtgtctacggctttgcaaagtcgctcctgaaagctctgaaagaagacggtgatgtggtgattgttgtctttgatgcgaaagcgccaagttttcgccacgaagcgtacgaagcttacaaagccgggcgtgctccaacgccggaagactttcctcgccaattggcgcttatgaaggaattagtggatttgcttggcctcgaacgcttggaagttcccggtttcgaggcagacgacgtattagcgactctcgcaaagaaagccgaacgtgagggctatgaagtccagatcttgacagcagatcgcgatcttttccagcttttatctccgcgcatctcggtgttacacccggaagggcatcgtatcaccccggaatggctctgggagaaatatggtttgcgtcccgaacaatgggtggattttcgcgccttagcaggcgatccgagcgacaatattccgggagttaaaggtatcggcgagaagacggcgctcaagctccttaaagaatgggggtcgttggagaacttgcttaagaatttagatcaggtcaaaccagagtcagtgcgtgagaagattcttgcacacctcgaagacctcaaattaagccgcgaattgtcccgtgtacgcaccgatttgccgctcgaagttgatttccgtggccgccgcgaacctgactgggagggtcttaaagcgtttttagagcgtcttgaatttggttcgctcttgcatgaattcggccttttagaaagcccgttaccagccgaagaagcaccttggccaccgcccgaaggcgcgtttttaggttaccgtttgagtcgcccggaaccgatgtgggccgaattattggctcttgcagcgtctgcccagggacgtgtgtatcgcgcggaagaccctcatggtgcgctccgcggcctcaaagaagtccgtggactccttgccaaagacttagctgttgttgcattgcgcgaaggtcttgatttacctccgactgatgatccaatgcttcttgcgtacctcttggacccgtcaaacacgacgcccgaaggcgtagcccgtcgttacggcggcgagtggaccgaagatgcaggcgagcgcgcgttattggccgaacgtttgcacgccaatttattaggacgtttgcaaggcgaggaacgtctcctctggctttacgaagaagtggagaaaccattgagtcgcgtgctcgcgcatatggaagctaccggtgtcaaattagacgtggcgtatttggaggcactcagccttgaagttgctgccgaaatgcgccgcttggaggaagaagtattccgtttagcaggccactcctttaaccttaattctcgcgatcagttagaacgtgtgttgttcgatgaacttggtctccctcctatcggcaagacagagaagaccggtaaacgtagcacttcagcggcggttttagaagctcttcgcgaagtccatcccattgtggacaagatcttgcagtaccgcgaactcgcgaaattgaaaggcacctatattgaccctcttccggcattagtccacccgaaaacgggacgcctccatacccgcttcaaccaaacagccacggcgaccggtcgtttgtcctcctctgatccaaaccttcagaatattccagtacgtaccccattgggccagaagatccgccgcgcgtttgtagctgaggagggttggcgtttagtggccctcgattatagccaaattgaattacgtgtccttgcccatctttctggcgatgagaacctcatccgcgtgtttcaggaaggcaaagacattcacactcaaacggcaagctggatgtttggattatcagctgaagcgatcgatcctttgatgcgtcgtgcagcgaagaccatcaatttcggtgttctctacggtatgagtgcccatcgtttgtcgaatgaattaggcattccctatgaagaagctgcggcgttcattcagcgctactttcaaagctatcccaaagttaaagcatggatcgagaagactctcgaagaaggccgcacacgtggttacgtagagaccttatttggacgtcgccgctatgttcccgatttaaacgctcgcgtgaaatctgtccgtgaagccgccgaacgcatggcgttcaacatgcctgtacagggcacggcagctgacctcatgaaacttgcaatggtgcgcctttttccacaattgcgtgaagttggtgcccgcatgctcttgcaggtccacgatgaactcttgttagaagcgccaaaagagcgtgcggaagaggtggcagccctcgcgaaagaggttatggaaggcgtgtggcccttagcggtgcctcttgaagtcgaagttggtattggcgaggattggttggctgccaaaggataatga

SEQ ID NO: 720 - protein, 841 aa, synthetic construct
  REGION 1..841: note = Variant of DNA polymerase I from Thermus sp. strain 2.9
MHHHHHHGGSGMLPLFEPKGRVLLVDGHHLAYRNFFALKGLTTSRGEPVQGVYGFAKSLLKALKEDGDVVIVVFDAKAPSFRHEAYEAYKAGRAPTPEDFPRQLALMKELVDLLGLERLEVPGFEADDVLATLAKKAEREGYEVQILTADRDLFQLLSPRISVLHPEGHRITPEWLWEKYGLRPEQWVDFRALAGDPSDNIPGVKGIGEKTALKLLKEWGSLENLLKNLDQVKPESVREKILAHLEDLKLSRELSRVRTDLPLEVDFRGRREPDWEGLKAFLERLEFGSLLHEFGLLESPLPAEEAPWPPPEGAFLGYRLSRPEPMWAELLALAASAQGRVYRAEDPHGALRGLKEVRGLLAKDLAVVALREGLDLPPTDDPMLLAYLLDPSNTTPEGVARRYGGEWTEDAGERALLAERLHANLLGRLQGEERLLWLYEEVEKPLSRVLAHMEATGVKLDVAYLEALSLEVAAEMRRLEEEVFRLAGHSFNLNSRDQLERVLFDELGLPPIGKTEKTGKRSTSAAVLEALREVHPIVDKILQYRELAKLKGTYIDPLPALVHPKTGRLHTRFNQTATATGRLSSSDPNLQNIPVRTPLGQKIRRAFVAEEGWRLVALDYSQIELRVLAHLSGDENLIRVFQEGKDIHTQTASWMFGLSAEAIDPLMRRAAKTINFGVLYGMSAHRLSNELGIPYEEAAAFIQRYFQSYPKVKAWIEKTLEEGRTRGYVETLFGRRRYVPDLNARVKSVREAAERMAFNMPVQGTAADLMKLAMVRLFPQLREVGARMLLQVHDELLLEAPKERAEEVAALAKEVMEGVWPLAVPLEVEVGIGEDWLAAKG

SEQ ID NO: 721 - DNA, 2529 bp, synthetic construct
  misc_feature 1..2529: note = Variant of DNA polymerase I from Thermus sp. strain 2.9
  source 1..2529: mol_type = other DNA
atgcaccatcatcatcatcatggcggtagcggcatgttaccgttgttcgaacctaaaggtcgcgtgcttctggttgatggccatcatctcgcgtatcgtaacttctttgccctgaaaggattaaccaccagccgtggcgagccggtacagggtgtctacggctttgcaaagtcgctcctgaaagctctgaaagaagacggtgatgtggtgattgttgtctttgatgcgaaagcgccaagttttcgccacgaagcgtacgaagcttacaaagccgggcgtgctccaacgccggaagactttcctcgccaattggcgcttatgaaggaattagtggatttgcttggcctcgaacgcttggaagttcccggtttcgaggcagacgacgtattagcgactctcgcaaagaaagccgaacgtgagggctatgaagtccagatcttgacagcagatcgcgatcttttccagcttttatctccgcgcatctcggtgttacacccggaagggcatcgtatcaccccggaatggctctgggagaaatatggtttgcgtcccgaacaatgggtggattttcgcgccttagcaggcgatccgagcgacaatattccgggagttaaaggtatcggcgagaagacggcgctcaagctccttaaagaatgggggtcgttggagaacttgcttaagaatttagatcaggtcaaaccagagtcagtgcgtgagaagattcttgcacacctcgaagacctcaaattaagccgcgaattgtcccgtgtacgcaccgatttgccgctcgaagttgatttccgtggccgccgcgaacctgactgggagggtcttaaagcgtttttagagcgtcttgaatttggttcgctcttgcatgaattcggccttttagaaagcccgttaccagccgaagaagcaccttggccaccgcccgaaggcgcgtttttaggttaccgtttgagtcgcccggaaccgatgtgggccgaattattggctcttgcagcgtctgcccagggacgtgtgtatcgcgcggaagaccctcatggtgcgctccgcggcctcaaagaagtccgtggactccttgccaaagacttagctgttgttgcattgcgcgaaggtcttgatttacctccgactgatgatccaatgcttcttgcgtacctcttggacccgtcaaacacgacgcccgaaggcgtagcccgtcgttacggcggcgagtggaccgaagatgcaggcgagcgcgcgttattggccgaacgtttgcacgccaatttattaggacgtttgcaaggcgaggaacgtctcctctggctttacgaagaagtggagaaaccattgagtcgcgtgctcgcgcatatggaagctaccggtgtcaaattagacgtggcgtatttggaggcactcagccttgaagttgctgccgaaatgcgccgcttggaggaagaagtattccgtttagcaggccactcctttaaccttaattctcgcgatcagttagaacgtgtgttgttcgatgaacttggtctccctcctatcggcaagacagagaagaccggtaaacgtagcacttcagcggcggttttagaagctcttcgcgaagtccatcccattgtggacaagatcttgcagtaccgcgaactcgcgaaattgaaaggcacctatattgaccctcttccggcattagtccacccgtatacgggacgcctccatacccgcttcaaccaaacagccacggcgaccggtcgtttgtcctcctctgatccaaaccttcagaatattccagtacgtaccccattgggccagaagatccgccgcgcgtttgtagctgaggagggttggcgtttagtggccctcgattatagccaaattgaattacgtgtccttgcccatctttctggcgatgagaacctcatccgcgtgtttcaggaaggcaaagacattcacactcaaacggcaagctggatgtttggattatcagctgaagcgatcgatcctttgatgcgtcgtgcagcgaagaccatcaatttcggtgttctctacggtatgagtgcccatcgtttgtcgcaggaattaggcattccctatgaagaagctgcggcgttcattcagcgctactttcaaagctatcccaaagttaaagcatggatcgagaagactctcgaagaaggccgcacacgtggttacgtagagaccttatttggacgtcgccgctatgttcccgatttaaacgctcgcgtgaaatctgtccgtgaagccgccgaacgcatggcgttcaacatgcctgtacagggcacggcagctgacctcatgaaacttgcaatggtgcgcctttttccacaattgcgtgaagttggtgcccgcatgctcttgcaggtccacgatgaactcttgttagaagcgccaaaagagcgtgcggaagaggtggcagccctcgcgaaagaggttatggaaggcgtgtggcccttagcggtgcctcttgaagtcgaagttggtattggcgaggattggttggctgccaaaggataatga

SEQ ID NO: 722 - protein, 841 aa, synthetic construct
  REGION 1..841: note = Variant of DNA polymerase I from Thermus sp. strain 2.9
MHHHHHHGGSGMLPLFEPKGRVLLVDGHHLAYRNFFALKGLTTSRGEPVQGVYGFAKSLLKALKEDGDVVIVVFDAKAPSFRHEAYEAYKAGRAPTPEDFPRQLALMKELVDLLGLERLEVPGFEADDVLATLAKKAEREGYEVQILTADRDLFQLLSPRISVLHPEGHRITPEWLWEKYGLRPEQWVDFRALAGDPSDNIPGVKGIGEKTALKLLKEWGSLENLLKNLDQVKPESVREKILAHLEDLKLSRELSRVRTDLPLEVDFRGRREPDWEGLKAFLERLEFGSLLHEFGLLESPLPAEEAPWPPPEGAFLGYRLSRPEPMWAELLALAASAQGRVYRAEDPHGALRGLKEVRGLLAKDLAVVALREGLDLPPTDDPMLLAYLLDPSNTTPEGVARRYGGEWTEDAGERALLAERLHANLLGRLQGEERLLWLYEEVEKPLSRVLAHMEATGVKLDVAYLEALSLEVAAEMRRLEEEVFRLAGHSFNLNSRDQLERVLFDELGLPPIGKTEKTGKRSTSAAVLEALREVHPIVDKILQYRELAKLKGTYIDPLPALVHPYTGRLHTRFNQTATATGRLSSSDPNLQNIPVRTPLGQKIRRAFVAEEGWRLVALDYSQIELRVLAHLSGDENLIRVFQEGKDIHTQTASWMFGLSAEAIDPLMRRAAKTINFGVLYGMSAHRLSQELGIPYEEAAAFIQRYFQSYPKVKAWIEKTLEEGRTRGYVETLFGRRRYVPDLNARVKSVREAAERMAFNMPVQGTAADLMKLAMVRLFPQLREVGARMLLQVHDELLLEAPKERAEEVAALAKEVMEGVWPLAVPLEVEVGIGEDWLAAKG

SEQ ID NO: 723 - DNA, 2529 bp, synthetic construct
  misc_feature 1..2529: note = Variant of DNA polymerase I from Thermus sp. strain 2.9
  source 1..2529: mol_type = other DNA
atgcaccatcatcatcatcatggcggtagcggcatgttaccgttgttcgaacctaaaggtcgcgtgcttctggttgatggccatcatctcgcgtatcgtaacttctttgccctgaaaggattaaccaccagccgtggcgagccggtacagggtgtctacggctttgcaaagtcgctcctgaaagctctgaaagaagacggtgatgtggtgattgttgtctttgatgcgaaagcgccaagttttcgccacgaagcgtacgaagcttacaaagccgggcgtgctccaacgccggaagactttcctcgccaattggcgcttatgaaggaattagtggatttgcttggcctcgaacgcttggaagttcccggtttcgaggcagacgacgtattagcgactctcgcaaagaaagccgaacgtgagggctatgaagtccagatcttgacagcagatcgcgatcttttccagcttttatctccgcgcatctcggtgttacacccggaagggcatcgtatcaccccggaatggctctgggagaaatatggtttgcgtcccgaacaatgggtggattttcgcgccttagccggcgatccgagcgacaatattccgggagttaaaggtatcggcgagaagacggcgctcaagctccttaaagaatgggggtcgttggagaacttgcttaagaatttagatcaggtcaaaccagagtcagtgcgtgagaagattcttgcacacctcgaagacctcaaattaagccgcgaattgtcccgtgtacgcaccgatttgccgctcgaagttgatttccgtggccgccgcgaacctgactgggagggtcttaaagcgtttttagagcgtcttgaatttggttcgctcttgcatgaattcggccttttagaaagcccgttaccagccgaagaagcaccttggccaccgcccgaaggcgcgtttttaggttaccgtttgagtcgcccggaaccgatgtgggccgaattattggctcttgcagcgtctgcccagggacgtgtgtatcgcgcggaagaccctcatggtgcgctccgcggcctcaaagaagtccgtggactccttgccaaagacttagctgttgttgcattgcgcgaaggtcttgatttacctccgactgatgatccaatgcttcttgcgtacctcttggacccgtcaaacacgacgcccgaaggcgtagcccgtcgttacggcggcgagtggaccgaagatgcaggcgagcgcgcgttattggccgaacgtttgcaccagaatttattaggacgtttgcaaggcgaggaacgtctcctctggctttacgaagaagtggagaaaccattgagtcgcgtgctcgctcatatggaagctaccggtgtcaaattagacgtggcgtatttggaggcactcagccttgaagttgctgccgaactgcgccgcttggaggaagaagtattccgtttagcaggccactcctttaaccttaattctcgcgatcagttagaacgtgtgttgttcgatgaacttggtctccctcctatcggcaagacagagaagaccggtaaacgtagcacttcagcggcggttttagaagctcttcgcgaagtccatcccattgtggacaagatcttgcagtaccgcgaactcgcgaaattgaaaggcacctatattgaccgtcttccggcattagtccacccgaaaacgggacgcctccatacccgcttcaaccaaacagccacggcgaccggtcgtttgtcctcctctgatccaaaccttcagaatattccagtacgtaccccattgggccagaagatccgccgcgcgtttgtagctgaggagggttggcgtttagtggccctcgattatagccaaattgaattacgtgtccttgcccatctttctggcgatgagaacctcatccgcgtgtttcaggaaggcaaagacattcacactcaaacggcaagctggatgtttggactgccgtcggaagcgatcgatcctttgatgcgtcgtgcagcgaagaccatcaatttcggtgttctctacggtatgagtgccgctcgtttgtcgcaggaattaggcattccctatgaagaagctgcggcgttcattcagcgctactttcaaagctatcccaaagttaaagcatggatcgagaagactctcgaagaaggccgcacacgtggttacgtagagaccttatttggacgtcgccgctatgttcccgatttaaccgctcgcgtgaaatctgtccgtgaagccgccgaacgcatggcgttcaacatgcctgtacagggcacggcagctgacctcatgaaacttgcaatggtgcgcctttttccacaattgcgtgaagttggtgcccgcatgctcttgcaggtccacgatgaactcttgttagaagcgccaaaagagcgtgcggaagaggtggcagccctcgcgaaagaggttatggaaggcgtgtggcccttagcggtgcctcttgaagtcgaagttggtattggcgaggattggttggctgccaaaggataatga

SEQ ID NO: 724 - protein, 841 aa, synthetic construct
  REGION 1..841: note = Variant of DNA polymerase I from Thermus sp. strain 2.9
MHHHHHHGGSGMLPLFEPKGRVLLVDGHHLAYRNFFALKGLTTSRGEPVQGVYGFAKSLLKALKEDGDVVIVVFDAKAPSFRHEAYEAYKAGRAPTPEDFPRQLALMKELVDLLGLERLEVPGFEADDVLATLAKKAEREGYEVQILTADRDLFQLLSPRISVLHPEGHRITPEWLWEKYGLRPEQWVDFRALAGDPSDNIPGVKGIGEKTALKLLKEWGSLENLLKNLDQVKPESVREKILAHLEDLKLSRELSRVRTDLPLEVDFRGRREPDWEGLKAFLERLEFGSLLHEFGLLESPLPAEEAPWPPPEGAFLGYRLSRPEPMWAELLALAASAQGRVYRAEDPHGALRGLKEVRGLLAKDLAVVALREGLDLPPTDDPMLLAYLLDPSNTTPEGVARRYGGEWTEDAGERALLAERLHQNLLGRLQGEERLLWLYEEVEKPLSRVLAHMEATGVKLDVAYLEALSLEVAAELRRLEEEVFRLAGHSFNLNSRDQLERVLFDELGLPPIGKTEKTGKRSTSAAVLEALREVHPIVDKILQYRELAKLKGTYIDRLPALVHPKTGRLHTRFNQTATATGRLSSSDPNLQNIPVRTPLGQKIRRAFVAEEGWRLVALDYSQIELRVLAHLSGDENLIRVFQEGKDIHTQTASWMFGLPSEAIDPLMRRAAKTINFGVLYGMSAARLSQELGIPYEEAAAFIQRYFQSYPKVKAWIEKTLEEGRTRGYVETLFGRRRYVPDLTARVKSVREAAERMAFNMPVQGTAADLMKLAMVRLFPQLREVGARMLLQVHDELLLEAPKERAEEVAALAKEVMEGVWPLAVPLEVEVGIGEDWLAAKG

SEQ ID NO: 725 - DNA, 2529 bp, synthetic construct
  misc_feature 1..2529: note = Variant of DNA polymerase I from Thermus sp. strain 2.9
  source 1..2529: mol_type = other DNA
atgcaccatcatcatcatcatggcggtagcggcatgttaccgttgttcgaacctaaaggtcgcgtgcttctggttgatggccatcatctcgcgtatcgtaacttctttgccctgaaaggattaaccaccagccgtggcgagccggtacagggtgtctacggctttgcaaagtcgctcctgaaagctctgaaagaagacggtgatgtggtgattgttgtctttgatgcgaaagcgccaagttttcgccacgaagcgtacgaagcttacaaagccgggcgtgctccaacgccggaagactttcctcgccaattggcgcttatgaaggaattagtggatttgcttggcctcgaacgcttggaagttcccggtttcgaggcagacgacgtattagcgactctcgcaaagaaagccgaacgtgagggctatgaagtccagatcttgacagcagatcgcgatcttttccagcttttatctccgcgcatctcggtgttacacccggaagggcatcgtatcaccccggaatggctctgggagaaatatggtttgcgtcccgaacaatgggtggattttcgcgccttagcaggcgatccgagcgacaatattccgggagttaaaggtatcggcgagaagacggcgctcaagctccttaaagaatgggggtcgttggagaacttgcttaagaatttagatcaggtcaaaccagagtcagtgcgtgagaagattcttgcacacctcgaagacctcaaattaagccgcgaattgtcccgtgtacgcaccgatttgccgctcgaagttgatttccgtggccgccgcgaacctgactgggagggtcttaaagcgtttttagagcgtcttgaatttggttcgctcttgcatgaattcggccttttagaaagcccgttaccagccgaagaagcaccttggccaccgcccgaaggcgcgtttttaggttaccgtttgagtcgcccggaaccgatgtgggccgaattattggctcttgcagcgtctgcccagggacgtgtgtatcgcgcggaagaccctcatggtgcgctccgcggcctcaaagaagtccgtggactccttgccaaagacttagctgttgttgcattgcgcgaaggtcttgatttacctccgactgatgatccaatgcttcttgcgtacctcttggacccgtcaaacacgacgcccgaaggcgtagcccgtcgttacggcggcgagtggaccgaagatgcaggcgagcgcgcgttattggccgaacgtttgcacgccaatttattaggacgtttgcaaggcgaggaacgtctcctctggctttacgaagaagtggagaaaccattgagtcgcgtgctcgcgcatatggaagctaccggtgtcaaattagacgtggcgtatttggaggcactcagccttgaagttgctgccgaaatgcgccgcttggaggaagaagtattcgcgttagcaggccactcctttaaccttaattctcgcgatcagttagaacgtgtgttgttcgatgaacttggtctccctcctatcggcaagacagagaagaccggtaaacgtagcacttcagcggcggttttagaagctcttcgcgaagtccatcccattgtggacaagatcttgcagtaccgcgaactcgcgaaattgaaaggcacctatattgaccctcttccggcattagtccacccgaaaacgggacgcctccatacccgcttcaaccaaacagccacggcgaccggtcgtttgtcctcctctgatccaaaccttcagaatattccagtacgtaccccattgggccagaagatccgccgcgcgtttgtagctgaggagggttggcgtttagtggccctcgattatagccaaattgaattacgtgtccttgcccatctttctggcgatgagaacctcatccgcgtgtttcaggaaggcaaagacattcacactcaaacggcaagctggatgtttggattatcagctgaagcgatcgatcctttgatgcgtcgtgcagcgaagaccatcaatttcggtgttctctacggtatgagtgcccatcgtttgtcgcaggaattaggcattccctatgaagaagctgcggcgttcattcagcgctactttcaaagctatcccaaagttaaagcatggatcgagaagactctcgaagaaggccgcacacgtggttacgtagagaccttatttggacgtcgccgctatgttcccgatttaaacgctcgcgtgaaatctgtccgtgaagccgccgaacgcatggcgttcaacatgcctgtacagggcacggcagctgacctcatgaaacttgcaatggtgcgcctttttccacaattgcgtgaagttggtgcccgcatgctcttgcaggtccacgatgaactcttgttagaagcgccaaaagagcgtgcggaagaggtggcagccctcgcgaaagaggttatggaaggcgtgtggcccttagcggtgcctcttgaagtcgaagttggtattggcgaggattggttggctgccaaaggataatga

SEQ ID NO: 726 - protein, 841 aa, synthetic construct
  REGION 1..841: note = Variant of DNA polymerase I from Thermus sp. strain 2.9
MHHHHHHGGSGMLPLFEPKGRVLLVDGHHLAYRNFFALKGLTTSRGEPVQGVYGFAKSLLKALKEDGDVVIVVFDAKAPSFRHEAYEAYKAGRAPTPEDFPRQLALMKELVDLLGLERLEVPGFEADDVLATLAKKAEREGYEVQILTADRDLFQLLSPRISVLHPEGHRITPEWLWEKYGLRPEQWVDFRALAGDPSDNIPGVKGIGEKTALKLLKEWGSLENLLKNLDQVKPESVREKILAHLEDLKLSRELSRVRTDLPLEVDFRGRREPDWEGLKAFLERLEFGSLLHEFGLLESPLPAEEAPWPPPEGAFLGYRLSRPEPMWAELLALAASAQGRVYRAEDPHGALRGLKEVRGLLAKDLAVVALREGLDLPPTDDPMLLAYLLDPSNTTPEGVARRYGGEWTEDAGERALLAERLHANLLGRLQGEERLLWLYEEVEKPLSRVLAHMEATGVKLDVAYLEALSLEVAAEMRRLEEEVFALAGHSFNLNSRDQLERVLFDELGLPPIGKTEKTGKRSTSAAVLEALREVHPIVDKILQYRELAKLKGTYIDPLPALVHPKTGRLHTRFNQTATATGRLSSSDPNLQNIPVRTPLGQKIRRAFVAEEGWRLVALDYSQIELRVLAHLSGDENLIRVFQEGKDIHTQTASWMFGLSAEAIDPLMRRAAKTINFGVLYGMSAHRLSQELGIPYEEAAAFIQRYFQSYPKVKAWIEKTLEEGRTRGYVETLFGRRRYVPDLNARVKSVREAAERMAFNMPVQGTAADLMKLAMVRLFPQLREVGARMLLQVHDELLLEAPKERAEEVAALAKEVMEGVWPLAVPLEVEVGIGEDWLAAKG

SEQ ID NO: 727 - DNA, 2529 bp, synthetic construct
  misc_feature 1..2529: note = Variant of DNA polymerase I from Thermus sp. strain 2.9
  source 1..2529: mol_type = other DNA
atgcaccatcatcatcatcatggcggtagcggcatgttaccgttgttcgaacctaaaggtcgcgtgcttctggttgatggccatcatctcgcgtatcgtaacttctttgccctgaaaggattaaccaccagccgtggcgagccggtacagggtgtctacggctttgcaaagtcgctcctgaaagctctgaaagaagacggtgatgtggtgattgttgtctttgatgcgaaagcgccaagttttcgccacgaagcgtacgaagcttacaaagccgggcgtgctccaacgccggaagactttcctcgccaattggcgcttatgaaggaattagtggatttgcttggcctcgaacgcttggaagttcccggtttcgaggcagacgacgtattagcgactctcgcaaagaaagccgaacgtgagggctatgaagtccagatcttgacagcagatcgcgatcttttccagcttttatctccgcgcatctcggtgttacacccggaagggcatcgtatcaccccggaatggctctgggagaaatatggtttgcgtcccgaacaatgggtggattttcgcgccttagtcggcgatccgagcgacaatattccgggagttaaaggtatcggcgagaagacggcgctcaagctccttaaagaatgggggtcgttggagaacttgcttaagaatttagatcaggtcaaaccagagtcagtgcgtgagaagattcttgcacacctcgaagacctcaaattaagccgcgaattgtcccgtgtacgcaccgatttgccgctcgaagttgatttccgtggccgccgcgaacctgactgggagggtcttaaagcgtttttagagcgtcttgaatttggttcgctcttgcatgaattcggccttttagaaagcccgttaccagccgaagaagcaccttggccaccgcccgaaggcgcgtttttaggttaccgtttgagtcgcccggaaccgatgtgggccgaattattggctcttgcagcgtctgcccagggacgtgtgtatcgcgcggaagaccctcatggtgcgctccgcggcctcaaagaagtccgtggactccttgccaaagacttagctgttgttgcattgcgcgaaggtcttgatttacctccgactgatgatccaatgcttcttgcgtacctcttggacccgtcaaacacgacgcccgaaggcgtagcccgtcgttacggcggcgagtggaccgaagatgcaggcgagcgcgcgttattggccgaacgtttgcaccagaatttattaggacgtttgcaaggcgaggaacgtctcctctggctttacgaagaagtggagaaaccattgagtcgcgtgctcgcgcatatggaagctaccggtgtcaaattagacgtggcgtatttggaggcactcagccttgaagttgctgccgaaatgcgccgcttggaggaagaagtattccgtttagcaggccactcctttaaccttaattctcgcgatcagttagaacgtgtgttgttcgatgaacttggtctccctcctatcggcaagacagagaagaccggtaaacgtagcacttcagcggcggttttagaagctcttcgcgaagtccatcccattgtggacaagatcttgcagtaccgcgaactcgcgaaattgaaaggcacctatattgaccctcttccggcattagtccacccgaaaacgggacgcctccatacccgcttcaaccaaacagccacggcgaccggtcgtttgtcctcctctgatccaaaccttcagaatattccagtacgtaccccattgggccagaagatccgccgcgcgtttgtagctgaggagggttggcgtttagtggccctcgattatagccaaattgaattacgtgtccttgcccatctttctggcgatgagaacctcatccgcgtgtttcaggaaggcaaagacattcacactcaaacggcaagctggatgtttggattatcagctgaagcgatcgatcctttgatgcgtcgtgcagcgaagaccatcaatttcggtgttctctacggtatgagtgccgctcgtttgtcgcaggaattaggcattccctatgaagaagctgcggcgttcattcagcgctactttcaaagctatcccaaagttaaagcatggatcgagaagactctcgaagaaggccgcacacgtggttacgtagagaccttatttggacgtcgccgctatgttcccgatttaaacgctcgcgtgaaatctgtccgtgaagccgccgaacgcatggcgttcaacatgcctgtacagggcacggcagctgacctcatgaaacttgcaatggtgcgcctttttccacaattgcgtgaagttggtgcccgcatgctcttgcaggtccacgatgaactcttgttagaagcgccaaaagagcgtgcggaagaggtggcagccctcgcgaaagaggttatggaaggcgtgtggcccttagcggtgcctcttgaagtcgaagttggtattggcgaggattggttggctgccaaaggataatga

SEQ ID NO: 728 - protein, 841 aa, synthetic construct
  REGION 1..841: note = Variant of DNA polymerase I from Thermus sp. strain 2.9
MHHHHHHGGSGMLPLFEPKGRVLLVDGHHLAYRNFFALKGLTTSRGEPVQGVYGFAKSLLKALKEDGDVVIVVFDAKAPSFRHEAYEAYKAGRAPTPEDFPRQLALMKELVDLLGLERLEVPGFEADDVLATLAKKAEREGYEVQILTADRDLFQLLSPRISVLHPEGHRITPEWLWEKYGLRPEQWVDFRALVGDPSDNIPGVKGIGEKTALKLLKEWGSLENLLKNLDQVKPESVREKILAHLEDLKLSRELSRVRTDLPLEVDFRGRREPDWEGLKAFLERLEFGSLLHEFGLLESPLPAEEAPWPPPEGAFLGYRLSRPEPMWAELLALAASAQGRVYRAEDPHGALRGLKEVRGLLAKDLAVVALREGLDLPPTDDPMLLAYLLDPSNTTPEGVARRYGGEWTEDAGERALLAERLHQNLLGRLQGEERLLWLYEEVEKPLSRVLAHMEATGVKLDVAYLEALSLEVAAEMRRLEEEVFRLAGHSFNLNSRDQLERVLFDELGLPPIGKTEKTGKRSTSAAVLEALREVHPIVDKILQYRELAKLKGTYIDPLPALVHPKTGRLHTRFNQTATATGRLSSSDPNLQNIPVRTPLGQKIRRAFVAEEGWRLVALDYSQIELRVLAHLSGDENLIRVFQEGKDIHTQTASWMFGLSAEAIDPLMRRAAKTINFGVLYGMSAARLSQELGIPYEEAAAFIQRYFQSYPKVKAWIEKTLEEGRTRGYVETLFGRRRYVPDLNARVKSVREAAERMAFNMPVQGTAADLMKLAMVRLFPQLREVGARMLLQVHDELLLEAPKERAEEVAALAKEVMEGVWPLAVPLEVEVGIGEDWLAAKG

SEQ ID NO: 729 - DNA, 2529 bp, synthetic construct
  misc_feature 1..2529: note = Variant of DNA polymerase I from Thermus sp. strain 2.9
  source 1..2529: mol_type = other DNA
atgcaccatcatcatcatcatggcggtagcggcatgttaccgttgttcgaacctaaaggtcgcgtgcttctggttgatggccatcatctcgcgtatcgtaacttctttgccctgaaaggattaaccaccagccgtggcgagccggtacagggtgtctacggctttgcaaagtcgctcctgaaagctctgaaagaagacggtgatgtggtgattgttgtctttgatgcgaaagcgccaagttttcgccacgaagcgtacgaagcttacaaagccgggcgtgctccaacgccggaagactttcctcgccaattggcgcttatgaaggaattagtggatttgcttggcctcgaacgcttggaagttcccggtttcgaggcagacgacgtattagcgactctcgcaaagaaagccgaacgtgagggctatgaagtccagatcttgacagcagatcgcgatcttttccagcttttatctccgcgcatctcggtgttacacccggaagggcatctgatcaccccggaatggctctgggagaaatatggtttgcgtcccgaacaatgggtggattttcgcgccttagccggcgatccgagcgacaatattccgggagttaaaggtatcggcgagaagacggcgctcaagctccttaaagaatgggggtcgttggagaacttgcttaagaatttagatcaggtcaaaccagagtcagtgcgtgagaagattcttgcacacctcgaagacctcaaattaagccgcgaattgtcccgtgtacgcaccgatttgccgctcgaagttgatttccgtggccgccgcgaacctgactgggagggtcttaaagcgtttttagagcgtcttgaatttggttcgctcttgcatgaattcggccttttagaaagcccgttaccagccgaagaagcaccttggccaccgcccgaaggcgcgtttttaggttaccgtttgagtcgcccggaaccgatgtgggccgaattattggctcttgcagcgtctgcccagggacgtgtgtatcgcgcggaagaccctcatggtgcgctccgcggcctcaaagaagtccgtggactccttgccaaagacttagctgttgttgcattgcgcgaaggtcttgatttacctccgactgatgatccaatgcttcttgcgtacctcttggacccgtcaaacacgacgcccgaaggcgtagcccgtcgttacggcggcgagtggaccgaagatgcaggcgagcgcgcgttattggccgaacgtttgcacgcaaatttattaggacgtttgcaaggcgaggaacgtctcctctggctttacgaagaagtggagaaaccattgagtcgcgtgctcgctcatatggaagctaccggtgtcaaattagacgtggcgtatttggaggcactcagccttgaagttgctgccgaaatgcgccgcttggaggaagaagtattccgtttagcaggccactcctttaaccttaattctcgcgatcagttagaacgtgtgttgttcgatgaacttggtctccctcctatcggcaagacagagaagaccggtaaacgtagcacttcagcggcggttttagaagctcttcgcgaagtccatcccattgtggacaagatcttgcagtaccgcgaactcgcgaaattgaaaggcacctatattgaccctcttccggcattagtccacccgaaaacgggacgcctccatacccgcttcaaccaaacagccacggcgaccggtcgtttgtcctcctctgatccaaaccttcagaatattccagtacgtaccccattgggccagaagatccgccgcgcgtttgtagctgaggagggttggcgtttagtggccctcgattatagccaaattgaattacgtgtccttgcccatctttctggcgatgagaacctcatccgcgtgtttcaggaaggcaaagacattcacactcaaacggcaagctggatgtttggactgccggcggaagcgatcgatcctttgatgcgtcgtgcagcgaagaccatcaatttcggtgttctctacggtatgagtgcccatcgtttgtcgcaggaattaggcattccctatgaagaagctgcggcgttcattcagcgctactttcaaagctatcccaaagttaaagcatggatcgagaagactctcgaagaaggccgcacacgtggttacgtagagaccttatttggacgtcgccgctatgttcccgatttaaacgctcgcgtgaaatctgtccgtgaagccgccgaacgcatggcgttcaacatgcctgtacagggcacggcagctgacctcatgaaacttgcaatggtgcgcctttttccacaattgcgtgaagttggtgcccgcatgctcttgcaggtccacgatgaactcttgttagaagcgccaaaagagcgtgcggaagaggtggcagccctcgcgaaagaggttatggaaggcgtgtggcccttagcggtgcctcttgaagtcgaagttggtattggcgaggattggttggctgccaaaggataatga

SEQ ID NO: 730 - protein, 841 aa, synthetic construct
  REGION 1..841: note = Variant of DNA polymerase I from Thermus sp. strain 2.9
MHHHHHHGGSGMLPLFEPKGRVLLVDGHHLAYRNFFALKGLTTSRGEPVQGVYGFAKSLLKALKEDGDVVIVVFDAKAPSFRHEAYEAYKAGRAPTPEDFPRQLALMKELVDLLGLERLEVPGFEADDVLATLAKKAEREGYEVQILTADRDLFQLLSPRISVLHPEGHLITPEWLWEKYGLRPEQWVDFRALAGDPSDNIPGVKGIGEKTALKLLKEWGSLENLLKNLDQVKPESVREKILAHLEDLKLSRELSRVRTDLPLEVDFRGRREPDWEGLKAFLERLEFGSLLHEFGLLESPLPAEEAPWPPPEGAFLGYRLSRPEPMWAELLALAASAQGRVYRAEDPHGALRGLKEVRGLLAKDLAVVALREGLDLPPTDDPMLLAYLLDPSNTTPEGVARRYGGEWTEDAGERALLAERLHANLLGRLQGEERLLWLYEEVEKPLSRVLAHMEATGVKLDVAYLEALSLEVAAEMRRLEEEVFRLAGHSFNLNSRDQLERVLFDELGLPPIGKTEKTGKRSTSAAVLEALREVHPIVDKILQYRELAKLKGTYIDPLPALVHPKTGRLHTRFNQTATATGRLSSSDPNLQNIPVRTPLGQKIRRAFVAEEGWRLVALDYSQIELRVLAHLSGDENLIRVFQEGKDIHTQTASWMFGLPAEAIDPLMRRAAKTINFGVLYGMSAHRLSQELGIPYEEAAAFIQRYFQSYPKVKAWIEKTLEEGRTRGYVETLFGRRRYVPDLNARVKSVREAAERMAFNMPVQGTAADLMKLAMVRLFPQLREVGARMLLQVHDELLLEAPKERAEEVAALAKEVMEGVWPLAVPLEVEVGIGEDWLAAKG

SEQ ID NO: 731 - DNA, 2529 bp, synthetic construct
  misc_feature 1..2529: note = Variant of DNA polymerase I from Thermus sp. strain 2.9
  source 1..2529: mol_type = other DNA
atgcaccatcatcatcatcatggcggtagcggcatgttaccgttgttcgaacctaaaggtcgcgtgcttctggttgatggccatcatctcgcgtatcgtaacttctttgccctgaaaggattaaccaccagccgtggcgagccggtacagggtgtctacggctttgcaaagtcgctcctgaaagctctgaaagaagacggtgatgtggtgattgttgtctttgatgcgaaagcgccaagttttcgccacgaagcgtacgaagcttacaaagccgggcgtgctccaacgccggaagactttcctcgccaattggcgcttatgaaggaattagtggatttgcttggcctcgaacgcttggaagttcccggtttcgaggcagacgacgtattagcgactctcgcaaagaaagccgaacgtgagggctatgaagtccagatcttgacagcagatcgcgatcttttccagcttttatctccgcgcatctcggtgttacacccggaagggcatctgatcaccccggaatggctctgggagaaatatggtttgcgtcccgaacaatgggtggattttcgcgccttagtcggcgatccgagcgacaatattccgggagttaaaggtatcggcgagaagacggcgctcaagctccttaaagaatgggggtcgttggagaacttgcttaagaatttagatcaggtcaaaccagagtcagtgcgtgagaagattcttgcacacctcgaagacctcaaattaagccgcgaattgtcccgtgtacgcaccgatttgccgctcgaagttgatttccgtggccgccgcgaacctgactgggagggtcttaaagcgtttttagagcgtcttgaatttggttcgctcttgcatgaattcggccttttagaaagcccgttaccagccgaagaagcaccttggccaccgcccgaaggcgcgtttttaggttaccgtttgagtcgcccggaaccgatgtgggccgaattattggctcttgcagcgtctgcccagggacgtgtgtatcgcgcggaagaccctcatggtgcgctccgcggcctcaaagaagtccgtggactccttgccaaagacttagctgttgttgcattgcgcgaaggtcttgatttacctccgactgatgatccaatgcttcttgcgtacctcttggacccgtcaaacacgacgcccgaaggcgtagcccgtcgttacggcggcgagtggaccgaagatgcaggcgagcgcgcgttattggccgaacgtttgcacgcaaatttattaggacgtttgcaaggcgaggaacgtctcctctggctttacgaagaagtggagaaaccattgagtcgcgtgctcgcgcatatggaagctaccggtgtcaaattagacgtggcgtatttggaggcactcagccttgaagttgctgccgaactgcgccgcttggaggaagaagtattccgtttagcaggccactcctttaaccttaattctcgcgatcagttagaacgtgtgttgttcgatgaacttggtctccctcctatcggcaagacagagaagaccggtaaacgtagcacttcagcggcggttttagaagctcttcgcgaagtccatcccattgtggacaagatcttgcagtaccgcgaactcgcgaaattgaaaggcacctatattgaccgtcttccggcattagtccacccgaaaacgggacgcctccatacccgcttcaaccaaacagccacggcgaccggtcgtttgtcctcctctgatccaaaccttcagaatattccagtacgtaccccattgggccagaagatccgccgcgcgtttgtagctgaggagggttggcgtttagtggccctcgattatagccaaattgaattacgtgtccttgcccatctttctggcgatgagaacctcatccgcgtgtttcaggaaggcaaagacattcacactcaaacggcaagctggatgtttggactgccggcggaagcgatcgatcctttgatgcgtcgtgcagcgaagaccatcaatttcggtgttctctacggtatgagtgcccatcgtttgtcgcaggaattaggcattccctatgaagaagctgcggcgttcattcagcgctactttcaaagctatcccaaagttaaagcatggatcgagaagactctcgaagaaggccgcacacgtggttacgtagagaccttatttggacgtcgccgctatgttcccgatttaaacgctcgcgtgaaatctgtccgtgaagccgccgaacgcatggcgttcaacatgcctgtacagggcacggcagctgacctcatgaaacttgcaatggtgcgcctttttccacaattgcgtgaagttggtgcccgcatgctcttgcaggtccacgatgaactcttgttagaagcgccaaaagagcgtgcggaagaggtggcagccctcgcgaaagaggttatggaaggcgtgtggcccttagcggtgcctcttgaagtcgaagttggtattggcgaggattggttggctgccaaaggataatga

SEQ ID NO: 732 - protein, 841 aa, synthetic construct
  REGION 1..841: note = Variant of DNA polymerase I from Thermus sp. strain 2.9
MHHHHHHGGSGMLPLFEPKGRVLLVDGHHLAYRNFFALKGLTTSRGEPVQGVYGFAKSLLKALKEDGDVVIVVFDAKAPSFRHEAYEAYKAGRAPTPEDFPRQLALMKELVDLLGLERLEVPGFEADDVLATLAKKAEREGYEVQILTADRDLFQLLSPRISVLHPEGHLITPEWLWEKYGLRPEQWVDFRALVGDPSDNIPGVKGIGEKTALKLLKEWGSLENLLKNLDQVKPESVREKILAHLEDLKLSRELSRVRTDLPLEVDFRGRREPDWEGLKAFLERLEFGSLLHEFGLLESPLPAEEAPWPPPEGAFLGYRLSRPEPMWAELLALAASAQGRVYRAEDPHGALRGLKEVRGLLAKDLAVVALREGLDLPPTDDPMLLAYLLDPSNTTPEGVARRYGGEWTEDAGERALLAERLHANLLGRLQGEERLLWLYEEVEKPLSRVLAHMEATGVKLDVAYLEALSLEVAAELRRLEEEVFRLAGHSFNLNSRDQLERVLFDELGLPPIGKTEKTGKRSTSAAVLEALREVHPIVDKILQYRELAKLKGTYIDRLPALVHPKTGRLHTRFNQTATATGRLSSSDPNLQNIPVRTPLGQKIRRAFVAEEGWRLVALDYSQIELRVLAHLSGDENLIRVFQEGKDIHTQTASWMFGLPAEAIDPLMRRAAKTINFGVLYGMSAHRLSQELGIPYEEAAAFIQRYFQSYPKVKAWIEKTLEEGRTRGYVETLFGRRRYVPDLNARVKSVREAAERMAFNMPVQGTAADLMKLAMVRLFPQLREVGARMLLQVHDELLLEAPKERAEEVAALAKEVMEGVWPLAVPLEVEVGIGEDWLAAKG

SEQ ID NO: 733 - DNA, 2529 bp, synthetic construct
  misc_feature 1..2529: note = Variant of DNA polymerase I from Thermus sp. strain 2.9
  source 1..2529: mol_type = other DNA
atgcaccatcatcatcatcatggcggtagcggcatgttaccgttgttcgaacctaaaggtcgcgtgcttctggttgatggccatcatctcgcgtatcgtaacttctttgccctgaaaggattaaccaccagccgtggcgagccggtacagggtgtctacggctttgcaaagtcgctcctgaaagctctgaaagaagacggtgatgtggtgattgttgtctttgatgcgaaagcgccaagttttcgccacgaagcgtacgaagcttacaaagccgggcgtgctccaacgccggaagactttcctcgccaattggcgcttatgaaggaattagtggatttgcttggcctcgaacgcttggaagttcccggtttcgaggcagacgacgtattagcgactctcgcaaagaaagccgaacgtgagggctatgaagtccagatcttgacagcagatcgcgatcttttccagcttttatctccgcgcatctcggtgttacacccggaagggcatctgatcaccccggaatggctctgggagaaatatggtttgcgtcccgaacaatgggtggattttcgcgccttagccggcgatccgagcgacaatattccgggagttaaaggtatcggcgagaagacggcgctcaagctccttaaagaatgggggtcgttggagaacttgcttaagaatttagatcaggtcaaaccagagtcagtgcgtgagaagattcttgcacacctcgaagacctcaaattaagccgcgaattgtcccgtgtacgcaccgatttgccgctcgaagttgatttccgtggccgccgcgaacctgactgggagggtcttaaagcgtttttagagcgtcttgaatttggttcgctcttgcatgaattcggccttttagaaagcccgttaccagccgaagaagcaccttggccaccgcccgaaggcgcgtttttaggttaccgtttgagtcgcccggaaccgatgtgggccgaattattggctcttgcagcgtctgcccagggacgtgtgtatcgcgcggaagaccctcatggtgcgctccgcggcctcaaagaagtccgtggactccttgccaaagacttagctgttgttgcattgcgcgaaggtcttgatttacctccgactgatgatccaatgcttcttgcgtacctcttggacccgtcaaacacgacgcccgaaggcgtagcccgtcgttacggcggcgagtggaccgaagatgcaggcgagcgcgcgttattggccgaacgtttgcaccagaatttattaggacgtttgcaaggcgaggaacgtctcctctggctttacgaagaagtggagaaaccattgagtcgcgtgctcgctcatatggaagctaccggtgtcaaattagacgtggcgtatttggaggcactcagccttgaagttgctgccgaaatgcgccgcttggaggaagaagtattccgtttagcaggccactcctttaaccttaattctcgcgatcagttagaacgtgtgttgttcgatgaacttggtctccctcctatcggcaagacagagaagaccggtaaacgtagcacttcagcggcggttttagaagctcttcgcgaagtccatcccattgtggacaagatcttgcagtaccgcgaactcgcgaaattgaaaggcacctatattgaccgtcttccggcattagtccacccgaaaacgggacgcctccatacccgcttcaaccaaacagccacggcgaccggtcgtttgtcctcctctgatccaaaccttcagaatattccagtacgtaccccattgggccagaagatccgccgcgcgtttgtagctgaggagggttggcgtttagtggccctcgattatagccaaattgaattacgtgtccttgcccatctttctggcgatgagaacctcatccgcgtgtttcaggaaggcaaagacattcacactcaaacggcaagctggatgtttggagtgccggcggaagcgatcgatcctttgatgcgtcgtgcagcgaagaccatcaatttcggtgttctctacggtatgagtgcccatcgtttgtcgcaggaattaggcattccctatgaagaagctgcggcgttcattcagcgctactttcaaagctatcccaaagttaaagcatggatcgagaagactctcgaagaaggccgcacacgtggttacgtagagaccttatttggacgtcgccgctatgttcccgatttaaacgctcgcgtgaaatctgtccgtgaagccgccgaacgcatggcgttcaacatgcctgtacagggcacggcagctgacctcatgaaacttgcaatggtgcgcctttttccacaattgcgtgaagttggtgcccgcatgctcttgcaggtccacgatgaactcttgttagaagcgccaaaagagcgtgcggaagaggtggcagccctcgcgaaagaggttatggaaggcgtgtggcccttagcggtgcctcttgaagtcgaagttggtattggcgaggattggttggctgccaaaggataatga

SEQ ID NO: 734 - protein, 841 aa, synthetic construct
  REGION 1..841: note = Variant of DNA polymerase I from Thermus sp. strain 2.9
MHHHHHHGGSGMLPLFEPKGRVLLVDGHHLAYRNFFALKGLTTSRGEPVQGVYGFAKSLLKALKEDGDVVIVVFDAKAPSFRHEAYEAYKAGRAPTPEDFPRQLALMKELVDLLGLERLEVPGFEADDVLATLAKKAEREGYEVQILTADRDLFQLLSPRISVLHPEGHLITPEWLWEKYGLRPEQWVDFRALAGDPSDNIPGVKGIGEKTALKLLKEWGSLENLLKNLDQVKPESVREKILAHLEDLKLSRELSRVRTDLPLEVDFRGRREPDWEGLKAFLERLEFGSLLHEFGLLESPLPAEEAPWPPPEGAFLGYRLSRPEPMWAELLALAASAQGRVYRAEDPHGALRGLKEVRGLLAKDLAVVALREGLDLPPTDDPMLLAYLLDPSNTTPEGVARRYGGEWTEDAGERALLAERLHQNLLGRLQGEERLLWLYEEVEKPLSRVLAHMEATGVKLDVAYLEALSLEVAAEMRRLEEEVFRLAGHSFNLNSRDQLERVLFDELGLPPIGKTEKTGKRSTSAAVLEALREVHPIVDKILQYRELAKLKGTYIDRLPALVHPKTGRLHTRFNQTATATGRLSSSDPNLQNIPVRTPLGQKIRRAFVAEEGWRLVALDYSQIELRVLAHLSGDENLIRVFQEGKDIHTQTASWMFGVPAEAIDPLMRRAAKTINFGVLYGMSAHRLSQELGIPYEEAAAFIQRYFQSYPKVKAWIEKTLEEGRTRGYVETLFGRRRYVPDLNARVKSVREAAERMAFNMPVQGTAADLMKLAMVRLFPQLREVGARMLLQVHDELLLEAPKERAEEVAALAKEVMEGVWPLAVPLEVEVGIGEDWLAAKG

SEQ ID NO: 735 - DNA, 2529 bp, synthetic construct
  misc_feature 1..2529: note = Variant of DNA polymerase I from Thermus sp. strain 2.9
  source 1..2529: mol_type = other DNA
atgcaccatcatcatcatcatggcggtagcggcatgttaccgttgttcgaacctaaaggtcgcgtgcttctggttgatggccatcatctcgcgtatcgtaacttctttgccctgaaaggattaaccaccagccgtggcgagccggtacagggtgtctacggctttgcaaagtcgctcctgaaagctctgaaagaagacggtgatgtggtgattgttgtctttgatgcgaaagcgccaagttttcgccacgaagcgtacgaagcttacaaagccgggcgtgctccaacgccggaagactttcctcgccaattggcgcttatgaaggaattagtggatttgcttggcctcgaacgcttggaagttcccggtttcgaggcagacgacgtattagcgactctcgcaaagaaagccgaacgtgagggctatgaagtccagatcttgacagcagatcgcgatcttttccagcttttatctccgcgcatctcggtgttacacccggaagggcatcgtatcaccccggaatggctctgggagaaatatggtttgcgtcccgaacaatgggtggattttcgcgccttagccggcgatccgagcgacaatattccgggagttaaaggtatcggcgagaagacggcgctcaagctccttaaagaatgggggtcgttggagaacttgcttaagaatttagatcaggtcaaaccagagtcagtgcgtgagaagattcttgcacacctcgaagacctcaaattaagccgcgaattgtcccgtgtacgcaccgatttgccgctcgaagttgatttccgtggccgccgcgaacctgactgggagggtcttaaagcgtttttagagcgtcttgaatttggttcgctcttgcatgaattcggccttttagaaagcccgttaccagccgaagaagcaccttggccaccgcccgaaggcgcgtttttaggttaccgtttgagtcgcccggaaccgatgtgggccgaattattggctcttgcagcgtctgcccagggacgtgtgtatcgcgcggaagaccctcatggtgcgctccgcggcctcaaagaagtccgtggactccttgccaaagacttagctgttgttgcattgcgcgaaggtcttgatttacctccgactgatgatccaatgcttcttgcgtacctcttggacccgtcaaacacgacgcccgaaggcgtagcccgtcgttacggcggcgagtggaccgaagatgcaggcgagcgcgcgttattggccgaacgtttgcacgcaaatttattaggacgtttgcaaggcgaggaacgtctcctctggctttacgaagaagtggagaaaccattgagtcgcgtgctcgctcatatggaagctaccggtgtcaaattagacgtggcgtatttggaggcactcagccttgaagttgctgccgaaatgcgccgcttggaggaagaagtattccgtttagcaggccactcctttaaccttaattctcgcgatcagttagaacgtgtgttgttcgatgaacttggtctccctcctatcggcaagacagagaagaccggtaaacgtagcacttcagcggcggttttagaagctcttcgcgaagtccatcccattgtggacaagatcttgcagtaccgcgaactcgcgaaattgaaaggcacctatattgaccctcttccggcattagtccacccgaaaacgggacgcctccatacccgcttcaaccaaacagccacggcgaccggtcgtttgtcctcctctgatccaaaccttcagaatattccagtacgtaccccattgggccagaagatccgccgcgcgtttgtagctgaggagggttggcgtttagtggccctcgattatagccaaattgaattacgtgtccttgcccatctttctggcgatgagaacctcatccgcgtgtttcaggaaggcaaagacattcacactcaaacggcaagctggatgtttggactgccgtcggaagcgatcgatcctttgatgcgtcgtgcagcgaagaccatcaatttcggtgttctctacggtatgagtgcccaccgtttgtcgcaggaattaggcattccctatgaagaagctgcggcgttcattcagcgctactttcaaagctatcccaaagttaaagcatggatcgagaagactctcgaagaaggccgcacacgtggttacgtagagaccttatttggacgtcgccgctatgttcccgatttaaacgctcgcgtgaaatctgtccgtgaagccgccgaacgcatggcgttcaacatgcctgtacagggcacggcagctgacctcatgaaacttgcaatggtgcgcctttttccacaattgcgtgaagttggtgcccgcatgctcttgcaggtccacgatgaactcttgttagaagcgccaaaagagcgtgcggaagaggtggcagccctcgcgaaagaggttatggaaggcgtgtggcccttagcggtgcctcttgaagtcgaagttggtattggcgaggattggttggctgccaaaggataatga

SEQ ID NO: 736 - protein, 841 aa, synthetic construct
  REGION 1..841: note = Variant of DNA polymerase I from Thermus sp. strain 2.9
MHHHHHHGGSGMLPLFEPKGRVLLVDGHHLAYRNFFALKGLTTSRGEPVQGVYGFAKSLLKALKEDGDVVIVVFDAKAPSFRHEAYEAYKAGRAPTPEDFPRQLALMKELVDLLGLERLEVPGFEADDVLATLAKKAEREGYEVQILTADRDLFQLLSPRISVLHPEGHRITPEWLWEKYGLRPEQWVDFRALAGDPSDNIPGVKGIGEKTALKLLKEWGSLENLLKNLDQVKPESVREKILAHLEDLKLSRELSRVRTDLPLEVDFRGRREPDWEGLKAFLERLEFGSLLHEFGLLESPLPAEEAPWPPPEGAFLGYRLSRPEPMWAELLALAASAQGRVYRAEDPHGALRGLKEVRGLLAKDLAVVALREGLDLPPTDDPMLLAYLLDPSNTTPEGVARRYGGEWTEDAGERALLAERLHANLLGRLQGEERLLWLYEEVEKPLSRVLAHMEATGVKLDVAYLEALSLEVAAEMRRLEEEVFRLAGHSFNLNSRDQLERVLFDELGLPPIGKTEKTGKRSTSAAVLEALREVHPIVDKILQYRELAKLKGTYIDPLPALVHPKTGRLHTRFNQTATATGRLSSSDPNLQNIPVRTPLGQKIRRAFVAEEGWRLVALDYSQIELRVLAHLSGDENLIRVFQEGKDIHTQTASWMFGLPSEAIDPLMRRAAKTINFGVLYGMSAHRLSQELGIPYEEAAAFIQRYFQSYPKVKAWIEKTLEEGRTRGYVETLFGRRRYVPDLNARVKSVREAAERMAFNMPVQGTAADLMKLAMVRLFPQLREVGARMLLQVHDELLLEAPKERAEEVAALAKEVMEGVWPLAVPLEVEVGIGEDWLAAKG

SEQ ID NO: 737 - DNA, 2529 bp, synthetic construct
  misc_feature 1..2529: note = Variant of DNA polymerase I from Thermus sp. strain 2.9
  source 1..2529: mol_type = other DNA
atgcaccatcatcatcatcatggcggtagcggcatgttaccgttgttcgaacctaaaggtcgcgtgcttctggttgatggccatcatctcgcgtatcgtaacttctttgccctgaaaggattaaccaccagccgtggcgagccggtacagggtgtctacggctttgcaaagtcgctcctgaaagctctgaaagaagacggtgatgtggtgattgttgtctttgatgcgaaagcgccaagttttcgccacgaagcgtacgaagcttacaaagccgggcgtgctccaacgccggaagactttcctcgccaattggcgcttatgaaggaattagtggatttgcttggcctcgaacgcttggaagttcccggtttcgaggcagacgacgtattagcgactctcgcaaagaaagccgaacgtgagggctatgaagtccagatcttgacagcagatcgcgatcttttccagcttttatctccgcgcatctcggtgttacacccggaagggcatcgtatcaccccggaatggctctgggagaaatatggtttgcgtcccgaacaatgggtggattttcgcgccttagccggcgatccgagcgacaatattccgggagttaaaggtatcggcgagaagacggcgctcaagctccttaaagaatgggggtcgttggagaacttgcttaagaatttagatcaggtcaaaccagagtcagtgcgtgagaagattcttgcacacctcgaagacctcaaattaagccgcgaattgtcccgtgtacgcaccgatttgccgctcgaagttgatttccgtggccgccgcgaacctgactgggagggtcttaaagcgtttttagagcgtcttgaatttggttcgctcttgcatgaattcggccttttagaaagcccgttaccagccgaagaagcaccttggccaccgcccgaaggcgcgtttttaggttaccgtttgagtcgcccggaaccgatgtgggccgaattattggctcttgcagcgtctgcccagggacgtgtgtatcgcgcggaagaccctcatggtgcgctccgcggcctcaaagaagtccgtggactccttgccaaagacttagctgttgttgcattgcgcgaaggtcttgatttacctccgactgatgatccaatgcttcttgcgtacctcttggacccgtcaaacacgacgcccgaaggcgtagcccgtcgttacggcggcgagtggaccgaagatgcaggcgagcgcgcgttattggccgaacgtttgcacgcaaatttattaggacgtttgcaaggcgaggaacgtctcctctggctttacgaagaagtggagaaaccattgagtcgcgtgctcgctcatatggaagctaccggtgtcaaattagacgtggcgtatttggaggcactcagccttgaagttgctgccgaaatgcgccgcttggaggaagaagtattccgtttagcaggccactcctttaaccttaattctcgcgatcagttagaacgtgtgttgttcgatgaacttggtctccctcctatcggcaagacagagaagaccggtaaacgtagcacttcagcggcggttttagaagctcttcgcgaagtccatcccattgtggacaagatcttgcagtaccgcgaactcgcgaaattgaaaggcacctatattgaccctcttccggcattagtccacccgaaaacgggacgcctccatacccgcttcaaccaaacagccacggcgaccggtcgtttgtcctcctctgatccaaaccttcagaatattccagtacgtaccccattgggccagaagatccgccgcgcgtttgtagctgaggagggttggcgtttagtggccctcgattatagccaaattgaattacgtgtccttgcccatctttctggcgatgagaacctcatccgcgtgtttcaggaaggcaaagacattcacactcaaacggcaagctggatgtttggactgccgtcggaagcgatcgatcctttgatgcgtcgtgcagcgaagaccatcaatttcggtgttctctacggtatgagtgccgctcgtttgtcgcaggaattaggcattccctatgaagaagctgcggcgttcattcagcgctactttcaaagctatcccaaagttaaagcatggatcgagaagactctcgaagaaggccgcacacgtggttacgtagagaccttatttggacgtcgccgctatgttcccgatttaaccgctcgcgtgaaatctgtccgtgaagccgccgaacgcatggcgttcaacatgcctgtacagggcacggcagctgacctcatgaaacttgcaatggtgcgcctttttccacaattgcgtgaagttggtgcccgcatgctcttgcaggtccacgatgaactcttgttagaagcgccaaaagagcgtgcggaagaggtggcagccctcgcgaaagaggttatggaaggcgtgtggcccttagcggtgcctcttgaagtcgaagttggtattggcgaggattggttggctgccaaaggataatga

SEQ ID NO: 738 - protein, 841 aa, synthetic construct
  REGION 1..841: note = Variant of DNA polymerase I from Thermus sp. strain 2.9
MHHHHHHGGSGMLPLFEPKGRVLLVDGHHLAYRNFFALKGLTTSRGEPVQGVYGFAKSLLKALKEDGDVVIVVFDAKAPSFRHEAYEAYKAGRAPTPEDFPRQLALMKELVDLLGLERLEVPGFEADDVLATLAKKAEREGYEVQILTADRDLFQLLSPRISVLHPEGHRITPEWLWEKYGLRPEQWVDFRALAGDPSDNIPGVKGIGEKTALKLLKEWGSLENLLKNLDQVKPESVREKILAHLEDLKLSRELSRVRTDLPLEVDFRGRREPDWEGLKAFLERLEFGSLLHEFGLLESPLPAEEAPWPPPEGAFLGYRLSRPEPMWAELLALAASAQGRVYRAEDPHGALRGLKEVRGLLAKDLAVVALREGLDLPPTDDPMLLAYLLDPSNTTPEGVARRYGGEWTEDAGERALLAERLHANLLGRLQGEERLLWLYEEVEKPLSRVLAHMEATGVKLDVAYLEALSLEVAAEMRRLEEEVFRLAGHSFNLNSRDQLERVLFDELGLPPIGKTEKTGKRSTSAAVLEALREVHPIVDKILQYRELAKLKGTYIDPLPALVHPKTGRLHTRFNQTATATGRLSSSDPNLQNIPVRTPLGQKIRRAFVAEEGWRLVALDYSQIELRVLAHLSGDENLIRVFQEGKDIHTQTASWMFGLPSEAIDPLMRRAAKTINFGVLYGMSAARLSQELGIPYEEAAAFIQRYFQSYPKVKAWIEKTLEEGRTRGYVETLFGRRRYVPDLTARVKSVREAAERMAFNMPVQGTAADLMKLAMVRLFPQLREVGARMLLQVHDELLLEAPKERAEEVAALAKEVMEGVWPLAVPLEVEVGIGEDWLAAKG

SEQ ID NO: 739 - DNA, 2529 bp, synthetic construct
  misc_feature 1..2529: note = Variant of DNA polymerase I from Thermus sp. strain 2.9
  source 1..2529: mol_type = other DNA
atgcaccatcatcatcatcatggcggtagcggcatgttaccgttgttcgaacctaaaggtcgcgtgcttctggttgatggccatcatctcgcgtatcgtaacttctttgccctgaaaggattaaccaccagccgtggcgagccggtacagggtgtctacggctttgcaaagtcgctcctgaaagctctgaaagaagacggtgatgtggtgattgttgtctttgatgcgaaagcgccaagttttcgccacgaagcgtacgaagcttacaaagccgggcgtgctccaacgccggaagactttcctcgccaattggcgcttatgaaggaattagtggatttgcttggcctcgaacgcttggaagttcccggtttcgaggcagacgacgtattagcgactctcgcaaagaaagccgaacgtgagggctatgaagtccagatcttgacagcagatcgcgatcttttccagcttttatctccgcgcatctcggtgttacacccggaagggcatcgtatcaccccggaatggctctgggagaaatatggtttgcgtcccgaacaatgggtggattttcgcgccttagtcggcgatccgagcgacaatattccgggagttaaaggtatcggcgagaagacggcgctcaagctccttaaagaatgggggtcgttggagaacttgcttaagaatttagatcaggtcaaaccagagtcagtgcgtgagaagattcttgcacacctcgaagacctcaaattaagccgcgaattgtcccgtgtacgcaccgatttgccgctcgaagttgatttccgtggccgccgcgaacctgactgggagggtcttaaagcgtttttagagcgtcttgaatttggttcgctcttgcatgaattcggccttttagaaagcccgttaccagccgaagaagcaccttggccaccgcccgaaggcgcgtttttaggttaccgtttgagtcgcccggaaccgatgtgggccgaattattggctcttgcagcgtctgcccagggacgtgtgtatcgcgcggaagaccctcatggtgcgctccgcggcctcaaagaagtccgtggactccttgccaaagacttagctgttgttgcattgcgcgaaggtcttgatttacctccgactgatgatccaatgcttcttgcgtacctcttggacccgtcaaacacgacgcccgaaggcgtagcccgtcgttacggcggcgagtggaccgaagatgcaggcgagcgcgcgttattggccgaacgtttgcaccagaatttattaggacgtttgcaaggcgaggaacgtctcctctggctttacgaagaagtggagaaaccattgagtcgcgtgctcgctcatatggaagctaccggtgtcaaattagacgtggcgtatttggaggcactcagccttgaagttgctgccgaactgcgccgcttggaggaagaagtattccgtttagcaggccactcctttaaccttaattctcgcgatcagttagaacgtgtgttgttcgatgaacttggtctccctcctatcggcaagacagagaagaccggtaaacgtagcacttcagcggcggttttagaagctcttcgcgaagtccatcccattgtggacaagatcttgcagtaccgcgaactcgcgaaattgaaaggcacctatattgaccctcttccggcattagtccacccgaaaacgggacgcctccatacccgcttcaaccaaacagccacggcgaccggtcgtttgtcctcctctgatccaaaccttcagaatattccagtacgtaccccattgggccagaagatccgccgcgcgtttgtagctgaggagggttggcgtttagtggccctcgattatagccaaattgaattacgtgtccttgcccatctttctggcgatgagaacctcatccgcgtgtttcaggaaggcaaagacattcacactcaaacggcaagctggatgtttggagtgtcctcggaagcgatcgatcctttgatgcgtcgtgcagcgaagaccatcaatttcggtgttctctacggtatgagtgccgctcgtttgtcgcaggaattaggcattccctatgaagaagctgcggcgttcattcagcgctactttcaaagctatcccaaagttaaagcatggatcgagaagactctcgaagaaggccgcacacgtggttacgtagagaccttatttggacgtcgccgctatgttcccgatttaaacgctcgcgtgaaatctgtccgtgaagccgccgaacgcatggcgttcaacatgcctgtacagggcacggcagctgacctcatgaaacttgcaatggtgcgcctttttccacaattgcgtgaagttggtgcccgcatgctcttgcaggtccacgatgaactcttgttagaagcgccaaaagagcgtgcggaagaggtggcagccctcgcgaaagaggttatggaaggcgtgtggcccttagcggtgcctcttgaagtcgaagttggtattggcgaggattggttggctgccaaaggataatga

SEQ ID NO: 740 - protein, 841 aa, synthetic construct
  REGION 1..841: note = Variant of DNA polymerase I from Thermus sp. strain 2.9
MHHHHHHGGSGMLPLFEPKGRVLLVDGHHLAYRNFFALKGLTTSRGEPVQGVYGFAKSLLKALKEDGDVVIVVFDAKAPSFRHEAYEAYKAGRAPTPEDFPRQLALMKELVDLLGLERLEVPGFEADDVLATLAKKAEREGYEVQILTADRDLFQLLSPRISVLHPEGHRITPEWLWEKYGLRPEQWVDFRALVGDPSDNIPGVKGIGEKTALKLLKEWGSLENLLKNLDQVKPESVREKILAHLEDLKLSRELSRVRTDLPLEVDFRGRREPDWEGLKAFLERLEFGSLLHEFGLLESPLPAEEAPWPPPEGAFLGYRLSRPEPMWAELLALAASAQGRVYRAEDPHGALRGLKEVRGLLAKDLAVVALREGLDLPPTDDPMLLAYLLDPSNTTPEGVARRYGGEWTEDAGERALLAERLHQNLLGRLQGEERLLWLYEEVEKPLSRVLAHMEATGVKLDVAYLEALSLEVAAELRRLEEEVFRLAGHSFNLNSRDQLERVLFDELGLPPIGKTEKTGKRSTSAAVLEALREVHPIVDKILQYRELAKLKGTYIDPLPALVHPKTGRLHTRFNQTATATGRLSSSDPNLQNIPVRTPLGQKIRRAFVAEEGWRLVALDYSQIELRVLAHLSGDENLIRVFQEGKDIHTQTASWMFGVSSEAIDPLMRRAAKTINFGVLYGMSAARLSQELGIPYEEAAAFIQRYFQSYPKVKAWIEKTLEEGRTRGYVETLFGRRRYVPDLNARVKSVREAAERMAFNMPVQGTAADLMKLAMVRLFPQLREVGARMLLQVHDELLLEAPKERAEEVAALAKEVMEGVWPLAVPLEVEVGIGEDWLAAKG

SEQ ID NO: 741 - DNA, 2529 bp, synthetic construct
  misc_feature 1..2529: note = Variant of DNA polymerase I from Thermus sp. strain 2.9
  source 1..2529: mol_type = other DNA
atgcaccatcatcatcatcatggcggtagcggcatgttaccgttgttcgaacctaaaggtcgcgtgcttctggttgatggccatcatctcgcgtatcgtaacttctttgccctgaaaggattaaccaccagccgtggcgagccggtacagggtgtctacggctttgcaaagtcgctcctgaaagctctgaaagaagacggtgatgtggtgattgttgtctttgatgcgaaagcgccaagttttcgccacgaagcgtacgaagcttacaaagccgggcgtgctccaacgccggaagactttcctcgccaattggcgcttatgaaggaattagtggatttgcttggcctcgaacgcttggaagttcccggtttcgaggcagacgacgtattagcgactctcgcaaagaaagccgaacgtgagggctatgaagtccagatcttgacagcagatcgcgatcttttccagcttttatctccgcgcatctcggtgttacacccggaagggcatcgtatcaccccggaatggctctgggagaaatatggtttgcgtcccgaacaatgggtggattttcgcgccttagcaggcgatccgagcgacaatattccgggagttaaaggtatcggcgagaagacggcgctcaagctccttaaagaatgggggtcgttggagaacttgcttaagaatttagatcaggtcaaaccagagtcagtgcgtgagaagattcttgcacacctcgaagacctcaaattaagccgcgaattgtcccgtgtacgcaccgatttgccgctcgaagttgatttccgtggccgccgcgaacctgactgggagggtcttaaagcgtttttagagcgtcttgaatttggttcgctcttgcatgaattcggccttttagaaagcccgttaccagccgaagaagcaccttggccaccgcccgaaggcgcgtttttaggttaccgtttgagtcgcccggaaccgatgtgggccgaattattggctcttgcagcgtctgcccagggacgtgtgtatcgcgcggaagaccctcatggtgcgctccgcggcctcaaagaagtccgtggactccttgccaaagacttagctgttgttgcattgcgcgaaggtcttgatttacctccgactgatgatccaatgcttcttgcgtacctcttggacccgtcaaacacgacgcccgaaggcgtagcccgtcgttacggcggcgagtggaccgaagatgcaggcgagcgcgcgttattggccgaacgtttgcacgcaaatttattaggacgtttgcaaggcgaggaacgtctcctctggctttacgaagaagtggagaaaccattgagtcgcgtgctcgcgcatatggaagctaccggtgtcaaattagacgtggcgtatttggaggcactcagccttgaagttgctgccgaactgcgccgcttggaggaagaagtattccgtttagcaggccactcctttaaccttaattctcgcgatcagttagaacgtgtgttgttcgatgaacttggtctccctcctatcggcaagacagagaagaccggtaaacgtagcacttcagcggcggttttagaagctcttcgcgaagtccatcccattgtggacaagatcttgcagtaccgcgaactcgcgaaattgaaaggcacctatattgaccctcttccggcattagtccacccgaaaacgggacgcctccatacccgcttcaaccaaacagccacggcgaccggtcgtttgtcctcctctgatccaaaccttcagaatattccagtacgtaccccattgggccagaagatccgccgcgcgtttgtagctgaggagggttggcgtttagtggccctcgattatagccaaattgaattacgtgtccttgcccatctttctggcgatgagaacctcatccgcgtgtttcaggaaggcaaagacattcacactcaaacggcaagctggatgtttggagtgtcgtcggaagcgatcgatcctttgatgcgtcgtgcagcgaagaccatcaatttcggtgttctctacggtatgagtgcccaccgtttgtcgcaggaattaggcattccctatgaagaagctgcggcgttcattcagcgctactttcaaagctatcccaaagttaaagcatggatcgagaagactctcgaagaaggccgcacacgtggttacgtagagaccttatttggacgtcgccgctatgttcccgatttaaccgctcgcgtgaaatctgtccgtgaagccgccgaacgcatggcgttcaacatgcctgtacagggcacggcagctgacctcatgaaacttgcaatggtgcgcctttttccacaattgcgtgaagttggtgcccgcatgctcttgcaggtccacgatgaactcttgttagaagcgccaaaagagcgtgcggaagaggtggcagccctcgcgaaagaggttatggaaggcgtgtggcccttagcggtgcctcttgaagtcgaagttggtattggcgaggattggttggctgccaaaggataatga

SEQ ID NO: 742 - protein, 841 aa, synthetic construct
  REGION 1..841: note = Variant of DNA polymerase I from Thermus sp. strain 2.9
MHHHHHHGGSGMLPLFEPKGRVLLVDGHHLAYRNFFALKGLTTSRGEPVQGVYGFAKSLLKALKEDGDVVIVVFDAKAPSFRHEAYEAYKAGRAPTPEDFPRQLALMKELVDLLGLERLEVPGFEADDVLATLAKKAEREGYEVQILTADRDLFQLLSPRISVLHPEGHRITPEWLWEKYGLRPEQWVDFRALAGDPSDNIPGVKGIGEKTALKLLKEWGSLENLLKNLDQVKPESVREKILAHLEDLKLSRELSRVRTDLPLEVDFRGRREPDWEGLKAFLERLEFGSLLHEFGLLESPLPAEEAPWPPPEGAFLGYRLSRPEPMWAELLALAASAQGRVYRAEDPHGALRGLKEVRGLLAKDLAVVALREGLDLPPTDDPMLLAYLLDPSNTTPEGVARRYGGEWTEDAGERALLAERLHANLLGRLQGEERLLWLYEEVEKPLSRVLAHMEATGVKLDVAYLEALSLEVAAELRRLEEEVFRLAGHSFNLNSRDQLERVLFDELGLPPIGKTEKTGKRSTSAAVLEALREVHPIVDKILQYRELAKLKGTYIDPLPALVHPKTGRLHTRFNQTATATGRLSSSDPNLQNIPVRTPLGQKIRRAFVAEEGWRLVALDYSQIELRVLAHLSGDENLIRVFQEGKDIHTQTASWMFGVSSEAIDPLMRRAAKTINFGVLYGMSAHRLSQELGIPYEEAAAFIQRYFQSYPKVKAWIEKTLEEGRTRGYVETLFGRRRYVPDLTARVKSVREAAERMAFNMPVQGTAADLMKLAMVRLFPQLREVGARMLLQVHDELLLEAPKERAEEVAALAKEVMEGVWPLAVPLEVEVGIGEDWLAAKG

SEQ ID NO: 743 - DNA, 2529 bp, synthetic construct
  misc_feature 1..2529: note = Variant of DNA polymerase I from Thermus sp. strain 2.9
  source 1..2529: mol_type = other DNA
atgcaccatcatcatcatcatggcggtagcggcatgttaccgttgttcgaacctaaaggtcgcgtgcttctggttgatggccatcatctcgcgtatcgtaacttctttgccctgaaaggattaaccaccagccgtggcgagccggtacagggtgtctacggctttgcaaagtcgctcctgaaagctctgaaagaagacggtgatgtggtgattgttgtctttgatgcgaaagcgccaagttttcgccacgaagcgtacgaagcttacaaagccgggcgtgctccaacgccggaagactttcctcgccaattggcgcttatgaaggaattagtggatttgcttggcctcgaacgcttggaagttcccggtttcgaggcagacgacgtattagcgactctcgcaaagaaagccgaacgtgagggctatgaagtccagatcttgacagcagatcgcgatcttttccagcttttatctccgcgcatctcggtgttacacccggaagggcatcgtatcaccccggaatggctctgggagaaatatggtttgcgtcccgaacaatgggtggattttcgcgccttagccggcgatccgagcgacaatattccgggagttaaaggtatcggcgagaagacggcgctcaagctccttaaagaatgggggtcgttggagaacttgcttaagaatttagatcaggtcaaaccagagtcagtgcgtgagaagattcttgcacacctcgaagacctcaaattaagccgcgaattgtcccgtgtacgcaccgatttgccgctcgaagttgatttccgtggccgccgcgaacctgactgggagggtcttaaagcgtttttagagcgtcttgaatttggttcgctcttgcatgaattcggccttttagaaagcccgttaccagccgaagaagcaccttggccaccgcccgaaggcgcgtttttaggttaccgtttgagtcgcccggaaccgatgtgggccgaattattggctcttgcagcgtctgcccagggacgtgtgtatcgcgcggaagaccctcatggtgcgctccgcggcctcaaagaagtccgtggactccttgccaaagacttagctgttgttgcattgcgcgaaggtcttgatttacctccgactgatgatccaatgcttcttgcgtacctcttggacccgtcaaacacgacgcccgaaggcgtagcccgtcgttacggcggcgagtggaccgaagatgcaggcgagcgcgcgttattggccgaacgtttgcacgcaaatttattaggacgtttgcaaggcgaggaacgtctcctctggctttacgaagaagtggagaaaccattgagtcgcgtgctcgcgcatatggaagctaccggtgtcaaattagacgtggcgtatttggaggcactcagccttgaagttgctgccgaactgcgccgcttggaggaagaagtattccgtttagcaggccactcctttaaccttaattctcgcgatcagttagaacgtgtgttgttcgatgaacttggtctccctcctatcggcaagacagagaagaccggtaaacgtagcacttcagcggcggttttagaagctcttcgcgaagtccatcccattgtggacaagatcttgcagtaccgcgaactcgcgaaattgaaaggcacctatattgaccgtcttccggcattagtccacccgaaaacgggacgcctccatacccgcttcaaccaaacagccacggcgaccggtcgtttgtcctcctctgatccaaaccttcagaatattccagtacgtaccccattgggccagaagatccgccgcgcgtttgtagctgaggagggttggcgtttagtggccctcgattatagccaaattgaattacgtgtccttgcccatctttctggcgatgagaacctcatccgcgtgtttcaggaaggcaaagacattcacactcaaacggcaagctggatgtttggactgccggcggaagcgatcgatcctttgatgcgtcgtgcagcgaagaccatcaatttcggtgttctctacggtatgagtgcccaccgtttgtcgcaggaattaggcattccctatgaagaagctgcggcgttcattcagcgctactttcaaagctatcccaaagttaaagcatggatcgagaagactctcgaagaaggccgcacacgtggttacgtagagaccttatttggacgtcgccgctatgttcccgatttaaacgctcgcgtgaaatctgtccgtgaagccgccgaacgcatggcgttcaacatgcctgtacagggcacggcagctgacctcatgaaacttgcaatggtgcgcctttttccacaattgcgtgaagttggtgcccgcatgctcttgcaggtccacgatgaactcttgttagaagcgccaaaagagcgtgcggaagaggtggcagccctcgcgaaagaggttatggaaggcgtgtggcccttagcggtgcctcttgaagtcgaagttggtattggcgaggattggttggctgccaaaggataatga

SEQ ID NO: 744 - protein, 841 aa, synthetic construct
  REGION 1..841: note = Variant of DNA polymerase I from Thermus sp. strain 2.9
MHHHHHHGGSGMLPLFEPKGRVLLVDGHHLAYRNFFALKGLTTSRGEPVQGVYGFAKSLLKALKEDGDVVIVVFDAKAPSFRHEAYEAYKAGRAPTPEDFPRQLALMKELVDLLGLERLEVPGFEADDVLATLAKKAEREGYEVQILTADRDLFQLLSPRISVLHPEGHRITPEWLWEKYGLRPEQWVDFRALAGDPSDNIPGVKGIGEKTALKLLKEWGSLENLLKNLDQVKPESVREKILAHLEDLKLSRELSRVRTDLPLEVDFRGRREPDWEGLKAFLERLEFGSLLHEFGLLESPLPAEEAPWPPPEGAFLGYRLSRPEPMWAELLALAASAQGRVYRAEDPHGALRGLKEVRGLLAKDLAVVALREGLDLPPTDDPMLLAYLLDPSNTTPEGVARRYGGEWTEDAGERALLAERLHANLLGRLQGEERLLWLYEEVEKPLSRVLAHMEATGVKLDVAYLEALSLEVAAELRRLEEEVFRLAGHSFNLNSRDQLERVLFDELGLPPIGKTEKTGKRSTSAAVLEALREVHPIVDKILQYRELAKLKGTYIDRLPALVHPKTGRLHTRFNQTATATGRLSSSDPNLQNIPVRTPLGQKIRRAFVAEEGWRLVALDYSQIELRVLAHLSGDENLIRVFQEGKDIHTQTASWMFGLPAEAIDPLMRRAAKTINFGVLYGMSAHRLSQELGIPYEEAAAFIQRYFQSYPKVKAWIEKTLEEGRTRGYVETLFGRRRYVPDLNARVKSVREAAERMAFNMPVQGTAADLMKLAMVRLFPQLREVGARMLLQVHDELLLEAPKERAEEVAALAKEVMEGVWPLAVPLEVEVGIGEDWLAAKG

SEQ ID NO: 745 - DNA, 2529 bp, synthetic construct
  misc_feature 1..2529: note = Variant of DNA polymerase I from Thermus sp. strain 2.9
  source 1..2529: mol_type = other DNA
atgcaccatcatcatcatcatggcggtagcggcatgttaccgttgttcgaacctaaaggtcgcgtgcttctggttgatggccatcatctcgcgtatcgtaacttctttgccctgaaaggattaaccaccagccgtggcgagccggtacagggtgtctacggctttgcaaagtcgctcctgaaagctctgaaagaagacggtgatgtggtgattgttgtctttgatgcgaaagcgccaagttttcgccacgaagcgtacgaagcttacaaagccgggcgtgctccaacgccggaagactttcctcgccaattggcgcttatgaaggaattagtggatttgcttggcctcgaacgcttggaagttcccggtttcgaggcagacgacgtattagcgactctcgcaaagaaagccgaacgtgagggctatgaagtccagatcttgacagcagatcgcgatcttttccagcttttatctccgcgcatctcggtgttacacccggaagggcatctgatcaccccggaatggctctgggagaaatatggtttgcgtcccgaacaatgggtggattttcgcgccttagccggcgatccgagcgacaatattccgggagttaaaggtatcggcgagaagacggcgctcaagctccttaaagaatgggggtcgttggagaacttgcttaagaatttagatcaggtcaaaccagagtcagtgcgtgagaagattcttgcacacctcgaagacctcaaattaagccgcgaattgtcccgtgtacgcaccgatttgccgctcgaagttgatttccgtggccgccgcgaacctgactgggagggtcttaaagcgtttttagagcgtcttgaatttggttcgctcttgcatgaattcggccttttagaaagcccgttaccagccgaagaagcaccttggccaccgcccgaaggcgcgtttttaggttaccgtttgagtcgcccggaaccgatgtgggccgaattattggctcttgcagcgtctgcccagggacgtgtgtatcgcgcggaagaccctcatggtgcgctccgcggcctcaaagaagtccgtggactccttgccaaagacttagctgttgttgcattgcgcgaaggtcttgatttacctccgactgatgatccaatgcttcttgcgtacctcttggacccgtcaaacacgacgcccgaaggcgtagcccgtcgttacggcggcgagtggaccgaagatgcaggcgagcgcgcgttattggccgaacgtttgcacgccaatttattaggacgtttgcaaggcgaggaacgtctcctctggctttacgaagaagtggagaaaccattgagtcgcgtgctcgctcatatggaagctaccggtgtcaaattagacgtggcgtatttggaggcactcagccttgaagttgctgccgaactgcgccgcttggaggaagaagtattccgtttagcaggccactcctttaaccttaattctcgcgatcagttagaacgtgtgttgttcgatgaacttggtctccctcctatcggcaagacagagaagaccggtaaacgtagcacttcagcggcggttttagaagctcttcgcgaagtccatcccattgtggacaagatcttgcagtaccgcgaactcgcgaaattgaaaggcacctatattgaccgtcttccggcattagtccacccgaaaacgggacgcctccatacccgcttcaaccaaacagccacggcgaccggtcgtttgtcctcctctgatccaaaccttcagaatattccagtacgtaccccattgggccagaagatccgccgcgcgtttgtagctgaggagggttggcgtttagtggccctcgattatagccaaattgaattacgtgtccttgcccatctttctggcgatgagaacctcatccgcgtgtttcaggaaggcaaagacattcacactcaaacggcaagctggatgtttggactgtcggcggaagcgatcgatcctttgatgcgtcgtgcagcgaagaccatcaatttcggtgttctctacggtatgagtgcccatcgtttgtcgcaggaattaggcattccctatgaagaagctgcggcgttcattcagcgctactttcaaagctatcccaaagttaaagcatggatcgagaagactctcgaagaaggccgcacacgtggttacgtagagaccttatttggacgtcgccgctatgttcccgatttaaccgctcgcgtgaaatctgtccgtgaagccgccgaacgcatggcgttcaacatgcctgtacagggcacggcagctgacctcatgaaacttgcaatggtgcgcctttttccacaattgcgtgaagttggtgcccgcatgctcttgcaggtccacgatgaactcttgttagaagcgccaaaagagcgtgcggaagaggtggcagccctcgcgaaagaggttatggaaggcgtgtggcccttagcggtgcctcttgaagtcgaagttggtattggcgaggattggttggctgccaaaggataatga

SEQ ID NO: 746 - protein, 841 aa, synthetic construct
  REGION 1..841: note = Variant of DNA polymerase I from Thermus sp. strain 2.9
MHHHHHHGGSGMLPLFEPKGRVLLVDGHHLAYRNFFALKGLTTSRGEPVQGVYGFAKSLLKALKEDGDVVIVVFDAKAPSFRHEAYEAYKAGRAPTPEDFPRQLALMKELVDLLGLERLEVPGFEADDVLATLAKKAEREGYEVQILTADRDLFQLLSPRISVLHPEGHLITPEWLWEKYGLRPEQWVDFRALAGDPSDNIPGVKGIGEKTALKLLKEWGSLENLLKNLDQVKPESVREKILAHLEDLKLSRELSRVRTDLPLEVDFRGRREPDWEGLKAFLERLEFGSLLHEFGLLESPLPAEEAPWPPPEGAFLGYRLSRPEPMWAELLALAASAQGRVYRAEDPHGALRGLKEVRGLLAKDLAVVALREGLDLPPTDDPMLLAYLLDPSNTTPEGVARRYGGEWTEDAGERALLAERLHANLLGRLQGEERLLWLYEEVEKPLSRVLAHMEATGVKLDVAYLEALSLEVAAELRRLEEEVFRLAGHSFNLNSRDQLERVLFDELGLPPIGKTEKTGKRSTSAAVLEALREVHPIVDKILQYRELAKLKGTYIDRLPALVHPKTGRLHTRFNQTATATGRLSSSDPNLQNIPVRTPLGQKIRRAFVAEEGWRLVALDYSQIELRVLAHLSGDENLIRVFQEGKDIHTQTASWMFGLSAEAIDPLMRRAAKTINFGVLYGMSAHRLSQELGIPYEEAAAFIQRYFQSYPKVKAWIEKTLEEGRTRGYVETLFGRRRYVPDLTARVKSVREAAERMAFNMPVQGTAADLMKLAMVRLFPQLREVGARMLLQVHDELLLEAPKERAEEVAALAKEVMEGVWPLAVPLEVEVGIGEDWLAAKG

SEQ ID NO: 747 - DNA, 2529 bp, synthetic construct
  misc_feature 1..2529: note = Variant of DNA polymerase I from Thermus sp. strain 2.9
  source 1..2529: mol_type = other DNA
atgcaccatcatcatcatcatggcggtagcggcatgttaccgttgttcgaacctaaaggtcgcgtgcttctggttgatggccatcatctcgcgtatcgtaacttctttgccctgaaaggattaaccaccagccgtggcgagccggtacagggtgtctacggctttgcaaagtcgctcctgaaagctctgaaagaagacggtgatgtggtgattgttgtctttgatgcgaaagcgccaagttttcgccacgaagcgtacgaagcttacaaagccgggcgtgctccaacgccggaagactttcctcgccaattggcgcttatgaaggaattagtggatttgcttggcctcgaacgcttggaagttcccggtttcgaggcagacgacgtattagcgactctcgcaaagaaagccgaacgtgagggctatgaagtccagatcttgacagcagatcgcgatcttttccagcttttatctccgcgcatctcggtgttacacccggaagggcatctgatcaccccggaatggctctgggagaaatatggtttgcgtcccgaacaatgggtggattttcgcgccttagcaggcgatccgagcgacaatattccgggagttaaaggtatcggcgagaagacggcgctcaagctccttaaagaatgggggtcgttggagaacttgcttaagaatttagatcaggtcaaaccagagtcagtgcgtgagaagattcttgcacacctcgaagacctcaaattaagccgcgaattgtcccgtgtacgcaccgatttgccgctcgaagttgatttccgtggccgccgcgaacctgactgggagggtcttaaagcgtttttagagcgtcttgaatttggttcgctcttgcatgaattcggccttttagaaagcccgttaccagccgaagaagcaccttggccaccgcccgaaggcgcgtttttaggttaccgtttgagtcgcccggaaccgatgtgggccgaattattggctcttgcagcgtctgcccagggacgtgtgtatcgcgcggaagaccctcatggtgcgctccgcggcctcaaagaagtccgtggactccttgccaaagacttagctgttgttgcattgcgcgaaggtcttgatttacctccgactgatgatccaatgcttcttgcgtacctcttggacccgtcaaacacgacgcccgaaggcgtagcccgtcgttacggcggcgagtggaccgaagatgcaggcgagcgcgcgttattggccgaacgtttgcaccagaatttattaggacgtttgcaaggcgaggaacgtctcctctggctttacgaagaagtggagaaaccattgagtcgcgtgctcgctcatatggaagctaccggtgtcaaattagacgtggcgtatttggaggcactcagccttgaagttgctgccgaaatgcgccgcttggaggaagaagtattccgtttagcaggccactcctttaaccttaattctcgcgatcagttagaacgtgtgttgttcgatgaacttggtctccctcctatcggcaagacagagaagaccggtaaacgtagcacttcagcggcggttttagaagctcttcgcgaagtccatcccattgtggacaagatcttgcagtaccgcgaactcgcgaaattgaaaggcacctatattgaccgtcttccggcattagtccacccgaaaacgggacgcctccatacccgcttcaaccaaacagccacggcgaccggtcgtttgtcctcctctgatccaaaccttcagaatattccagtacgtaccccattgggccagaagatccgccgcgcgtttgtagctgaggagggttggcgtttagtggccctcgattatagccaaattgaattacgtgtccttgcccatctttctggcgatgagaacctcatccgcgtgtttcaggaaggcaaagacattcacactcaaacggcaagctggatgtttggagtgtcggcggaagcgatcgatcctttgatgcgtcgtgcagcgaagaccatcaatttcggtgttctctacggtatgagtgcccatcgtttgtcgcaggaattaggcattccctatgaagaagctgcggcgttcattcagcgctactttcaaagctatcccaaagttaaagcatggatcgagaagactctcgaagaaggccgcacacgtggttacgtagagaccttatttggacgtcgccgctatgttcccgatttaaccgctcgcgtgaaatctgtccgtgaagccgccgaacgcatggcgttcaacatgcctgtacagggcacggcagctgacctcatgaaacttgcaatggtgcgcctttttccacaattgcgtgaagttggtgcccgcatgctcttgcaggtccacgatgaactcttgttagaagcgccaaaagagcgtgcggaagaggtggcagccctcgcgaaagaggttatggaaggcgtgtggcccttagcggtgcctcttgaagtcgaagttggtattggcgaggattggttggctgccaaaggataatga

SEQ ID NO: 748 - protein, 841 aa, synthetic construct
  REGION 1..841: note = Variant of DNA polymerase I from Thermus sp. strain 2.9
MHHHHHHGGSGMLPLFEPKGRVLLVDGHHLAYRNFFALKGLTTSRGEPVQGVYGFAKSLLKALKEDGDVVIVVFDAKAPSFRHEAYEAYKAGRAPTPEDFPRQLALMKELVDLLGLERLEVPGFEADDVLATLAKKAEREGYEVQILTADRDLFQLLSPRISVLHPEGHLITPEWLWEKYGLRPEQWVDFRALAGDPSDNIPGVKGIGEKTALKLLKEWGSLENLLKNLDQVKPESVREKILAHLEDLKLSRELSRVRTDLPLEVDFRGRREPDWEGLKAFLERLEFGSLLHEFGLLESPLPAEEAPWPPPEGAFLGYRLSRPEPMWAELLALAASAQGRVYRAEDPHGALRGLKEVRGLLAKDLAVVALREGLDLPPTDDPMLLAYLLDPSNTTPEGVARRYGGEWTEDAGERALLAERLHQNLLGRLQGEERLLWLYEEVEKPLSRVLAHMEATGVKLDVAYLEALSLEVAAEMRRLEEEVFRLAGHSFNLNSRDQLERVLFDELGLPPIGKTEKTGKRSTSAAVLEALREVHPIVDKILQYRELAKLKGTYIDRLPALVHPKTGRLHTRFNQTATATGRLSSSDPNLQNIPVRTPLGQKIRRAFVAEEGWRLVALDYSQIELRVLAHLSGDENLIRVFQEGKDIHTQTASWMFGVSAEAIDPLMRRAAKTINFGVLYGMSAHRLSQELGIPYEEAAAFIQRYFQSYPKVKAWIEKTLEEGRTRGYVETLFGRRRYVPDLTARVKSVREAAERMAFNMPVQGTAADLMKLAMVRLFPQLREVGARMLLQVHDELLLEAPKERAEEVAALAKEVMEGVWPLAVPLEVEVGIGEDWLAAKG

SEQ ID NO: 749 - DNA, 2529 bp, synthetic construct
  misc_feature 1..2529: note = Variant of DNA polymerase I from Thermus sp. strain 2.9
  source 1..2529: mol_type = other DNA
atgcaccatcatcatcatcatggcggtagcggcatgttaccgttgttcgaacctaaaggtcgcgtgcttctggttgatggccatcatctcgcgtatcgtaacttctttgccctgaaaggattaaccaccagccgtggcgagccggtacagggtgtctacggctttgcaaagtcgctcctgaaagctctgaaagaagacggtgatgtggtgattgttgtctttgatgcgaaagcgccaagttttcgccacgaagcgtacgaagcttacaaagccgggcgtgctccaacgccggaagactttcctcgccaattggcgcttatgaaggaattagtggatttgcttggcctcgaacgcttggaagttcccggtttcgaggcagacgacgtattagcgactctcgcaaagaaagccgaacgtgagggctatgaagtccagatcttgacagcagatcgcgatcttttccagcttttatctccgcgcatctcggtgttacacccggaagggcatctgatcaccccggaatggctctgggagaaatatggtttgcgtcccgaacaatgggtggattttcgcgccttagccggcgatccgagcgacaatattccgggagttaaaggtatcggcgagaagacggcgctcaagctccttaaagaatgggggtcgttggagaacttgcttaagaatttagatcaggtcaaaccagagtcagtgcgtgagaagattcttgcacacctcgaagacctcaaattaagccgcgaattgtcccgtgtacgcaccgatttgccgctcgaagttgatttccgtggccgccgcgaacctgactgggagggtcttaaagcgtttttagagcgtcttgaatttggttcgctcttgcatgaattcggccttttagaaagcccgttaccagccgaagaagcaccttggccaccgcccgaaggcgcgtttttaggttaccgtttgagtcgcccggaaccgatgtgggccgaattattggctcttgcagcgtctgcccagggacgtgtgtatcgcgcggaagaccctcatggtgcgctccgcggcctcaaagaagtccgtggactccttgccaaagacttagctgttgttgcattgcgcgaaggtcttgatttacctccgactgatgatccaatgcttcttgcgtacctcttggacccgtcaaacacgacgcccgaaggcgtagcccgtcgttacggcggcgagtggaccgaagatgcaggcgagcgcgcgttattggccgaacgtttgcaccagaatttattaggacgtttgcaaggcgaggaacgtctcctctggctttacgaagaagtggagaaaccattgagtcgcgtgctcgcgcatatggaagctaccggtgtcaaattagacgtggcgtatttggaggcactcagccttgaagttgctgccgaactgcgccgcttggaggaagaagtattccgtttagcaggccactcctttaaccttaattctcgcgatcagttagaacgtgtgttgttcgatgaacttggtctccctcctatcggcaagacagagaagaccggtaaacgtagcacttcagcggcggttttagaagctcttcgcgaagtccatcccattgtggacaagatcttgcagtaccgcgaactcgcgaaattgaaaggcacctatattgaccctcttccggcattagtccacccgaaaacgggacgcctccatacccgcttcaaccaaacagccacggcgaccggtcgtttgtcctcctctgatccaaaccttcagaatattccagtacgtaccccattgggccagaagatccgccgcgcgtttgtagctgaggagggttggcgtttagtggccctcgattatagccaaattgaattacgtgtccttgcccatctttctggcgatgagaacctcatccgcgtgtttcaggaaggcaaagacattcacactcaaacggcaagctggatgtttggattatcagctgaagcgatcgatcctttgatgcgtcgtgcagcgaagaccatcaatttcggtgttctctacggtatgagtgcccatcgtttgtcgcaggaattaggcattccctatgaagaagctgcggcgttcattcagcgctactttcaaagctatcccaaagttaaagcatggatcgagaagactctcgaagaaggccgcacacgtggttacgtagagaccttatttggacgtcgccgctatgttcccgatttaaacgctcgcgtgaaatctgtccgtgaagccgccgaacgcatggcgttcaacatgcctgtacagggcacggcagctgacctcatgaaacttgcaatggtgcgcctttttccacaattgcgtgaagttggtgcccgcatgctcttgcaggtccacgatgaactcttgttagaagcgccaaaagagcgtgcggaagaggtggcagccctcgcgaaagaggttatggaaggcgtgtggcccttagcggtgcctcttgaagtcgaagttggtattggcgaggattggttggctgccaaaggataatga

SEQ ID NO: 750 - protein, 841 aa, synthetic construct
  REGION 1..841: note = Variant of DNA polymerase I from Thermus sp. strain 2.9
MHHHHHHGGSGMLPLFEPKGRVLLVDGHHLAYRNFFALKGLTTSRGEPVQGVYGFAKSLLKALKEDGDVVIVVFDAKAPSFRHEAYEAYKAGRAPTPEDFPRQLALMKELVDLLGLERLEVPGFEADDVLATLAKKAEREGYEVQILTADRDLFQLLSPRISVLHPEGHLITPEWLWEKYGLRPEQWVDFRALAGDPSDNIPGVKGIGEKTALKLLKEWGSLENLLKNLDQVKPESVREKILAHLEDLKLSRELSRVRTDLPLEVDFRGRREPDWEGLKAFLERLEFGSLLHEFGLLESPLPAEEAPWPPPEGAFLGYRLSRPEPMWAELLALAASAQGRVYRAEDPHGALRGLKEVRGLLAKDLAVVALREGLDLPPTDDPMLLAYLLDPSNTTPEGVARRYGGEWTEDAGERALLAERLHQNLLGRLQGEERLLWLYEEVEKPLSRVLAHMEATGVKLDVAYLEALSLEVAAELRRLEEEVFRLAGHSFNLNSRDQLERVLFDELGLPPIGKTEKTGKRSTSAAVLEALREVHPIVDKILQYRELAKLKGTYIDPLPALVHPKTGRLHTRFNQTATATGRLSSSDPNLQNIPVRTPLGQKIRRAFVAEEGWRLVALDYSQIELRVLAHLSGDENLIRVFQEGKDIHTQTASWMFGLSAEAIDPLMRRAAKTINFGVLYGMSAHRLSQELGIPYEEAAAFIQRYFQSYPKVKAWIEKTLEEGRTRGYVETLFGRRRYVPDLNARVKSVREAAERMAFNMPVQGTAADLMKLAMVRLFPQLREVGARMLLQVHDELLLEAPKERAEEVAALAKEVMEGVWPLAVPLEVEVGIGEDWLAAKG

SEQ ID NO: 751 - DNA, 2529 bp, synthetic construct
  misc_feature 1..2529: note = Variant of DNA polymerase I from Thermus sp. strain 2.9
  source 1..2529: mol_type = other DNA
atgcaccatcatcatcatcatggcggtagcggcatgttaccgttgttcgaacctaaaggtcgcgtgcttctggttgatggccatcatctcgcgtatcgtaacttctttgccctgaaaggattaaccaccagccgtggcgagccggtacagggtgtctacggctttgcaaagtcgctcctgaaagctctgaaagaagacggtgatgtggtgattgttgtctttgatgcgaaagcgccaagttttcgccacgaagcgtacgaagcttacaaagccgggcgtgctccaacgccggaagactttcctcgccaattggcgcttatgaaggaattagtggatttgcttggcctcgaacgcttggaagttcccggtttcgaggcagacgacgtattagcgactctcgcaaagaaagccgaacgtgagggctatgaagtccagatcttgacagcagatcgcgatcttttccagcttttatctccgcgcatctcggtgttacacccggaagggcatctgatcaccccggaatggctctgggagaaatatggtttgcgtcccgaacaatgggtggattttcgcgccttagtcggcgatccgagcgacaatattccgggagttaaaggtatcggcgagaagacggcgctcaagctccttaaagaatgggggtcgttggagaacttgcttaagaatttagatcaggtcaaaccagagtcagtgcgtgagaagattcttgcacacctcgaagacctcaaattaagccgcgaattgtcccgtgtacgcaccgatttgccgctcgaagttgatttccgtggccgccgcgaacctgactgggagggtcttaaagcgtttttagagcgtcttgaatttggttcgctcttgcatgaattcggccttttagaaagcccgttaccagccgaagaagcaccttggccaccgcccgaaggcgcgtttttaggttaccgtttgagtcgcccggaaccgatgtgggccgaattattggctcttgcagcgtctgcccagggacgtgtgtatcgcgcggaagaccctcatggtgcgctccgcggcctcaaagaagtccgtggactccttgccaaagacttagctgttgttgcattgcgcgaaggtcttgatttacctccgactgatgatccaatgcttcttgcgtacctcttggacccgtcaaacacgacgcccgaaggcgtagcccgtcgttacggcggcgagtggaccgaagatgcaggcgagcgcgcgttattggccgaacgtttgcacgcaaatttattaggacgtttgcaaggcgaggaacgtctcctctggctttacgaagaagtggagaaaccattgagtcgcgtgctcgctcatatggaagctaccggtgtcaaattagacgtggcgtatttggaggcactcagccttgaagttgctgccgaaatgcgccgcttggaggaagaagtattccgtttagcaggccactcctttaaccttaattctcgcgatcagttagaacgtgtgttgttcgatgaacttggtctccctcctatcggcaagacagagaagaccggtaaacgtagcacttcagcggcggttttagaagctcttcgcgaagtccatcccattgtggacaagatcttgcagtaccgcgaactcgcgaaattgaaaggcacctatattgaccctcttccggcattagtccacccgaaaacgggacgcctccatacccgcttcaaccaaacagccacggcgaccggtcgtttgtcctcctctgatccaaaccttcagaatattccagtacgtaccccattgggccagaagatccgccgcgcgtttgtagctgaggagggttggcgtttagtggccctcgattatagccaaattgaattacgtgtccttgcccatctttctggcgatgagaacctcatccgcgtgtttcaggaaggcaaagacattcacactcaaacggcaagctggatgtttggagtgccgtcggaagcgatcgatcctttgatgcgtcgtgcagcgaagaccatcaatttcggtgttctctacggtatgagtgccgctcgtttgtcgcaggaattaggcattccctatgaagaagctgcggcgttcattcagcgctactttcaaagctatcccaaagttaaagcatggatcgagaagactctcgaagaaggccgcacacgtggttacgtagagaccttatttggacgtcgccgctatgttcccgatttaaccgctcgcgtgaaatctgtccgtgaagccgccgaacgcatggcgttcaacatgcctgtacagggcacggcagctgacctcatgaaacttgcaatggtgcgcctttttccacaattgcgtgaagttggtgcccgcatgctcttgcaggtccacgatgaactcttgttagaagcgccaaaagagcgtgcggaagaggtggcagccctcgcgaaagaggttatggaaggcgtgtggcccttagcggtgcctcttgaagtcgaagttggtattggcgaggattggttggctgccaaaggataatga

SEQ ID NO: 752 - protein, 841 aa, synthetic construct
  REGION 1..841: note = Variant of DNA polymerase I from Thermus sp. strain 2.9
MHHHHHHGGSGMLPLFEPKGRVLLVDGHHLAYRNFFALKGLTTSRGEPVQGVYGFAKSLLKALKEDGDVVIVVFDAKAPSFRHEAYEAYKAGRAPTPEDFPRQLALMKELVDLLGLERLEVPGFEADDVLATLAKKAEREGYEVQILTADRDLFQLLSPRISVLHPEGHLITPEWLWEKYGLRPEQWVDFRALVGDPSDNIPGVKGIGEKTALKLLKEWGSLENLLKNLDQVKPESVREKILAHLEDLKLSRELSRVRTDLPLEVDFRGRREPDWEGLKAFLERLEFGSLLHEFGLLESPLPAEEAPWPPPEGAFLGYRLSRPEPMWAELLALAASAQGRVYRAEDPHGALRGLKEVRGLLAKDLAVVALREGLDLPPTDDPMLLAYLLDPSNTTPEGVARRYGGEWTEDAGERALLAERLHANLLGRLQGEERLLWLYEEVEKPLSRVLAHMEATGVKLDVAYLEALSLEVAAEMRRLEEEVFRLAGHSFNLNSRDQLERVLFDELGLPPIGKTEKTGKRSTSAAVLEALREVHPIVDKILQYRELAKLKGTYIDPLPALVHPKTGRLHTRFNQTATATGRLSSSDPNLQNIPVRTPLGQKIRRAFVAEEGWRLVALDYSQIELRVLAHLSGDENLIRVFQEGKDIHTQTASWMFGVPSEAIDPLMRRAAKTINFGVLYGMSAARLSQELGIPYEEAAAFIQRYFQSYPKVKAWIEKTLEEGRTRGYVETLFGRRRYVPDLTARVKSVREAAERMAFNMPVQGTAADLMKLAMVRLFPQLREVGARMLLQVHDELLLEAPKERAEEVAALAKEVMEGVWPLAVPLEVEVGIGEDWLAAKG

SEQ ID NO: 753 - DNA, 2529 bp, synthetic construct
  misc_feature 1..2529: note = Variant of DNA polymerase I from Thermus sp. strain 2.9
  source 1..2529: mol_type = other DNA
atgcaccatcatcatcatcatggcggtagcggcatgttaccgttgttcgaacctaaaggtcgcgtgcttctggttgatggccatcatctcgcgtatcgtaacttctttgccctgaaaggattaaccaccagccgtggcgagccggtacagggtgtctacggctttgcaaagtcgctcctgaaagctctgaaagaagacggtgatgtggtgattgttgtctttgatgcgaaagcgccaagttttcgccacgaagcgtacgaagcttacaaagccgggcgtgctccaacgccggaagactttcctcgccaattggcgcttatgaaggaattagtggatttgcttggcctcgaacgcttggaagttcccggtttcgaggcagacgacgtattagcgactctcgcaaagaaagccgaacgtgagggctatgaagtccagatcttgacagcagatcgcgatcttttccagcttttatctccgcgcatctcggtgttacacccggaagggcatctgatcaccccggaatggctctgggagaaatatggtttgcgtcccgaacaatgggtggattttcgcgccttagcaggcgatccgagcgacaatattccgggagttaaaggtatcggcgagaagacggcgctcaagctccttaaagaatgggggtcgttggagaacttgcttaagaatttagatcaggtcaaaccagagtcagtgcgtgagaagattcttgcacacctcgaagacctcaaattaagccgcgaattgtcccgtgtacgcaccgatttgccgctcgaagttgatttccgtggccgccgcgaacctgactgggagggtcttaaagcgtttttagagcgtcttgaatttggttcgctcttgcatgaattcggccttttagaaagcccgttaccagccgaagaagcaccttggccaccgcccgaaggcgcgtttttaggttaccgtttgagtcgcccggaaccgatgtgggccgaattattggctcttgcagcgtctgcccagggacgtgtgtatcgcgcggaagaccctcatggtgcgctccgcggcctcaaagaagtccgtggactccttgccaaagacttagctgttgttgcattgcgcgaaggtcttgatttacctccgactgatgatccaatgcttcttgcgtacctcttggacccgtcaaacacgacgcccgaaggcgtagcccgtcgttacggtggcgagtggaccgaagatgcaggcgagcgcgcgttattggccgaacgtttgcaccagaatttattaggacgtttgcaaggcgaggaacgtctcctctggctttacgaagaagtggagaaaccattgagtcgcgtgctcgcgcatatggaagctaccggtgtcaaattagacgtggcgtatttggaggcactcagccttgaagttgctgccgaaatgcgccgcttggaggaagaagtattccgtttagcaggccactcctttaaccttaattctcgcgatcagttagaacgtgtgttgttcgatgaacttggtctccctcctatcggcaagacagagaagaccggtaaacgtagcacttcagcggcggttttagaagctcttcgcgaagtccatcccattgtggacaagatcttgcagtaccgcgaactcgcgaaattgaaaggcacctatattgaccctcttccggcattagtccacccgaaaacgggacgcctccatacccgcttcaaccaaacagccacggcgaccggtcgtttgtcctcctctgatccaaaccttcagaatattccagtacgtaccccattgggccagaagatccgccgcgcgtttgtagctgaggagggttggcgtttagtggccctcgattatagccaaattgaattacgtgtccttgcccatctttctggcgatgagaacctcatccgcgtgtttcaggaaggcaaagacattcacactcaaacggcaagctggatgtttggattatcagctgaagcgatcgatcctttgatgcgtcgtgcagcgaagaccatcaatttcggtgttctctacggtatgagtgcccaccgtttgtcgcaggaattaggcattccctatgaagaagctgcggcgttcattcagcgctactttcaaagctatcccaaagttaaagcatggatcgagaagactctcgaagaaggccgcacacgtggttacgtagagaccttatttggacgtcgccgctatgttcccgatttaaacgctcgcgtgaaatctgtccgtgaagccgccgaacgcatggcgttcaacatgcctgtacagggcacggcagctgacctcatgaaacttgcaatggtgcgcctttttccacaattgcgtgaagttggtgcccgcatgctcttgcaggtccacgatgaactcttgttagaagcgccaaaagagcgtgcggaagaggtggcagccctcgcgaaagaggttatggaaggcgtgtggcccttagcggtgcctcttgaagtcgaagttggtattggcgaggattggttggctgccaaaggataatga

SEQ ID NO: 754 - protein, 841 aa, synthetic construct
  REGION 1..841: note = Variant of DNA polymerase I from Thermus sp. strain 2.9
MHHHHHHGGSGMLPLFEPKGRVLLVDGHHLAYRNFFALKGLTTSRGEPVQGVYGFAKSLLKALKEDGDVVIVVFDAKAPSFRHEAYEAYKAGRAPTPEDFPRQLALMKELVDLLGLERLEVPGFEADDVLATLAKKAEREGYEVQILTADRDLFQLLSPRISVLHPEGHLITPEWLWEKYGLRPEQWVDFRALAGDPSDNIPGVKGIGEKTALKLLKEWGSLENLLKNLDQVKPESVREKILAHLEDLKLSRELSRVRTDLPLEVDFRGRREPDWEGLKAFLERLEFGSLLHEFGLLESPLPAEEAPWPPPEGAFLGYRLSRPEPMWAELLALAASAQGRVYRAEDPHGALRGLKEVRGLLAKDLAVVALREGLDLPPTDDPMLLAYLLDPSNTTPEGVARRYGGEWTEDAGERALLAERLHQNLLGRLQGEERLLWLYEEVEKPLSRVLAHMEATGVKLDVAYLEALSLEVAAEMRRLEEEVFRLAGHSFNLNSRDQLERVLFDELGLPPIGKTEKTGKRSTSAAVLEALREVHPIVDKILQYRELAKLKGTYIDPLPALVHPKTGRLHTRFNQTATATGRLSSSDPNLQNIPVRTPLGQKIRRAFVAEEGWRLVALDYSQIELRVLAHLSGDENLIRVFQEGKDIHTQTASWMFGLSAEAIDPLMRRAAKTINFGVLYGMSAHRLSQELGIPYEEAAAFIQRYFQSYPKVKAWIEKTLEEGRTRGYVETLFGRRRYVPDLNARVKSVREAAERMAFNMPVQGTAADLMKLAMVRLFPQLREVGARMLLQVHDELLLEAPKERAEEVAALAKEVMEGVWPLAVPLEVEVGIGEDWLAAKG

SEQ ID NO: 755 - DNA, 2529 bp, synthetic construct
  misc_feature 1..2529: note = Variant of DNA polymerase I from Thermus sp. strain 2.9
  source 1..2529: mol_type = other DNA
atgcaccatcatcatcatcatggcggtagcggcatgttaccgttgttcgaacctaaaggtcgcgtgcttctggttgatggccatcatctcgcgtatcgtaacttctttgccctgaaaggattaaccaccagccgtggcgagccggtacagggtgtctacggctttgcaaagtcgctcctgaaagctctgaaagaagacggtgatgtggtgattgttgtctttgatgcgaaagcgccaagttttcgccacgaagcgtacgaagcttacaaagccgggcgtgctccaacgccggaagactttcctcgccaattggcgcttatgaaggaattagtggatttgcttggcctcgaacgcttggaagttcccggtttcgaggcagacgacgtattagcgactctcgcaaagaaagccgaacgtgagggctatgaagtccagatcttgacagcagatcgcgatcttttccagcttttatctccgcgcatctcggtgttacacccggaagggcatcgtatcaccccggaatggctctgggagaaatatggtttgcgtcccgaacaatgggtggattttcgcgccttagcaggcgatccgagcgacaatattccgggagttaaaggtatcggcgagaagacggcgctcaagctccttaaagaatgggggtcgttggagaacttgcttaagaatttagatcaggtcaaaccagagtcagtgcgtgagaagattcttgcacacctcgaagacctcaaattaagccgcgaattgtcccgtgtacgcaccgatttgccgctcgaagttgatttccgtggccgccgcgaacctgactgggagggtcttaaagcgtttttagagcgtcttgaatttggttcgctcttgcatgaattcggccttttagaaagcccgttaccagccgaagaagcaccttggccaccgcccgaaggcgcgtttttaggttaccgtttgagtcgcccggaaccgatgtgggccgaattattggctcttgcagcgtctgcccagggacgtgtgtatcgcgcggaagaccctcatggtgcgctccgcggcctcaaagaagtccgtggactccttgccaaagacttagctgttgttgcattgcgcgaaggtcttgatttacctccgactgatgatccaatgcttcttgcgtacctcttggacccgtcaaacacgacgcccgaaggcgtagcccgtcgttacggcggcgagtggaccgaagatgcaggcgagcgcgcgttattggccgaacgtttgcacgccaatttattaggacgtttgcaaggcgaggaacgtctcctctggctttacgaagaagtggagaaaccattgagtcgcgtgctcgctcatatggaagctaccggtgtcaaattagacgtggcgtatttggaggcactcagccttgaagttgctgccgaaatgcgccgcttggaggaagaagtattccgtttagcaggccaatcctttaaccttaattctcgcgatcagttagaacgtgtgttgttcgatgaacttggtctccctcctatcggcaagacagagaagaccggtaaacgtagcacttcagcggcggttttagaagctcttcgcgaagtccatcccattgtggacaagatcttgcagtaccgcgaactcgcgaaattgaaaggcacctatattgaccgtcttccggcattagtccacccgaaaacgggacgcctccatacccgcttcaaccaaacagccacggcgaccggtcgtttgtcctcctctgatccaaaccttcagaatattccagtacgtaccccattgggccagaagatccgccgcgcgtttgtagctgaggagggttggcgtttagtggccctcgattatagccaaattgaattacgtgtccttgcccatctttctggcgatgagaacctcatccgcgtgtttcaggaaggcaaagacattcacactcaaacggcaagctggatgtttggattatcagctgaagcgatcgatcctttgatgcgtcgtgcagcgaagaccatcaatttcggtgttctctacggtatgagtgcccatcgtttgtcgcaggaattaggcattccctatgaagaagctgcggcgttcattcagcgctactttcaaagctatcccaaagttaaagcatggatcgagaagactctcgaagaaggccgcacacgtggttacgtagagaccttatttggacgtcgccgctatgttcccgatttaaccgctcgcgtgaaatctgtccgtgaagccgccgaacgcatggcgttcaacatgcctgtacagggcacggcagctgacctcatgaaacttgcaatggtgcgcctttttccacaattgcgtgaagttggtgcccgcatgctcttgcaggtccacgatgaactcttgttagaagcgccaaaagagcgtgcggaagaggtggcagccctcgcgaaagaggttatggaaggcgtgtggcccttagcggtgcctcttgaagtcgaagttggtattggcgaggattggttggctgccaaaggataatga

SEQ ID NO: 756 - protein, 841 aa, synthetic construct
  REGION 1..841: note = Variant of DNA polymerase I from Thermus sp. strain 2.9
MHHHHHHGGSGMLPLFEPKGRVLLVDGHHLAYRNFFALKGLTTSRGEPVQGVYGFAKSLLKALKEDGDVVIVVFDAKAPSFRHEAYEAYKAGRAPTPEDFPRQLALMKELVDLLGLERLEVPGFEADDVLATLAKKAEREGYEVQILTADRDLFQLLSPRISVLHPEGHRITPEWLWEKYGLRPEQWVDFRALAGDPSDNIPGVKGIGEKTALKLLKEWGSLENLLKNLDQVKPESVREKILAHLEDLKLSRELSRVRTDLPLEVDFRGRREPDWEGLKAFLERLEFGSLLHEFGLLESPLPAEEAPWPPPEGAFLGYRLSRPEPMWAELLALAASAQGRVYRAEDPHGALRGLKEVRGLLAKDLAVVALREGLDLPPTDDPMLLAYLLDPSNTTPEGVARRYGGEWTEDAGERALLAERLHANLLGRLQGEERLLWLYEEVEKPLSRVLAHMEATGVKLDVAYLEALSLEVAAEMRRLEEEVFRLAGQSFNLNSRDQLERVLFDELGLPPIGKTEKTGKRSTSAAVLEALREVHPIVDKILQYRELAKLKGTYIDRLPALVHPKTGRLHTRFNQTATATGRLSSSDPNLQNIPVRTPLGQKIRRAFVAEEGWRLVALDYSQIELRVLAHLSGDENLIRVFQEGKDIHTQTASWMFGLSAEAIDPLMRRAAKTINFGVLYGMSAHRLSQELGIPYEEAAAFIQRYFQSYPKVKAWIEKTLEEGRTRGYVETLFGRRRYVPDLTARVKSVREAAERMAFNMPVQGTAADLMKLAMVRLFPQLREVGARMLLQVHDELLLEAPKERAEEVAALAKEVMEGVWPLAVPLEVEVGIGEDWLAAKG

SEQ ID NO: 757 - DNA, 2529 bp, synthetic construct
  misc_feature 1..2529: note = Variant of DNA polymerase I from Thermus sp. strain 2.9
  source 1..2529: mol_type = other DNA
atgcaccatcatcatcatcatggcggtagcggcatgttaccgttgttcgaacctaaaggtcgcgtgcttctggttgatggccatcatctcgcgtatcgtaacttctttgccctgaaaggattaaccaccagccgtggcgagccggtacagggtgtctacggctttgcaaagtcgctcctgaaagctctgaaagaagacggtgatgtggtgattgttgtctttgatgcgaaagcgccaagttttcgccacgaagcgtacgaagcttacaaagccgggcgtgctccaacgccggaagactttcctcgccaattggcgcttatgaaggaattagtggatttgcttggcctcgaacgcttggaagttcccggtttcgaggcagacgacgtattagcgactctcgcaaagaaagccgaacgtgagggctatgaagtccagatcttgacagcagatcgcgatcttttccagcttttatctccgcgcatctcggtgttacacccggaagggcatctgatcaccccggaatggctctgggagaaatatggtttgcgtcccgaacaatgggtggattttcgcgccttagcaggcgatccgagcgacaatattccgggagttaaaggtatcggcgagaagacggcgctcaagctccttaaagaatgggggtcgttggagaacttgcttaagaatttagatcaggtcaaaccagagtcagtgcgtgagaagattcttgcacacctcgaagacctcaaattaagccgcgaattgtcccgtgtacgcaccgatttgccgctcgaagttgatttccgtggccgccgcgaacctgactgggagggtcttaaagcgtttttagagcgtcttgaatttggttcgctcttgcatgaattcggccttttagaaagcccgttaccagccgaagaagcaccttggccaccgcccgaaggcgcgtttttaggttaccgtttgagtcgcccggaaccgatgtgggccgaattattggctcttgcagcgtctgcccagggacgtgtgtatcgcgcggaagaccctcatggtgcgctccgcggcctcaaagaagtccgtggactccttgccaaagacttagctgttgttgcattgcgcgaaggtcttgatttacctccgactgatgatccaatgcttcttgcgtacctcttggacccgtcaaacacgacgcccgaaggcgtagcccgtcgttacggcggcgagtggaccgaagatgcaggcgagcgcgcgttattggccgaacgtttgcacgcaaatttattaggacgtttgcaaggcgaggaacgtctcctctggctttacgaagaagtggagaaaccattgagtcgcgtgctcgctcatatggaagctaccggtgtcaaattagacgtggcgtatttggaggcactcagccttgaagttgctgccgaactgcgccgcttggaggaagaagtattccgtttagcaggccactcctttaaccttaattctcgcgatcagttagaacgtgtgttgttcgatgaacttggtctccctcctatcggcaagacagagaagaccggtaaacgtagcacttcagcggcggttttagaagctcttcgcgaagtccatcccattgtggacaagatcttgcagtaccgcgaactcgcgaaattgaaaggcacctatattgaccctcttccggcattagtccacccgaaaacgggacgcctccatacccgcttcaaccaaacagccacggcgaccggtcgtttgtcctcctctgatccaaaccttcagaatattccagtacgtaccccattgggccagaagatccgccgcgcgtttgtagctgaggagggttggcgtttagtggccctcgattatagccaaattgaattacgtgtccttgcccatctttctggcgatgagaacctcatccgcgtgtttcaggaaggcaaagacattcacactcaaacggcaagctggatgtttggactgccggcggaagcgatcgatcctttgatgcgtcgtgcagcgaagaccatcaatttcggtgttctctacggtatgagtgcccaccgtttgtcgcaggaattaggcattccctatgaagaagctgcggcgttcattcagcgctactttcaaagctatcccaaagttaaagcatggatcgagaagactctcgaagaaggccgcacacgtggttacgtagagaccttatttggacgtcgccgctatgttcccgatttaaacgctcgcgtgaaatctgtccgtgaagccgccgaacgcatggcgttcaacatgcctgtacagggcacggcagctgacctcatgaaacttgcaatggtgcgcctttttccacaattgcgtgaagttggtgcccgcatgctcttgcaggtccacgatgaactcttgttagaagcgccaaaagagcgtgcggaagaggtggcagccctcgcgaaagaggttatggaaggcgtgtggcccttagcggtgcctcttgaagtcgaagttggtattggcgaggattggttggctgccaaaggataatga

SEQ ID NO: 758 - protein, 841 aa, synthetic construct
  REGION 1..841: note = Variant of DNA polymerase I from Thermus sp. strain 2.9
MHHHHHHGGSGMLPLFEPKGRVLLVDGHHLAYRNFFALKGLTTSRGEPVQGVYGFAKSLLKALKEDGDVVIVVFDAKAPSFRHEAYEAYKAGRAPTPEDFPRQLALMKELVDLLGLERLEVPGFEADDVLATLAKKAEREGYEVQILTADRDLFQLLSPRISVLHPEGHLITPEWLWEKYGLRPEQWVDFRALAGDPSDNIPGVKGIGEKTALKLLKEWGSLENLLKNLDQVKPESVREKILAHLEDLKLSRELSRVRTDLPLEVDFRGRREPDWEGLKAFLERLEFGSLLHEFGLLESPLPAEEAPWPPPEGAFLGYRLSRPEPMWAELLALAASAQGRVYRAEDPHGALRGLKEVRGLLAKDLAVVALREGLDLPPTDDPMLLAYLLDPSNTTPEGVARRYGGEWTEDAGERALLAERLHANLLGRLQGEERLLWLYEEVEKPLSRVLAHMEATGVKLDVAYLEALSLEVAAELRRLEEEVFRLAGHSFNLNSRDQLERVLFDELGLPPIGKTEKTGKRSTSAAVLEALREVHPIVDKILQYRELAKLKGTYIDPLPALVHPKTGRLHTRFNQTATATGRLSSSDPNLQNIPVRTPLGQKIRRAFVAEEGWRLVALDYSQIELRVLAHLSGDENLIRVFQEGKDIHTQTASWMFGLPAEAIDPLMRRAAKTINFGVLYGMSAHRLSQELGIPYEEAAAFIQRYFQSYPKVKAWIEKTLEEGRTRGYVETLFGRRRYVPDLNARVKSVREAAERMAFNMPVQGTAADLMKLAMVRLFPQLREVGARMLLQVHDELLLEAPKERAEEVAALAKEVMEGVWPLAVPLEVEVGIGEDWLAAKG

SEQ ID NO: 759 - DNA, 2529 bp, synthetic construct
  misc_feature 1..2529: note = Variant of DNA polymerase I from Thermus sp. strain 2.9
  source 1..2529: mol_type = other DNA
atgcaccatcatcatcatcatggcggtagcggcatgttaccgttgttcgaacctaaaggtcgcgtgcttctggttgatggccatcatctcgcgtatcgtaacttctttgccctgaaaggattaaccaccagccgtggcgagccggtacagggtgtctacggctttgcaaagtcgctcctgaaagctctgaaagaagacggtgatgtggtgattgttgtctttgatgcgaaagcgccaagttttcgccacgaagcgtacgaagcttacaaagccgggcgtgctccaacgccggaagactttcctcgccaattggcgcttatgaaggaattagtggatttgcttggcctcgaacgcttggaagttcccggtttcgaggcagacgacgtattagcgactctcgcaaagaaagccgaacgtgagggctatgaagtccagatcttgacagcagatcgcgatcttttccagcttttatctccgcgcatctcggtgttacacccggaagggcatctgatcaccccggaatggctctgggagaaatatggtttgcgtcccgaacaatgggtggattttcgcgccttagccggcgatccgagcgacaatattccgggagttaaaggtatcggcgagaagacggcgctcaagctccttaaagaatgggggtcgttggagaacttgcttaagaatttagatcaggtcaaaccagagtcagtgcgtgagaagattcttgcacacctcgaagacctcaaattaagccgcgaattgtcccgtgtacgcaccgatttgccgctcgaagttgatttccgtggccgccgcgaacctgactgggagggtcttaaagcgtttttagagcgtcttgaatttggttcgctcttgcatgaattcggccttttagaaagcccgttaccagccgaagaagcaccttggccaccgcccgaaggcgcgtttttaggttaccgtttgagtcgcccggaaccgatgtgggccgaattattggctcttgcagcgtctgcccagggacgtgtgtatcgcgcggaagaccctcatggtgcgctccgcggcctcaaagaagtccgtggactccttgccaaagacttagctgttgttgcattgcgcgaaggtcttgatttacctccgactgatgatccaatgcttcttgcgtacctcttggacccgtcaaacacgacgcccgaaggcgtagcccgtcgttacggcggcgagtggaccgaagatgcaggcgagcgcgcgttattggccgaacgtttgcaccagaatttattaggacgtttgcaaggcgaggaacgtctcctctggctttacgaagaagtggagaaaccattgagtcgcgtgctcgctcatatggaagctaccggtgtcaaattagacgtggcgtatttggaggcactcagccttgaagttgctgccgaaatgcgccgcttggaggaagaagtattccgtttagcaggccactcctttaaccttaattctcgcgatcagttagaacgtgtgttgttcgatgaacttggtctccctcctatcggcaagacagagaagaccggtaaacgtagcacttcagcggcggttttagaagctcttcgcgaagtccatcccattgtggacaagatcttgcagtaccgcgaactcgcgaaattgaaaggcacctatattgaccgtcttccggcattagtccacccgaaaacgggacgcctccatacccgcttcaaccaaacagccacggcgaccggtcgtttgtcctcctctgatccaaaccttcagaatattccagtacgtaccccattgggccagaagatccgccgcgcgtttgtagctgaggagggttggcgtttagtggccctcgattatagccaaattgaattacgtgtccttgcccatctttctggcgatgagaacctcatccgcgtgtttcaggaaggcaaagacattcacactcaaacggcaagctggatgtttggagtgtcgtcggaagcgatcgatcctttgatgcgtcgtgcagcgaagaccatcaatttcggtgttctctacggtatgagtgcccatcgtttgtcgcaggaattaggcattccctatgaagaagctgcggcgttcattcagcgctactttcaaagctatcccaaagttaaagcatggatcgagaagactctcgaagaaggccgcacacgtggttacgtagagaccttatttggacgtcgccgctatgttcccgatttaaccgctcgcgtgaaatctgtccgtgaagccgccgaacgcatggcgttcaacatgcctgtacagggcacggcagctgacctcatgaaacttgcaatggtgcgcctttttccacaattgcgtgaagttggtgcccgcatgctcttgcaggtccacgatgaactcttgttagaagcgccaaaagagcgtgcggaagaggtggcagccctcgcgaaagaggttatggaaggcgtgtggcccttagcggtgcctcttgaagtcgaagttggtattggcgaggattggttggctgccaaaggataatga

SEQ ID NO: 760 - protein, 841 aa, synthetic construct
  REGION 1..841: note = Variant of DNA polymerase I from Thermus sp. strain 2.9
MHHHHHHGGSGMLPLFEPKGRVLLVDGHHLAYRNFFALKGLTTSRGEPVQGVYGFAKSLLKALKEDGDVVIVVFDAKAPSFRHEAYEAYKAGRAPTPEDFPRQLALMKELVDLLGLERLEVPGFEADDVLATLAKKAEREGYEVQILTADRDLFQLLSPRISVLHPEGHLITPEWLWEKYGLRPEQWVDFRALAGDPSDNIPGVKGIGEKTALKLLKEWGSLENLLKNLDQVKPESVREKILAHLEDLKLSRELSRVRTDLPLEVDFRGRREPDWEGLKAFLERLEFGSLLHEFGLLESPLPAEEAPWPPPEGAFLGYRLSRPEPMWAELLALAASAQGRVYRAEDPHGALRGLKEVRGLLAKDLAVVALREGLDLPPTDDPMLLAYLLDPSNTTPEGVARRYGGEWTEDAGERALLAERLHQNLLGRLQGEERLLWLYEEVEKPLSRVLAHMEATGVKLDVAYLEALSLEVAAEMRRLEEEVFRLAGHSFNLNSRDQLERVLFDELGLPPIGKTEKTGKRSTSAAVLEALREVHPIVDKILQYRELAKLKGTYIDRLPALVHPKTGRLHTRFNQTATATGRLSSSDPNLQNIPVRTPLGQKIRRAFVAEEGWRLVALDYSQIELRVLAHLSGDENLIRVFQEGKDIHTQTASWMFGVSSEAIDPLMRRAAKTINFGVLYGMSAHRLSQELGIPYEEAAAFIQRYFQSYPKVKAWIEKTLEEGRTRGYVETLFGRRRYVPDLTARVKSVREAAERMAFNMPVQGTAADLMKLAMVRLFPQLREVGARMLLQVHDELLLEAPKERAEEVAALAKEVMEGVWPLAVPLEVEVGIGEDWLAAKG

SEQ ID NO: 761 - DNA, 2529 bp, synthetic construct
  misc_feature 1..2529: note = Variant of DNA polymerase I from Thermus sp. strain 2.9
  source 1..2529: mol_type = other DNA
atgcaccatcatcatcatcatggcggtagcggcatgttaccgttgttcgaacctaaaggtcgcgtgcttctggttgatggccatcatctcgcgtatcgtaacttctttgccctgaaaggattaaccaccagccgtggcgagccggtacagggtgtctacggctttgcaaagtcgctcctgaaagctctgaaagaagacggtgatgtggtgattgttgtctttgatgcgaaagcgccaagttttcgccacgaagcgtacgaagcttacaaagccgggcgtgctccaacgccggaagactttcctcgccaattggcgcttatgaaggaattagtggatttgcttggcctcgaacgcttggaagttcccggtttcgaggcagacgacgtattagcgactctcgcaaagaaagccgaacgtgagggctatgaagtccagatcttgacagcagatcgcgatcttttccagcttttatctccgcgcatctcggtgttacacccggaagggcatctgatcaccccggaatggctctgggagaaatatggtttgcgtcccgaacaatgggtggattttcgcgccttagtcggcgatccgagcgacaatattccgggagttaaaggtatcggcgagaagacggcgctcaagctccttaaagaatgggggtcgttggagaacttgcttaagaatttagatcaggtcaaaccagagtcagtgcgtgagaagattcttgcacacctcgaagacctcaaattaagccgcgaattgtcccgtgtacgcaccgatttgccgctcgaagttgatttccgtggccgccgcgaacctgactgggagggtcttaaagcgtttttagagcgtcttgaatttggttcgctcttgcatgaattcggccttttagaaagcccgttaccagccgaagaagcaccttggccaccgcccgaaggcgcgtttttaggttaccgtttgagtcgcccggaaccgatgtgggccgaattattggctcttgcagcgtctgcccagggacgtgtgtatcgcgcggaagaccctcatggtgcgctccgcggcctcaaagaagtccgtggactccttgccaaagacttagctgttgttgcattgcgcgaaggtcttgatttacctccgactgatgatccaatgcttcttgcgtacctcttggacccgtcaaacacgacgcccgaaggcgtagcccgtcgttacggcggcgagtggaccgaagatgcaggcgagcgcgcgttattggccgaacgtttgcaccagaatttattaggacgtttgcaaggcgaggaacgtctcctctggctttacgaagaagtggagaaaccattgagtcgcgtgctcgcgcatatggaagctaccggtgtcaaattagacgtggcgtatttggaggcactcagccttgaagttgctgccgaaatgcgccgcttggaggaagaagtattccgtttagcaggccactcctttaaccttaattctcgcgatcagttagaacgtgtgttgttcgatgaacttggtctccctcctatcggcaagacagagaagaccggtaaacgtagcacttcagcggcggttttagaagctcttcgcgaagtccatcccattgtggacaagatcttgcagtaccgcgaactcgcgaaattgaaaggcacctatattgaccgtcttccggcattagtccacccgaaaacgggacgcctccatacccgcttcaaccaaacagccacggcgaccggtcgtttgtcctcctctgatccaaaccttcagaatattccagtacgtaccccattgggccagaagatccgccgcgcgtttgtagctgaggagggttggcgtttagtggccctcgattatagccaaattgaattacgtgtccttgcccatctttctggcgatgagaacctcatccgcgtgtttcaggaaggcaaagacattcacactcaaacggcaagctggatgtttggagtgtcggcggaagcgatcgatcctttgatgcgtcgtgcagcgaagaccatcaatttcggtgttctctacggtatgagtgcccaccgtttgtcgcaggaattaggcattccctatgaagaagctgcggcgttcattcagcgctactttcaaagctatcccaaagttaaagcatggatcgagaagactctcgaagaaggccgcacacgtggttacgtagagaccttatttggacgtcgccgctatgttcccgatttaaccgctcgcgtgaaatctgtccgtgaagccgccgaacgcatggcgttcaacatgcctgtacagggcacggcagctgacctcatgaaacttgcaatggtgcgcctttttccacaattgcgtgaagttggtgcccgcatgctcttgcaggtccacgatgaactcttgttagaagcgccaaaagagcgtgcggaagaggtggcagccctcgcgaaagaggttatggaaggcgtgtggcccttagcggtgcctcttgaagtcgaagttggtattggcgaggattggttggctgccaaaggataatga

SEQ ID NO: 762 - protein, 841 aa, synthetic construct
  REGION 1..841: note = Variant of DNA polymerase I from Thermus sp. strain 2.9
MHHHHHHGGSGMLPLFEPKGRVLLVDGHHLAYRNFFALKGLTTSRGEPVQGVYGFAKSLLKALKEDGDVVIVVFDAKAPSFRHEAYEAYKAGRAPTPEDFPRQLALMKELVDLLGLERLEVPGFEADDVLATLAKKAEREGYEVQILTADRDLFQLLSPRISVLHPEGHLITPEWLWEKYGLRPEQWVDFRALVGDPSDNIPGVKGIGEKTALKLLKEWGSLENLLKNLDQVKPESVREKILAHLEDLKLSRELSRVRTDLPLEVDFRGRREPDWEGLKAFLERLEFGSLLHEFGLLESPLPAEEAPWPPPEGAFLGYRLSRPEPMWAELLALAASAQGRVYRAEDPHGALRGLKEVRGLLAKDLAVVALREGLDLPPTDDPMLLAYLLDPSNTTPEGVARRYGGEWTEDAGERALLAERLHQNLLGRLQGEERLLWLYEEVEKPLSRVLAHMEATGVKLDVAYLEALSLEVAAEMRRLEEEVFRLAGHSFNLNSRDQLERVLFDELGLPPIGKTEKTGKRSTSAAVLEALREVHPIVDKILQYRELAKLKGTYIDRLPALVHPKTGRLHTRFNQTATATGRLSSSDPNLQNIPVRTPLGQKIRRAFVAEEGWRLVALDYSQIELRVLAHLSGDENLIRVFQEGKDIHTQTASWMFGVSAEAIDPLMRRAAKTINFGVLYGMSAHRLSQELGIPYEEAAAFIQRYFQSYPKVKAWIEKTLEEGRTRGYVETLFGRRRYVPDLTARVKSVREAAERMAFNMPVQGTAADLMKLAMVRLFPQLREVGARMLLQVHDELLLEAPKERAEEVAALAKEVMEGVWPLAVPLEVEVGIGEDWLAAKG

SEQ ID NO: 763 - DNA, 2529 bp, synthetic construct
  misc_feature 1..2529: note = Variant of DNA polymerase I from Thermus sp. strain 2.9
  source 1..2529: mol_type = other DNA
atgcaccatcatcatcatcatggcggtagcggcatgttaccgttgttcgaacctaaaggtcgcgtgcttctggttgatggccatcatctcgcgtatcgtaacttctttgccctgaaaggattaaccaccagccgtggcgagccggtacagggtgtctacggctttgcaaagtcgctcctgaaagctctgaaagaagacggtgatgtggtgattgttgtctttgatgcgaaagcgccaagttttcgccacgaagcgtacgaagcttacaaagccgggcgtgctccaacgccggaagactttcctcgccaattggcgcttatgaaggaattagtggatttgcttggcctcgaacgcttggaagttcccggtttcgaggcagacgacgtattagcgactctcgcaaagaaagccgaacgtgagggctatgaagtccagatcttgacagcagatcgcgatcttttccagcttttatctccgcgcatctcggtgttacacccggaagggcatctgatcaccccggaatggctctgggagaaatatggtttgcgtcccgaacaatgggtggattttcgcgccttagcaggcgatccgagcgacaatattccgggagttaaaggtatcggcgagaagacggcgctcaagctccttaaagaatgggggtcgttggagaacttgcttaagaatttagatcaggtcaaaccagagtcagtgcgtgagaagattcttgcacacctcgaagacctcaaattaagccgcgaattgtcccgtgtacgcaccgatttgccgctcgaagttgatttccgtggccgccgcgaacctgactgggagggtcttaaagcgtttttagagcgtcttgaatttggttcgctcttgcatgaattcggccttttagaaagcccgttaccagccgaagaagcaccttggccaccgcccgaaggcgcgtttttaggttaccgtttgagtcgcccggaaccgatgtgggccgaattattggctcttgcagcgtctgcccagggacgtgtgtatcgcgcggaagaccctcatggtgcgctccgcggcctcaaagaagtccgtggactccttgccaaagacttagctgttgttgcattgcgcgaaggtcttgatttacctccgactgatgatccaatgcttcttgcgtacctcttggacccgtcaaacacgacgcccgaaggcgtagcccgtcgttacggcggcgagtggaccgaagatgcaggcgagcgcgcgttattggccgaacgtttgcacgcaaatttattaggacgtttgcaaggcgaggaacgtctcctctggctttacgaagaagtggagaaaccattgagtcgcgtgctcgcgcatatggaagctaccggtgtcaaattagacgtggcgtatttggaggcactcagccttgaagttgctgccgaaatgcgccgcttggaggaagaagtattccgtttagcaggccactcctttaaccttaattctcgcgatcagttagaacgtgtgttgttcgatgaacttggtctccctcctatcggcaagacagagaagaccggtaaacgtagcacttcagcggcggttttagaagctcttcgcgaagtccatcccattgtggacaagatcttgcagtaccgcgaactcgcgaaattgaaaggcacctatattgaccctcttccggcattagtccacccgaaaacgggacgcctccatacccgcttcaaccaaacagccacggcgaccggtcgtttgtcctcctctgatccaaaccttcagaatattccagtacgtaccccattgggccagaagatccgccgcgcgtttgtagctgaggagggttggcgtttagtggccctcgattatagccaaattgaattacgtgtccttgcccatctttctggcgatgagaacctcatccgcgtgtttcaggaaggcaaagacattcacactcaaacggcaagctggatgtttggagtgccggcggaagcgatcgatcctttgatgcgtcgtgcagcgaagaccatcaatttcggtgttctctacggtatgagtgcccatcgtttgtcgcaggaattaggcattccctatgaagaagctgcggcgttcattcagcgctactttcaaagctatcccaaagttaaagcatggatcgagaagactctcgaagaaggccgcacacgtggttacgtagagaccttatttggacgtcgccgctatgttcccgatttaaccgctcgcgtgaaatctgtccgtgaagccgccgaacgcatggcgttcaacatgcctgtacagggcacggcagctgacctcatgaaacttgcaatggtgcgcctttttccacaattgcgtgaagttggtgcccgcatgctcttgcaggtccacgatgaactcttgttagaagcgccaaaagagcgtgcggaagaggtggcagccctcgcgaaagaggttatggaaggcgtgtggcccttagcggtgcctcttgaagtcgaagttggtattggcgaggattggttggctgccaaaggataatga

SEQ ID NO: 764 - protein, 841 aa, synthetic construct
  REGION 1..841: note = Variant of DNA polymerase I from Thermus sp. strain 2.9
MHHHHHHGGSGMLPLFEPKGRVLLVDGHHLAYRNFFALKGLTTSRGEPVQGVYGFAKSLLKALKEDGDVVIVVFDAKAPSFRHEAYEAYKAGRAPTPEDFPRQLALMKELVDLLGLERLEVPGFEADDVLATLAKKAEREGYEVQILTADRDLFQLLSPRISVLHPEGHLITPEWLWEKYGLRPEQWVDFRALAGDPSDNIPGVKGIGEKTALKLLKEWGSLENLLKNLDQVKPESVREKILAHLEDLKLSRELSRVRTDLPLEVDFRGRREPDWEGLKAFLERLEFGSLLHEFGLLESPLPAEEAPWPPPEGAFLGYRLSRPEPMWAELLALAASAQGRVYRAEDPHGALRGLKEVRGLLAKDLAVVALREGLDLPPTDDPMLLAYLLDPSNTTPEGVARRYGGEWTEDAGERALLAERLHANLLGRLQGEERLLWLYEEVEKPLSRVLAHMEATGVKLDVAYLEALSLEVAAEMRRLEEEVFRLAGHSFNLNSRDQLERVLFDELGLPPIGKTEKTGKRSTSAAVLEALREVHPIVDKILQYRELAKLKGTYIDPLPALVHPKTGRLHTRFNQTATATGRLSSSDPNLQNIPVRTPLGQKIRRAFVAEEGWRLVALDYSQIELRVLAHLSGDENLIRVFQEGKDIHTQTASWMFGVPAEAIDPLMRRAAKTINFGVLYGMSAHRLSQELGIPYEEAAAFIQRYFQSYPKVKAWIEKTLEEGRTRGYVETLFGRRRYVPDLTARVKSVREAAERMAFNMPVQGTAADLMKLAMVRLFPQLREVGARMLLQVHDELLLEAPKERAEEVAALAKEVMEGVWPLAVPLEVEVGIGEDWLAAKG

SEQ ID NO: 765 - DNA, 2529 bp, synthetic construct
  misc_feature 1..2529: note = Variant of DNA polymerase I from Thermus sp. strain 2.9
  source 1..2529: mol_type = other DNA
atgcaccatcatcatcatcatggcggtagcggcatgttaccgttgttcgaacctaaaggtcgcgtgcttctggttgatggccatcatctcgcgtatcgtaacttctttgccctgaaaggattaaccaccagccgtggcgagccggtacagggtgtctacggctttgcaaagtcgctcctgaaagctctgaaagaagacggtgatgtggtgattgttgtctttgatgcgaaagcgccaagttttcgccacgaagcgtacgaagcttacaaagccgggcgtgctccaacgccggaagactttcctcgccaattggcgcttatgaaggaattagtggatttgcttggcctcgaacgcttggaagttcccggtttcgaggcagacgacgtattagcgactctcgcaaagaaagccgaacgtgagggctatgaagtccagatcttgacagcagatcgcgatcttttccagcttttatctccgcgcatctcggtgttacacccggaagggcatcgtatcaccccggaatggctctgggagaaatatggtttgcgtcccgaacaatgggtggattttcgcgccttagcaggcgatccgagcgacaatattccgggagttaaaggtatcggcgagaagacggcgctcaagctccttaaagaatgggggtcgttggagaacttgcttaagaatttagatcaggtcaaaccagagtcagtgcgtgagaagattcttgcacacctcgaagacctcaaattaagccgcgaattgtcccgtgtacgcaccgatttgccgctcgaagttgatttccgtggccgccgcgaacctgactgggagggtcttaaagcgtttttagagcgtcttgaatttggttcgctcttgcatgaattcggccttttagaaagcccgttaccagccgaagaagcaccttggccaccgcccgaaggcgcgtttttaggttaccgtttgagtcgcccggaaccgatgtgggccgaattattggctcttgcagcgtctgcccagggacgtgtgtatcgcgcggaagaccctcatggtgcgctccgcggcctcaaagaagtccgtggactccttgccaaagacttagctgttgttgcattgcgcgaaggtcttgatttacctccgactgatgatccaatgcttcttgcgtacctcttggacccgtcaaacacgacgcccgaaggcgtagcccgtcgttacggcggcgagtggaccgaagatgcaggcgagcgcgcgttattggccgaacgtttgcaccagaatttattaggacgtttgcaaggcgaggaacgtctcctctggctttacgaagaagtggagaaaccattgagtcgcgtgctcgcgcatatggaagctaccggtgtcaaattagacgtggcgtatttggaggcactcagccttgaagttgctgccgaactgcgccgcttggaggaagaagtattccgtttagcaggccactcctttaaccttaattctcgcgatcagttagaacgtgtgttgttcgatgaacttggtctccctcctatcggcaagacagagaagaccggtaaacgtagcacttcagcggcggttttagaagctcttcgcgaagtccatcccattgtggacaagatcttgcagtaccgcgaactcgcgaaattgaaaggcacctatattgaccctcttccggcattagtccacccgaaaacgggacgcctccatacccgcttcaaccaaacagccacggcgaccggtcgtttgtcctcctctgatccaaaccttcagaatattccagtacgtaccccattgggccagaagatccgccgcgcgtttgtagctgaggagggttggcgtttagtggccctcgattatagccaaattgaattacgtgtccttgcccatctttctggcgatgagaacctcatccgcgtgtttcaggaaggcaaagacattcacactcaaacggcaagctggatgtttggattatcagctgaagcgatcgatcctttgatgcgtcgtgcagcgaagaccatcaatttcggtgttctctacggtatgagtgcccatcgtttgtcgcaggaattaggcattccctatgaagaagctgcggcgttcattcagcgctactttcaaagctatcccaaagttaaagcatggatcgagaagactctcgaagaaggccgcacacgtggttacgtagagaccttatttggacgtcgccgctatgttcccgatttaaacgctcgcgtgaaatctgtccgtgaagccgccgaacgcatggcgttcaacatgcctgtacagggcacggcagctgacctcatgaaacttgcaatggtgcgcctttttccacaattgcgtgaagttggtgcccgcatgctcttgcaggtccacgatgaactcttgttagaagcgccaaaagagcgtgcggaagaggtggcagccctcgcgaaagaggttatggaaggcgtgtggcccttagcggtgcctcttgaagtcgaagttggtattggcgaggattggttggctgccaaaggataatga

SEQ ID NO: 766 - protein, 841 aa, synthetic construct
  REGION 1..841: note = Variant of DNA polymerase I from Thermus sp. strain 2.9
MHHHHHHGGSGMLPLFEPKGRVLLVDGHHLAYRNFFALKGLTTSRGEPVQGVYGFAKSLLKALKEDGDVVIVVFDAKAPSFRHEAYEAYKAGRAPTPEDFPRQLALMKELVDLLGLERLEVPGFEADDVLATLAKKAEREGYEVQILTADRDLFQLLSPRISVLHPEGHRITPEWLWEKYGLRPEQWVDFRALAGDPSDNIPGVKGIGEKTALKLLKEWGSLENLLKNLDQVKPESVREKILAHLEDLKLSRELSRVRTDLPLEVDFRGRREPDWEGLKAFLERLEFGSLLHEFGLLESPLPAEEAPWPPPEGAFLGYRLSRPEPMWAELLALAASAQGRVYRAEDPHGALRGLKEVRGLLAKDLAVVALREGLDLPPTDDPMLLAYLLDPSNTTPEGVARRYGGEWTEDAGERALLAERLHQNLLGRLQGEERLLWLYEEVEKPLSRVLAHMEATGVKLDVAYLEALSLEVAAELRRLEEEVFRLAGHSFNLNSRDQLERVLFDELGLPPIGKTEKTGKRSTSAAVLEALREVHPIVDKILQYRELAKLKGTYIDPLPALVHPKTGRLHTRFNQTATATGRLSSSDPNLQNIPVRTPLGQKIRRAFVAEEGWRLVALDYSQIELRVLAHLSGDENLIRVFQEGKDIHTQTASWMFGLSAEAIDPLMRRAAKTINFGVLYGMSAHRLSQELGIPYEEAAAFIQRYFQSYPKVKAWIEKTLEEGRTRGYVETLFGRRRYVPDLNARVKSVREAAERMAFNMPVQGTAADLMKLAMVRLFPQLREVGARMLLQVHDELLLEAPKERAEEVAALAKEVMEGVWPLAVPLEVEVGIGEDWLAAKG

SEQ ID NO: 767 - DNA, 2529 bp, synthetic construct
  misc_feature 1..2529: note = Variant of DNA polymerase I from Thermus sp. strain 2.9
  source 1..2529: mol_type = other DNA
atgcaccatcatcatcatcatggcggtagcggcatgttaccgttgttcgaacctaaaggtcgcgtgcttctggttgatggccatcatctcgcgtatcgtaacttctttgccctgaaaggattaaccaccagccgtggcgagccggtacagggtgtctacggctttgcaaagtcgctcctgaaagctctgaaagaagacggtgatgtggtgattgttgtctttgatgcgaaagcgccaagttttcgccacgaagcgtacgaagcttacaaagccgggcgtgctccaacgccggaagactttcctcgccaattggcgcttatgaaggaattagtggatttgcttggcctcgaacgcttggaagttcccggtttcgaggcagacgacgtattagcgactctcgcaaagaaagccgaacgtgagggctatgaagtccagatcttgacagcagatcgcgatcttttccagcttttatctccgcgcatctcggtgttacacccggaagggcatcgtatcaccccggaatggctctgggagaaatatggtttgcgtcccgaacaatgggtggattttcgcgccttagtcggcgatccgagcgacaatattccgggagttaaaggtatcggcgagaagacggcgctcaagctccttaaagaatgggggtcgttggagaacttgcttaagaatttagatcaggtcaaaccagagtcagtgcgtgagaagattcttgcacacctcgaagacctcaaattaagccgcgaattgtcccgtgtacgcaccgatttgccgctcgaagttgatttccgtggccgccgcgaacctgactgggagggtcttaaagcgtttttagagcgtcttgaatttggttcgctcttgcatgaattcggccttttagaaagcccgttaccagccgaagaagcaccttggccaccgcccgaaggcgcgtttttaggttaccgtttgagtcgcccggaaccgatgtgggccgaattattggctcttgcagcgtctgcccagggacgtgtgtatcgcgcggaagaccctcatggtgcgctccgcggcctcaaagaagtccgtggactccttgccaaagacttagctgttgttgcattgcgcgaaggtcttgatttacctccgactgatgatccaatgcttcttgcgtacctcttggacccgtcaaacacgacgcccgaaggcgtagcccgtcgttacggcggcgagtggaccgaagatgcaggcgagcgcgcgttattggccgaacgtttgcacgcaaatttattaggacgtttgcaaggcgaggaacgtctcctctggctttacgaagaagtggagaaaccattgagtcgcgtgctcgctcatatggaagctaccggtgtcaaattagacgtggcgtatttggaggcactcagccttgaagttgctgccgaaatgcgccgcttggaggaagaagtattccgtttagcaggccactcctttaaccttaattctcgcgatcagttagaacgtgtgttgttcgatgaacttggtctccctcctatcggcaagacagagaagaccggtaaacgtagcacttcagcggcggttttagaagctcttcgcgaagtccatcccattgtggacaagatcttgcagtaccgcgaactcgcgaaattgaaaggcacctatattgaccgtcttccggcattagtccacccgaaaacgggacgcctccatacccgcttcaaccaaacagccacggcgaccggtcgtttgtcctcctctgatccaaaccttcagaatattccagtacgtaccccattgggccagaagatccgccgcgcgtttgtagctgaggagggttggcgtttagtggccctcgattatagccaaattgaattacgtgtccttgcccatctttctggcgatgagaacctcatccgcgtgtttcaggaaggcaaagacattcacactcaaacggcaagctggatgtttggattatcagctgaagcgatcgatcctttgatgcgtcgtgcagcgaagaccatcaatttcggtgttctctacggtatgagtgcccaccgtttgtcgcaggaattaggcattccctatgaagaagctgcggcgttcattcagcgctactttcaaagctatcccaaagttaaagcatggatcgagaagactctcgaagaaggccgcacacgtggttacgtagagaccttatttggacgtcgccgctatgttcccgatttaaacgctcgcgtgaaatctgtccgtgaagccgccgaacgcatggcgttcaacatgcctgtacagggcacggcagctgacctcatgaaacttgcaatggtgcgcctttttccacaattgcgtgaagttggtgcccgcatgctcttgcaggtccacgatgaactcttgttagaagcgccaaaagagcgtgcggaagaggtggcagccctcgcgaaagaggttatggaaggcgtgtggcccttagcggtgcctcttgaagtcgaagttggtattggcgaggattggttggctgccaaaggataatga

SEQ ID NO: 768 - protein, 841 aa, synthetic construct
  REGION 1..841: note = Variant of DNA polymerase I from Thermus sp. strain 2.9
MHHHHHHGGSGMLPLFEPKGRVLLVDGHHLAYRNFFALKGLTTSRGEPVQGVYGFAKSLLKALKEDGDVVIVVFDAKAPSFRHEAYEAYKAGRAPTPEDFPRQLALMKELVDLLGLERLEVPGFEADDVLATLAKKAEREGYEVQILTADRDLFQLLSPRISVLHPEGHRITPEWLWEKYGLRPEQWVDFRALVGDPSDNIPGVKGIGEKTALKLLKEWGSLENLLKNLDQVKPESVREKILAHLEDLKLSRELSRVRTDLPLEVDFRGRREPDWEGLKAFLERLEFGSLLHEFGLLESPLPAEEAPWPPPEGAFLGYRLSRPEPMWAELLALAASAQGRVYRAEDPHGALRGLKEVRGLLAKDLAVVALREGLDLPPTDDPMLLAYLLDPSNTTPEGVARRYGGEWTEDAGERALLAERLHANLLGRLQGEERLLWLYEEVEKPLSRVLAHMEATGVKLDVAYLEALSLEVAAEMRRLEEEVFRLAGHSFNLNSRDQLERVLFDELGLPPIGKTEKTGKRSTSAAVLEALREVHPIVDKILQYRELAKLKGTYIDRLPALVHPKTGRLHTRFNQTATATGRLSSSDPNLQNIPVRTPLGQKIRRAFVAEEGWRLVALDYSQIELRVLAHLSGDENLIRVFQEGKDIHTQTASWMFGLSAEAIDPLMRRAAKTINFGVLYGMSAHRLSQELGIPYEEAAAFIQRYFQSYPKVKAWIEKTLEEGRTRGYVETLFGRRRYVPDLNARVKSVREAAERMAFNMPVQGTAADLMKLAMVRLFPQLREVGARMLLQVHDELLLEAPKERAEEVAALAKEVMEGVWPLAVPLEVEVGIGEDWLAAKG

SEQ ID NO: 769 - DNA, 2529 bp, synthetic construct
  misc_feature 1..2529: note = Variant of DNA polymerase I from Thermus sp. strain 2.9
  source 1..2529: mol_type = other DNA
atgcaccatcatcatcatcatggcggtagcggcatgttaccgttgttcgaacctaaaggtcgcgtgcttctggttgatggccatcatctcgcgtatcgtaacttctttgccctgaaaggattaaccaccagccgtggcgagccggtacagggtgtctacggctttgcaaagtcgctcctgaaagctctgaaagaagacggtgatgtggtgattgttgtctttgatgcgaaagcgccaagttttcgccacgaagcgtacgaagcttacaaagccgggcgtgctccaacgccggaagactttcctcgccaattggcgcttatgaaggaattagtggatttgcttggcctcgaacgcttggaagttcccggtttcgaggcagacgacgtattagcgactctcgcaaagaaagccgaacgtgagggctatgaagtccagatcttgacagcagatcgcgatcttttccagcttttatctccgcgcatctcggtgttacacccggaagggcatcgtatcaccccggaatggctctgggagaaatatggtttgcgtcccgaacaatgggtggattttcgcgccttagccggcgatccgagcgacaatattccgggagttaaaggtatcggcgagaagacggcgctcaagctccttaaagaatgggggtcgttggagaacttgcttaagaatttagatcaggtcaaaccagagtcagtgcgtgagaagattcttgcacacctcgaagacctcaaattaagccgcgaattgtcccgtgtacgcaccgatttgccgctcgaagttgatttccgtggccgccgcgaacctgactgggagggtcttaaagcgtttttagagcgtcttgaatttggttcgctcttgcatgaattcggccttttagaaagcccgttaccagccgaagaagcaccttggccaccgcccgaaggcgcgtttttaggttaccgtttgagtcgcccggaaccgatgtgggccgaattattggctcttgcagcgtctgcccagggacgtgtgtatcgcgcggaagaccctcatggtgcgctccgcggcctcaaagaagtccgtggactccttgccaaagacttagctgttgttgcattgcgcgaaggtcttgatttacctccgactgatgatccaatgcttcttgcgtacctcttggacccgtcaaacacgacgcccgaaggcgtagcccgtcgttacggcggcgagtggaccgaagatgcaggcgagcgcgcgttattggccgaacgtttgcaccagaatttattaggacgtttgcaaggcgaggaacgtctcctctggctttacgaagaagtggagaaaccattgagtcgcgtgctcgctcatatggaagctaccggtgtcaaattagacgtggcgtatttggaggcactcagccttgaagttgctgccgaactgcgccgcttggaggaagaagtattccgtttagcaggccactcctttaaccttaattctcgcgatcagttagaacgtgtgttgttcgatgaacttggtctccctcctatcggcaagacagagaagaccggtaaacgtagcacttcagcggcggttttagaagctcttcgcgaagtccatcccattgtggacaagatcttgcagtaccgcgaactcgcgaaattgaaaggcacctatattgaccgtcttccggcattagtccacccgaaaacgggacgcctccatacccgcttcaaccaaacagccacggcgaccggtcgtttgtcctcctctgatccaaaccttcagaatattccagtacgtaccccattgggccagaagatccgccgcgcgtttgtagctgaggagggttggcgtttagtggccctcgattatagccaaattgaattacgtgtccttgcccatctttctggcgatgagaacctcatccgcgtgtttcaggaaggcaaagacattcacactcaaacggcaagctggatgtttggagtgccggcggaagcgatcgatcctttgatgcgtcgtgcagcgaagaccatcaatttcggtgttctctacggtatgagtgccgctcgtttgtcgcaggaattaggcattccctatgaagaagctgcggcgttcattcagcgctactttcaaagctatcccaaagttaaagcatggatcgagaagactctcgaagaaggccgcacacgtggttacgtagagaccttatttggacgtcgccgctatgttcccgatttaaccgctcgcgtgaaatctgtccgtgaagccgccgaacgcatggcgttcaacatgcctgtacagggcacggcagctgacctcatgaaacttgcaatggtgcgcctttttccacaattgcgtgaagttggtgcccgcatgctcttgcaggtccacgatgaactcttgttagaagcgccaaaagagcgtgcggaagaggtggcagccctcgcgaaagaggttatggaaggcgtgtggcccttagcggtgcctcttgaagtcgaagttggtattggcgaggattggttggctgccaaaggataatga

SEQ ID NO: 770 - protein, 841 aa, synthetic construct
  REGION 1..841: note = Variant of DNA polymerase I from Thermus sp. strain 2.9
MHHHHHHGGSGMLPLFEPKGRVLLVDGHHLAYRNFFALKGLTTSRGEPVQGVYGFAKSLLKALKEDGDVVIVVFDAKAPSFRHEAYEAYKAGRAPTPEDFPRQLALMKELVDLLGLERLEVPGFEADDVLATLAKKAEREGYEVQILTADRDLFQLLSPRISVLHPEGHRITPEWLWEKYGLRPEQWVDFRALAGDPSDNIPGVKGIGEKTALKLLKEWGSLENLLKNLDQVKPESVREKILAHLEDLKLSRELSRVRTDLPLEVDFRGRREPDWEGLKAFLERLEFGSLLHEFGLLESPLPAEEAPWPPPEGAFLGYRLSRPEPMWAELLALAASAQGRVYRAEDPHGALRGLKEVRGLLAKDLAVVALREGLDLPPTDDPMLLAYLLDPSNTTPEGVARRYGGEWTEDAGERALLAERLHQNLLGRLQGEERLLWLYEEVEKPLSRVLAHMEATGVKLDVAYLEALSLEVAAELRRLEEEVFRLAGHSFNLNSRDQLERVLFDELGLPPIGKTEKTGKRSTSAAVLEALREVHPIVDKILQYRELAKLKGTYIDRLPALVHPKTGRLHTRFNQTATATGRLSSSDPNLQNIPVRTPLGQKIRRAFVAEEGWRLVALDYSQIELRVLAHLSGDENLIRVFQEGKDIHTQTASWMFGVPAEAIDPLMRRAAKTINFGVLYGMSAARLSQELGIPYEEAAAFIQRYFQSYPKVKAWIEKTLEEGRTRGYVETLFGRRRYVPDLTARVKSVREAAERMAFNMPVQGTAADLMKLAMVRLFPQLREVGARMLLQVHDELLLEAPKERAEEVAALAKEVMEGVWPLAVPLEVEVGIGEDWLAAKG

SEQ ID NO: 771 - DNA, 2529 bp, synthetic construct
  misc_feature 1..2529: note = Variant of DNA polymerase I from Thermus sp. strain 2.9
  source 1..2529: mol_type = other DNA
atgcaccatcatcatcatcatggcggtagcggcatgttaccgttgttcgaacctaaaggtcgcgtgcttctggttgatggccatcatctcgcgtatcgtaacttctttgccctgaaaggattaaccaccagccgtggcgagccggtacagggtgtctacggctttgcaaagtcgctcctgaaagctctgaaagaagacggtgatgtggtgattgttgtctttgatgcgaaagcgccaagttttcgccacgaagcgtacgaagcttacaaagccgggcgtgctccaacgccggaagactttcctcgccaattggcgcttatgaaggaattagtggatttgcttggcctcgaacgcttggaagttcccggtttcgaggcagacgacgtattagcgactctcgcaaagaaagccgaacgtgagggctatgaagtccagatcttgacagcagatcgcgatcttttccagcttttatctccgcgcatctcggtgttacacccggaagggcatcgtatcaccccggaatggctctgggagaaatatggtttgcgtcccgaacaatgggtggattttcgcgccttagcaggcgatccgagcgacaatattccgggagttaaaggtatcggcgagaagacggcgctcaagctccttaaagaatgggggtcgttggagaacttgcttaagaatttagatcaggtcaaaccagagtcagtgcgtgagaagattcttgcacacctcgaagacctcaaattaagccgcgaattgtcccgtgtacgcaccgatttgccgctcgaagttgatttccgtggccgccgcgaacctgactgggagggtcttaaagcgtttttagagcgtcttgaatttggttcgctcttgcatgaattcggccttttagaaagcccgttaccagccgaagaagcaccttggccaccgcccgaaggcgcgtttttaggttaccgtttgagtcgcccggaaccgatgtgggccgaattattggctcttgcagcgtctgcccagggacgtgtgtatcgcgcggaagaccctcatggtgcgctccgcggcctcaaagaagtccgtggactccttgccaaagacttagctgttgttgcattgcgcgaaggtcttgatttacctccgactgatgatccaatgcttcttgcgtacctcttggacccgtcaaacacgacgcccgaaggcgtagcccgtcgttacggcggcgagtggaccgaagatgcaggcgagcgcgcgttattggccgaacgtttgcacgccaatttattaggacgtttgcaaggcgaggaacgtctcctctggctttacgaagaagtggagaaaccattgagtcgcgtgctcgcgcatatggaagctaccggtgtcaaattagacgtggcgtatttggaggcactcagccttgaagttgctgccgaaatgcgccgcttggaggaagaagtattccgtttagcaggccactcctttaaccttaattctcgcgatcagttagaacgtgtgttgttcgatgaacttggtctccctcctatcggcaagacagagaagaccggtaaacgtagcacttcagcggcggttttagaagctcttcgcgaagctcatcccattgtggacaagatcttgcagtaccgcgaactcgcgaaattgaaaggcacctatattgaccctcttccggcattagtccacccgaaaacgggacgcctccatacccgcttcaaccaaacagccacggcgaccggtcgtttgtcctcctctgatccaaaccttcagaatattccagtacgtaccccattgggccagaagatccgccgcgcgtttgtagctgaggagggttggcgtttagtggccctcgattatagccaaattgaattacgtgtccttgcccatctttctggcgatgagaacctcatccgcgtgtttcaggaaggcaaagacattcacactcaaacggcaagctggatgtttggattatcagctgaagcgatcgatcctttgatgcgtcgtgtagcgaagaccatcaatttcggtgttctctacggtatgagtgcccatcgtttgtcgcaggaattaggcattccctatgaagaagctgcggcgttcattcagcgctactttcaaagctatcccaaagttaaagcatggatcgagaagactctcgaagaaggccgcacacgtggttacgtagagaccttatttggacgtcgccgctatgttcccgatttaaacgctcgcgtgaaatctgtccgtgaagccgccgaacgcatggcgttcaacatgcctgtacagggcacggcagctgacctcatgaaacttgcaatggtgcgcctttttccacaattgcgtgaagttggtgcccgcatgctcttgcaggtccacgatgaactcttgttagaagcgccaaaagagcgtgcggaagaggtggcagccctcgcgaaagaggttatggaaggcgtgtggcccttagcggtgcctcttgaagtcgaagttggtattggcgaggattggttggctgccaaaggataatga

SEQ ID NO: 772 - protein, 841 aa, synthetic construct
  REGION 1..841: note = Variant of DNA polymerase I from Thermus sp. strain 2.9
MHHHHHHGGSGMLPLFEPKGRVLLVDGHHLAYRNFFALKGLTTSRGEPVQGVYGFAKSLLKALKEDGDVVIVVFDAKAPSFRHEAYEAYKAGRAPTPEDFPRQLALMKELVDLLGLERLEVPGFEADDVLATLAKKAEREGYEVQILTADRDLFQLLSPRISVLHPEGHRITPEWLWEKYGLRPEQWVDFRALAGDPSDNIPGVKGIGEKTALKLLKEWGSLENLLKNLDQVKPESVREKILAHLEDLKLSRELSRVRTDLPLEVDFRGRREPDWEGLKAFLERLEFGSLLHEFGLLESPLPAEEAPWPPPEGAFLGYRLSRPEPMWAELLALAASAQGRVYRAEDPHGALRGLKEVRGLLAKDLAVVALREGLDLPPTDDPMLLAYLLDPSNTTPEGVARRYGGEWTEDAGERALLAERLHANLLGRLQGEERLLWLYEEVEKPLSRVLAHMEATGVKLDVAYLEALSLEVAAEMRRLEEEVFRLAGHSFNLNSRDQLERVLFDELGLPPIGKTEKTGKRSTSAAVLEALREAHPIVDKILQYRELAKLKGTYIDPLPALVHPKTGRLHTRFNQTATATGRLSSSDPNLQNIPVRTPLGQKIRRAFVAEEGWRLVALDYSQIELRVLAHLSGDENLIRVFQEGKDIHTQTASWMFGLSAEAIDPLMRRVAKTINFGVLYGMSAHRLSQELGIPYEEAAAFIQRYFQSYPKVKAWIEKTLEEGRTRGYVETLFGRRRYVPDLNARVKSVREAAERMAFNMPVQGTAADLMKLAMVRLFPQLREVGARMLLQVHDELLLEAPKERAEEVAALAKEVMEGVWPLAVPLEVEVGIGEDWLAAKG

SEQ ID NO: 773 - DNA, 2529 bp, synthetic construct
  misc_feature 1..2529: note = Variant of DNA polymerase I from Thermus sp. strain 2.9
  source 1..2529: mol_type = other DNA
atgcaccatcatcatcatcatggcggtagcggcatgttaccgttgttcgaacctaaaggtcgcgtgcttctggttgatggccatcatctcgcgtatcgtaacttctttgccctgaaaggattaaccaccagccgtggcgagccggtacagggtgtctacggctttgcaaagtcgctcctgaaagctctgaaagaagacggtgatgtggtgattgttgtctttgatgcgaaagcgccaagttttcgccacgaagcgtacgaagcttacaaagccgggcgtgctccaacgccggaagactttcctcgccaattggcgcttatgaaggaattagtggatttgcttggcctcgaacgcttggaagttcccggtttcgaggcagacgacgtattagcgactctcgcaaagaaagccgaacgtgagggctatgaagtccagatcttgacagcagatcgcgatcttttccagcttttatctccgcgcatctcggtgttacacccggaagggcatcgtatcaccccggaatggctctgggagaaatatggtttgcgtcccgaacaatgggtggattttcgcgccttagcaggcgatccgagcgacaatattccgggagttaaaggtatcggcgagaagacggcgctcaagctccttaaagaatgggggtcgttggagaacttgcttaagaatttagatcaggtcaaaccagagtcagtgcgtgagaagattcttgcacacctcgaagacctcaaattaagccgcgaattgtcccgtgtacgcaccgatttgccgctcgaagttgatttccgtggccgccgcgaacctgactgggagggtcttaaagcgtttttagagcgtcttgaatttggttcgctcttgcatgaattcggccttttagaaagcccgttaccagccgaagaagcaccttggccaccgcccgaaggcgcgtttttaggttaccgtttgagtcgcccggaaccgatgtgggccgaattattggctcttgcagcgtctgcccagggacgtgtgtatcgcgcggaagaccctcatggtgcgctccgcggcctcaaagaagtccgtggactccttgccaaagacttagctgttgttgcattgcgcgaaggtcttgatttacctccgactgatgatccaatgcttcttgcgtacctcttggacccgtcaaacacgacgcccgaaggcgtagcccgtcgttacggcggcgagtggaccgaagatgcaggcgagcgcgcgttattggccgaacgtttgcaccagaatttattaggacgtttgcaaggcgaggaacgtctcctctggctttacgaagaagtggagaaaccattgagtcgcgtgctcgctcatatggaagctaccggtgtcaaattagacgtggcgtatttggaggcactcagccttgaagttgctgccgaaatgcgccgcttggaggaagaagtattccgtttagcaggccactcctttaaccttaattctcgcgatcagttagaacgtgtgttgttcgatgaacttggtctccctcctatcggcaagacagagaagaccggtaaacgtagcacttcagcggcggttttagaagctcttcgcgaagtccatcccattgtggacaagatcttgcagtaccgcgaactcgcgaaattgaaaggcacctatattgaccctcttccggcattagtccacccgaaaacgggacgcctccatacccgcttcaaccaaacagccacggcgaccggtcgtttgtcctcctctgatccaaaccttcagaatattccagtacgtaccccattgggccagaagatccgccgcgcgtttgtagctgaggagggttggcgtttagtggccctcgattatagccaaattgaattacgtgtccttgcccatctttctggcgatgagaacctcatccgcgtgtttcaggaaggcaaagacattcacactcaaacggcaagctggatgtttggattatcagctgaagcgatcgatcctttgatgcgtcgtgcagcgaagaccatcaatttcggtgttctctacggtatgagtgcccatcgtttgtcgcaggaattaggcattccctatgaagaagctgcggcgttcattcagcgctactttcaaagctatcccaaagttaaagcatggatcgagaagactctcgaagaaggccgcacacgtggttacgtagagaccttatttggacgtcgccgctatgttcccgatttaaacgctcgcgtgaaatctgtccgtgaagccgccgaacgcatggcgttcaacatgcctgtacagggcacggcagctgacctcatgaaacttgcaatggtgcgcctttttccacaattgcgtgaagttggtgcccgcatgctcttgcaggtccacgatgaactcttgttagaagcgccaaaagagcgtgcggaagaggtggcagccctcgcgaaagaggttatggaaggcgtgtggcccttagcggtgcctcttgaagtcgaagttggtattggcgaggattggttggctgccaaaggataatga

SEQ ID NO: 774 - protein, 841 aa, synthetic construct
  REGION 1..841: note = Variant of DNA polymerase I from Thermus sp. strain 2.9
MHHHHHHGGSGMLPLFEPKGRVLLVDGHHLAYRNFFALKGLTTSRGEPVQGVYGFAKSLLKALKEDGDVVIVVFDAKAPSFRHEAYEAYKAGRAPTPEDFPRQLALMKELVDLLGLERLEVPGFEADDVLATLAKKAEREGYEVQILTADRDLFQLLSPRISVLHPEGHRITPEWLWEKYGLRPEQWVDFRALAGDPSDNIPGVKGIGEKTALKLLKEWGSLENLLKNLDQVKPESVREKILAHLEDLKLSRELSRVRTDLPLEVDFRGRREPDWEGLKAFLERLEFGSLLHEFGLLESPLPAEEAPWPPPEGAFLGYRLSRPEPMWAELLALAASAQGRVYRAEDPHGALRGLKEVRGLLAKDLAVVALREGLDLPPTDDPMLLAYLLDPSNTTPEGVARRYGGEWTEDAGERALLAERLHQNLLGRLQGEERLLWLYEEVEKPLSRVLAHMEATGVKLDVAYLEALSLEVAAEMRRLEEEVFRLAGHSFNLNSRDQLERVLFDELGLPPIGKTEKTGKRSTSAAVLEALREVHPIVDKILQYRELAKLKGTYIDPLPALVHPKTGRLHTRFNQTATATGRLSSSDPNLQNIPVRTPLGQKIRRAFVAEEGWRLVALDYSQIELRVLAHLSGDENLIRVFQEGKDIHTQTASWMFGLSAEAIDPLMRRAAKTINFGVLYGMSAHRLSQELGIPYEEAAAFIQRYFQSYPKVKAWIEKTLEEGRTRGYVETLFGRRRYVPDLNARVKSVREAAERMAFNMPVQGTAADLMKLAMVRLFPQLREVGARMLLQVHDELLLEAPKERAEEVAALAKEVMEGVWPLAVPLEVEVGIGEDWLAAKG

SEQ ID NO: 775 - DNA, 2529 bp, synthetic construct
  misc_feature 1..2529: note = Variant of DNA polymerase I from Thermus sp. strain 2.9
  source 1..2529: mol_type = other DNA
atgcaccatcatcatcatcatggcggtagcggcatgttaccgttgttcgaacctaaaggtcgcgtgcttctggttgatggccatcatctcgcgtatcgtaacttctttgccctgaaaggattaaccaccagccgtggcgagccggtacagggtgtctacggctttgcaaagtcgctcctgaaagctctgaaagaagacggtgatgtggtgattgttgtctttgatgcgaaagcgccaagttttcgccacgaagcgtacgaagcttacaaagccgggcgtgctccaacgccggaagactttcctcgccaattggcgcttatgaaggaattagtggatttgcttggcctcgaacgcttggaagttcccggtttcgaggcagacgacgtattagcgactctcgcaaagaaagccgaacgtgagggctatgaagtccagatcttgacagcagatcgcgatcttttccagcttttatctccgcgcatctcggtgttacacccggaagggcatcgtatcaccccggaatggctctgggagaaatatggtttgcgtcccgaacaatgggtggattttcgcgccttagcaggcgatccgagcgacaatattccgggagttaaaggtatcggcgagaagacggcgctcaagctccttaaagaatgggggtcgttggagaacttgcttaagaatttagatcaggtcaaaccagagtcagtgcgtgagaagattcttgcacacctcgaagacctcaaattaagccgcgaattgtcccgtgtacgcaccgatttgccgctcgaagttgatttccgtggccgccgcgaacctgactgggagggtcttaaagcgtttttagagcgtcttgaatttggttcgctcttgcatgaattcggccttttagaaagcccgttaccagccgaagaagcaccttggccaccgcccgaaggcgcgtttttaggttaccgtttgagtcgcccggaaccgatgtgggccgaattattggctcttgcagcgtctgcccagggacgtgtgtatcgcgcggaagaccctcatggtgcgctccgcggcctcaaagaagtccgtggactccttgccaaagacttagctgttgttgcattgcgcgaaggtcttgatttacctccgactgatgatccaatgcttcttgcgtacctcttggacccgtcaaacacgacgcccgaaggcgtagcccgtcgttacggcggcgagtggaccgaagatgcaggcgagcgcgcgttattggccgaacgtttgcacgcaaatttattaggacgtttgcaaggcgaggaacgtctcctctggctttacgaagaagtggagaaaccattgagtcgcgtgctcgctcatatggaagctaccggtgtcaaattagacgtggcgtatttggaggcactcagccttgaagttgctgccgaaatgcgccgcttggaggaagaagtattccgtttagcaggccactcctttaaccttaattctcgcgatcagttagaacgtgtgttgttcgatgaacttggtctccctcctatcggcaagacagagaagaccggtaaacgtagcacttcagcggcggttttagaagctcttcgcgaagtccatcccattgtggacaagatcttgcagtaccgcgaactcgcgaaattgaaaggcacctatattgaccgtcttccggcattagtccacccgaaaacgggacgcctccatacccgcttcaaccaaacagccacggcgaccggtcgtttgtcctcctctgatccaaaccttcagaatattccagtacgtaccccattgggccagaagatccgccgcgcgtttgtagctgaggagggttggcgtttagtggccctcgattatagccaaattgaattacgtgtccttgcccatctttctggcgatgagaacctcatccgcgtgtttcaggaaggcaaagacattcacactcaaacggcaagctggatgtttggattatcagctgaagcgatcgatcctttgatgcgtcgtgcagcgaagaccatcaatttcggtgttctctacggtatgagtgcccatcgtttgtcgcaggaattaggcattccctatgaagaagctgcggcgttcattcagcgctactttcaaagctatcccaaagttaaagcatggatcgagaagactctcgaagaaggccgcacacgtggttacgtagagaccttatttggacgtcgccgctatgttcccgatttaaacgctcgcgtgaaatctgtccgtgaagccgccgaacgcatggcgttcaacatgcctgtacagggcacggcagctgacctcatgaaacttgcaatggtgcgcctttttccacaattgcgtgaagttggtgcccgcatgctcttgcaggtccacgatgaactcttgttagaagcgccaaaagagcgtgcggaagaggtggcagccctcgcgaaagaggttatggaaggcgtgtggcccttagcggtgcctcttgaagtcgaagttggtattggcgaggattggttggctgccaaaggataatga

SEQ ID NO: 776 - protein, 841 aa, synthetic construct
  REGION 1..841: note = Variant of DNA polymerase I from Thermus sp. strain 2.9
MHHHHHHGGSGMLPLFEPKGRVLLVDGHHLAYRNFFALKGLTTSRGEPVQGVYGFAKSLLKALKEDGDVVIVVFDAKAPSFRHEAYEAYKAGRAPTPEDFPRQLALMKELVDLLGLERLEVPGFEADDVLATLAKKAEREGYEVQILTADRDLFQLLSPRISVLHPEGHRITPEWLWEKYGLRPEQWVDFRALAGDPSDNIPGVKGIGEKTALKLLKEWGSLENLLKNLDQVKPESVREKILAHLEDLKLSRELSRVRTDLPLEVDFRGRREPDWEGLKAFLERLEFGSLLHEFGLLESPLPAEEAPWPPPEGAFLGYRLSRPEPMWAELLALAASAQGRVYRAEDPHGALRGLKEVRGLLAKDLAVVALREGLDLPPTDDPMLLAYLLDPSNTTPEGVARRYGGEWTEDAGERALLAERLHANLLGRLQGEERLLWLYEEVEKPLSRVLAHMEATGVKLDVAYLEALSLEVAAEMRRLEEEVFRLAGHSFNLNSRDQLERVLFDELGLPPIGKTEKTGKRSTSAAVLEALREVHPIVDKILQYRELAKLKGTYIDRLPALVHPKTGRLHTRFNQTATATGRLSSSDPNLQNIPVRTPLGQKIRRAFVAEEGWRLVALDYSQIELRVLAHLSGDENLIRVFQEGKDIHTQTASWMFGLSAEAIDPLMRRAAKTINFGVLYGMSAHRLSQELGIPYEEAAAFIQRYFQSYPKVKAWIEKTLEEGRTRGYVETLFGRRRYVPDLNARVKSVREAAERMAFNMPVQGTAADLMKLAMVRLFPQLREVGARMLLQVHDELLLEAPKERAEEVAALAKEVMEGVWPLAVPLEVEVGIGEDWLAAKG

SEQ ID NO: 777 - DNA, 2529 bp, synthetic construct
  misc_feature 1..2529: note = Variant of DNA polymerase I from Thermus sp. strain 2.9
  source 1..2529: mol_type = other DNA
atgcaccatcatcatcatcatggcggtagcggcatgttaccgttgttcgaacctaaaggtcgcgtgcttctggttgatggccatcatctcgcgtatcgtaacttctttgccctgaaaggattaaccaccagccgtggcgagccggtacagggtgtctacggctttgcaaagtcgctcctgaaagctctgaaagaagacggtgatgtggtgattgttgtctttgatgcgaaagcgccaagttttcgccacgaagcgtacgaagcttacaaagccgggcgtgctccaacgccggaagactttcctcgccaattggcgcttatgaaggaattagtggatttgcttggcctcgaacgcttggaagttcccggtttcgaggcagacgacgtattagcgactctcgcaaagaaagccgaacgtgagggctatgaagtccagatcttgacagcagatcgcgatcttttccagcttttatctccgcgcatctcggtgttacacccggaagggcatctgatcaccccggaatggctctgggagaaatatggtttgcgtcccgaacaatgggtggattttcgcgccttagtcggcgatccgagcgacaatattccgggagttaaaggtatcggcgagaagacggcgctcaagctccttaaagaatgggggtcgttggagaacttgcttaagaatttagatcaggtcaaaccagagtcagtgcgtgagaagattcttgcacacctcgaagacctcaaattaagccgcgaattgtcccgtgtacgcaccgatttgccgctcgaagttgatttccgtggccgccgcgaacctgactgggagggtcttaaagcgtttttagagcgtcttgaatttggttcgctcttgcatgaattcggccttttagaaagcccgttaccagccgaagaagcaccttggccaccgcccgaaggcgcgtttttaggttaccgtttgagtcgcccggaaccgatgtgggccgaattattggctcttgcagcgtctgcccagggacgtgtgtatcgcgcggaagaccctcatggtgcgctccgcggcctcaaagaagtccgtggactccttgccaaagacttagctgttgttgcattgcgcgaaggtcttgatttacctccgactgatgatccaatgcttcttgcgtacctcttggacccgtcaaacacgacgcccgaaggcgtagcccgtcgttacggcggcgagtggaccgaagatgcaggcgagcgcgcgttattggccgaacgtttgcacgcaaatttattaggacgtttgcaaggcgaggaacgtctcctctggctttacgaagaagtggagaaaccattgagtcgcgtgctcgctcatatggaagctaccggtgtcaaattagacgtggcgtatttggaggcactcagccttgaagttgctgccgaaatgcgccgcttggaggaagaagtattccgtttagcaggccactcctttaaccttaattctcgcgatcagttagaacgtgtgttgttcgatgaacttggtctccctcctatcggcaagacagagaagaccggtaaacgtagcacttcagcggcggttttagaagctcttcgcgaagtccatcccattgtggacaagatcttgcagtaccgcgaactcgcgaaattgaaaggcacctatattgaccctcttccggcattagtccacccgaaaacgggacgcctccatacccgcttcaaccaaacagccacggcgaccggtcgtttgtcctcctctgatccaaaccttcagaatattccagtacgtaccccattgggccagaagatccgccgcgcgtttgtagctgaggagggttggcgtttagtggccctcgattatagccaaattgaattacgtgtccttgcccatctttctggcgatgagaacctcatccgcgtgtttcaggaaggcaaagacattcacactcaaacggcaagctggatgtttggagtgtcggcggaagcgatcgatcctttgatgcgtcgtgcagcgaagaccatcaatttcggtgttctctacggtatgagtgcccaccgtttgtcgcaggaattaggcattccctatgaagaagctgcggcgttcattcagcgctactttcaaagctatcccaaagttaaagcatggatcgagaagactctcgaagaaggccgcacacgtggttacgtagagaccttatttggacgtcgccgctatgttcccgatttaaccgctcgcgtgaaatctgtccgtgaagccgccgaacgcatggcgttcaacatgcctgtacagggcacggcagctgacctcatgaaacttgcaatggtgcgcctttttccacaattgcgtgaagttggtgcccgcatgctcttgcaggtccacgatgaactcttgttagaagcgccaaaagagcgtgcggaagaggtggcagccctcgcgaaagaggttatggaaggcgtgtggcccttagcggtgcctcttgaagtcgaagttggtattggcgaggattggttggctgccaaaggataatga

SEQ ID NO: 778 - protein, 841 aa, synthetic construct
  REGION 1..841: note = Variant of DNA polymerase I from Thermus sp. strain 2.9
MHHHHHHGGSGMLPLFEPKGRVLLVDGHHLAYRNFFALKGLTTSRGEPVQGVYGFAKSLLKALKEDGDVVIVVFDAKAPSFRHEAYEAYKAGRAPTPEDFPRQLALMKELVDLLGLERLEVPGFEADDVLATLAKKAEREGYEVQILTADRDLFQLLSPRISVLHPEGHLITPEWLWEKYGLRPEQWVDFRALVGDPSDNIPGVKGIGEKTALKLLKEWGSLENLLKNLDQVKPESVREKILAHLEDLKLSRELSRVRTDLPLEVDFRGRREPDWEGLKAFLERLEFGSLLHEFGLLESPLPAEEAPWPPPEGAFLGYRLSRPEPMWAELLALAASAQGRVYRAEDPHGALRGLKEVRGLLAKDLAVVALREGLDLPPTDDPMLLAYLLDPSNTTPEGVARRYGGEWTEDAGERALLAERLHANLLGRLQGEERLLWLYEEVEKPLSRVLAHMEATGVKLDVAYLEALSLEVAAEMRRLEEEVFRLAGHSFNLNSRDQLERVLFDELGLPPIGKTEKTGKRSTSAAVLEALREVHPIVDKILQYRELAKLKGTYIDPLPALVHPKTGRLHTRFNQTATATGRLSSSDPNLQNIPVRTPLGQKIRRAFVAEEGWRLVALDYSQIELRVLAHLSGDENLIRVFQEGKDIHTQTASWMFGVSAEAIDPLMRRAAKTINFGVLYGMSAHRLSQELGIPYEEAAAFIQRYFQSYPKVKAWIEKTLEEGRTRGYVETLFGRRRYVPDLTARVKSVREAAERMAFNMPVQGTAADLMKLAMVRLFPQLREVGARMLLQVHDELLLEAPKERAEEVAALAKEVMEGVWPLAVPLEVEVGIGEDWLAAKG

SEQ ID NO: 779 - DNA, 2529 bp, synthetic construct
  misc_feature 1..2529: note = Variant of DNA polymerase I from Thermus sp. strain 2.9
  source 1..2529: mol_type = other DNA
atgcaccatcatcatcatcatggcggtagcggcatgttaccgttgttcgaacctaaaggtcgcgtgcttctggttgatggccatcatctcgcgtatcgtaacttctttgccctgaaaggattaaccaccagccgtggcgagccggtacagggtgtctacggctttgcaaagtcgctcctgaaagctctgaaagaagacggtgatgtggtgattgttgtctttgatgcgaaagcgccaagttttcgccacgaagcgtacgaagcttacaaagccgggcgtgctccaacgccggaagactttcctcgccaattggcgcttatgaaggaattagtggatttgcttggcctcgaacgcttggaagttcccggtttcgaggcagacgacgtattagcgactctcgcaaagaaagccgaacgtgagggctatgaagtccagatcttgacagcagatcgcgatcttttccagcttttatctccgcgcatctcggtgttacacccggaagggcatcgtatcaccccggaatggctctgggagaaatatggtttgcgtcccgaacaatgggtggattttcgcgccttagcaggcgatccgagcgacaatattccgggagttaaaggtatcggcgagaagacggcgctcaagctccttaaagaatgggggtcgttggagaacttgcttaagaatttagatcaggtcaaaccagagtcagtgcgtgagaagattcttgcacacctcgaagacctcaaattaagccgcgaattgtcccgtgtacgcaccgatttgccgctcgaagttgatttccgtggccgccgcgaacctgactgggagggtcttaaagcgtttttagagcgtcttgaatttggttcgctcttgcatgaattcggccttttagaaagcccgttaccagccgaagaagcaccttggccaccgcccgaaggcgcgtttttaggttaccgtttgagtcgcccggaaccgatgtgggccgaattattggctcttgcagcgtctgcccagggacgtgtgtatcgcgcggaagaccctcatggtgcgctccgcggcctcaaagaagtccgtggactccttgccaaagacttagctgttgttgcattgcgcgaaggtcttgatttacctccgactgatgatccaatgcttcttgcgtacctcttggacccgtcaaacacgacgcccgaaggcgtagcccgtcgttacggcggcgagtggaccgaagatgcaggcgagcgcgcgttattggccgaacgtttgcaccagaatttattaggacgtttgcaaggcgaggaacgtctcctctggctttacgaagaagtggagaaaccattgagtcgcgtgctcgctcatatggaagctaccggtgtcaaattagacgtggcgtatttggaggcactcagccttgaagttgctgccgaaatgcgccgcttggaggaagaagtattccgtttagcaggccactcctttaaccttaattctcgcgatcagttagaacgtgtgttgttcgatgaacttggtctccctcctatcggcaagacagagaagaccggtaaacgtagcacttcagcggcggttttagaagctcttcgcgaagtccatcccattgtggacaagatcttgcagtaccgcgaactcgcgaaattgaaaggcacctatattgaccgtcttccggcattagtccacccgaaaacgggacgcctccatacccgcttcaaccaaacagccacggcgaccggtcgtttgtcctcctctgatccaaaccttcagaatattccagtacgtaccccattgggccagaagatccgccgcgcgtttgtagctgaggagggttggcgtttagtggccctcgattatagccaaattgaattacgtgtccttgcccatctttctggcgatgagaacctcatccgcgtgtttcaggaaggcaaagacattcacactcaaacggcaagctggatgtttggagtgccgtcggaagcgatcgatcctttgatgcgtcgtgcagcgaagaccatcaatttcggtgttctctacggtatgagtgccgctcgtttgtcgcaggaattaggcattccctatgaagaagctgcggcgttcattcagcgctactttcaaagctatcccaaagttaaagcatggatcgagaagactctcgaagaaggccgcacacgtggttacgtagagaccttatttggacgtcgccgctatgttcccgatttaaacgctcgcgtgaaatctgtccgtgaagccgccgaacgcatggcgttcaacatgcctgtacagggcacggcagctgacctcatgaaacttgcaatggtgcgcctttttccacaattgcgtgaagttggtgcccgcatgctcttgcaggtccacgatgaactcttgttagaagcgccaaaagagcgtgcggaagaggtggcagccctcgcgaaagaggttatggaaggcgtgtggcccttagcggtgcctcttgaagtcgaagttggtattggcgaggattggttggctgccaaaggataatga

SEQ ID NO: 780 - protein, 841 aa, synthetic construct
  REGION 1..841: note = Variant of DNA polymerase I from Thermus sp. strain 2.9
MHHHHHHGGSGMLPLFEPKGRVLLVDGHHLAYRNFFALKGLTTSRGEPVQGVYGFAKSLLKALKEDGDVVIVVFDAKAPSFRHEAYEAYKAGRAPTPEDFPRQLALMKELVDLLGLERLEVPGFEADDVLATLAKKAEREGYEVQILTADRDLFQLLSPRISVLHPEGHRITPEWLWEKYGLRPEQWVDFRALAGDPSDNIPGVKGIGEKTALKLLKEWGSLENLLKNLDQVKPESVREKILAHLEDLKLSRELSRVRTDLPLEVDFRGRREPDWEGLKAFLERLEFGSLLHEFGLLESPLPAEEAPWPPPEGAFLGYRLSRPEPMWAELLALAASAQGRVYRAEDPHGALRGLKEVRGLLAKDLAVVALREGLDLPPTDDPMLLAYLLDPSNTTPEGVARRYGGEWTEDAGERALLAERLHQNLLGRLQGEERLLWLYEEVEKPLSRVLAHMEATGVKLDVAYLEALSLEVAAEMRRLEEEVFRLAGHSFNLNSRDQLERVLFDELGLPPIGKTEKTGKRSTSAAVLEALREVHPIVDKILQYRELAKLKGTYIDRLPALVHPKTGRLHTRFNQTATATGRLSSSDPNLQNIPVRTPLGQKIRRAFVAEEGWRLVALDYSQIELRVLAHLSGDENLIRVFQEGKDIHTQTASWMFGVPSEAIDPLMRRAAKTINFGVLYGMSAARLSQELGIPYEEAAAFIQRYFQSYPKVKAWIEKTLEEGRTRGYVETLFGRRRYVPDLNARVKSVREAAERMAFNMPVQGTAADLMKLAMVRLFPQLREVGARMLLQVHDELLLEAPKERAEEVAALAKEVMEGVWPLAVPLEVEVGIGEDWLAAKG

SEQ ID NO: 781 - DNA, 2529 bp, synthetic construct
  misc_feature 1..2529: note = Variant of DNA polymerase I from Thermus sp. strain 2.9
  source 1..2529: mol_type = other DNA
atgcaccatcatcatcatcatggcggtagcggcatgttaccgttgttcgaacctaaaggtcgcgtgcttctggttgatggccatcatctcgcgtatcgtaacttctttgccctgaaaggattaaccaccagccgtggcgagccggtacagggtgtctacggctttgcaaagtcgctcctgaaagctctgaaagaagacggtgatgtggtgattgttgtctttgatgcgaaagcgccaagttttcgccacgaagcgtacgaagcttacaaagccgggcgtgctccaacgccggaagactttcctcgccaattggcgcttatgaaggaattagtggatttgcttggcctcgaacgcttggaagttcccggtttcgaggcagacgacgtattagcgactctcgcaaagaaagccgaacgtgagggctatgaagtccagatcttgacagcagatcgcgatcttttccagcttttatctccgcgcatctcggtgttacacccggaagggcatcgtatcaccccggaatggctctgggagaaatatggtttgcgtcccgaacaatgggtggattttcgcgccttagcaggcgatccgagcgacaatattccgggagttaaaggtatcggcgagaagacggcgctcaagctccttaaagaatgggggtcgttggagaacttgcttaagaatttagatcaggtcaaaccagagtcagtgcgtgagaagattcttgcacacctcgaagacctcaaattaagccgcgaattgtcccgtgtacgcaccgatttgccgctcgaagttgatttccgtggccgccgcgaacctgactgggagggtcttaaagcgtttttagagcgtcttgaatttggttcgctcttgcatgaattcggccttttagaaagcccgttaccagccgaagaagcaccttggccaccgcccgaaggcgcgtttttaggttaccgtttgagtcgcccggaaccgatgtgggccgaattattggctcttgcagcgtctgcccagggacgtgtgtatcgcgcggaagaccctcatggtgcgctccgcggcctcaaagaagtccgtggactccttgccaaagacttagctgttgttgcattgcgcgaaggtcttgatttacctccgactgatgatccaatgcttcttgcgtacctcttggacccgtcaaacacgacgcccgaaggcgtagcccgtcgttacggcggcgagtggaccgaagatgcaggcgagcgcgcgttattggccgaacgtttgcaccagaatttattaggacgtttgcaaggcgaggaacgtctcctctggctttacgaagaagtggagaaaccattgagtcgcgtgctcgctcatatggaagctaccggtgtcaaattagacgtggcgtatttggaggcactcagccttgaagttgctgccgaactgcgccgcttggaggaagaagtattccgtttagcaggccactcctttaaccttaattctcgcgatcagttagaacgtgtgttgttcgatgaacttggtctccctcctatcggcaagacagagaagaccggtaaacgtagcacttcagcggcggttttagaagctcttcgcgaagtccatcccattgtggacaagatcttgcagtaccgcgaactcgcgaaattgaaaggcacctatattgaccctcttccggcattagtccacccgaaaacgggacgcctccatacccgcttcaaccaaacagccacggcgaccggtcgtttgtcctcctctgatccaaaccttcagaatattccagtacgtaccccattgggccagaagatccgccgcgcgtttgtagctgaggagggttggcgtttagtggccctcgattatagccaaattgaattacgtgtccttgcccatctttctggcgatgagaacctcatccgcgtgtttcaggaaggcaaagacattcacactcaaacggcaagctggatgtttggagtgtcggcggaagcgatcgatcctttgatgcgtcgtgcagcgaagaccatcaatttcggtgttctctacggtatgagtgccgctcgtttgtcgcaggaattaggcattccctatgaagaagctgcggcgttcattcagcgctactttcaaagctatcccaaagttaaagcatggatcgagaagactctcgaagaaggccgcacacgtggttacgtagagaccttatttggacgtcgccgctatgttcccgatttaaccgctcgcgtgaaatctgtccgtgaagccgccgaacgcatggcgttcaacatgcctgtacagggcacggcagctgacctcatgaaacttgcaatggtgcgcctttttccacaattgcgtgaagttggtgcccgcatgctcttgcaggtccacgatgaactcttgttagaagcgccaaaagagcgtgcggaagaggtggcagccctcgcgaaagaggttatggaaggcgtgtggcccttagcggtgcctcttgaagtcgaagttggtattggcgaggattggttggctgccaaaggataatga

SEQ ID NO: 782 - protein, 841 aa, synthetic construct
  REGION 1..841: note = Variant of DNA polymerase I from Thermus sp. strain 2.9
MHHHHHHGGSGMLPLFEPKGRVLLVDGHHLAYRNFFALKGLTTSRGEPVQGVYGFAKSLLKALKEDGDVVIVVFDAKAPSFRHEAYEAYKAGRAPTPEDFPRQLALMKELVDLLGLERLEVPGFEADDVLATLAKKAEREGYEVQILTADRDLFQLLSPRISVLHPEGHRITPEWLWEKYGLRPEQWVDFRALAGDPSDNIPGVKGIGEKTALKLLKEWGSLENLLKNLDQVKPESVREKILAHLEDLKLSRELSRVRTDLPLEVDFRGRREPDWEGLKAFLERLEFGSLLHEFGLLESPLPAEEAPWPPPEGAFLGYRLSRPEPMWAELLALAASAQGRVYRAEDPHGALRGLKEVRGLLAKDLAVVALREGLDLPPTDDPMLLAYLLDPSNTTPEGVARRYGGEWTEDAGERALLAERLHQNLLGRLQGEERLLWLYEEVEKPLSRVLAHMEATGVKLDVAYLEALSLEVAAELRRLEEEVFRLAGHSFNLNSRDQLERVLFDELGLPPIGKTEKTGKRSTSAAVLEALREVHPIVDKILQYRELAKLKGTYIDPLPALVHPKTGRLHTRFNQTATATGRLSSSDPNLQNIPVRTPLGQKIRRAFVAEEGWRLVALDYSQIELRVLAHLSGDENLIRVFQEGKDIHTQTASWMFGVSAEAIDPLMRRAAKTINFGVLYGMSAARLSQELGIPYEEAAAFIQRYFQSYPKVKAWIEKTLEEGRTRGYVETLFGRRRYVPDLTARVKSVREAAERMAFNMPVQGTAADLMKLAMVRLFPQLREVGARMLLQVHDELLLEAPKERAEEVAALAKEVMEGVWPLAVPLEVEVGIGEDWLAAKG

SEQ ID NO: 783 - DNA, 2529 bp, synthetic construct
  misc_feature 1..2529: note = Variant of DNA polymerase I from Thermus sp. strain 2.9
  source 1..2529: mol_type = other DNA
atgcaccatcatcatcatcatggcggtagcggcatgttaccgttgttcgaacctaaaggtcgcgtgcttctggttgatggccatcatctcgcgtatcgtaacttctttgccctgaaaggattaaccaccagccgtggcgagccggtacagggtgtctacggctttgcaaagtcgctcctgaaagctctgaaagaagacggtgatgtggtgattgttgtctttgatgcgaaagcgccaagttttcgccacgaagcgtacgaagcttacaaagccgggcgtgctccaacgccggaagactttcctcgccaattggcgcttatgaaggaattagtggatttgcttggcctcgaacgcttggaagttcccggtttcgaggcagacgacgtattagcgactctcgcaaagaaagccgaacgtgagggctatgaagtccagatcttgacagcagatcgcgatcttttccagcttttatctccgcgcatctcggtgttacacccggaagggcatcgtatcaccccggaatggctctgggagaaatatggtttgcgtcccgaacaatgggtggattttcgcgccttagcaggcgatccgagcgacaatattccgggagttaaaggtatcggcgagaagacggcgctcaagctccttaaagaatgggggtcgttggagaacttgcttaagaatttagatcaggtcaaaccagagtcagtgcgtgagaagattcttgcacacctcgaagacctcaaattaagccgcgaattgtcccgtgtacgcaccgatttgccgctcgaagttgatttccgtggccgccgcgaacctgactgggagggtcttaaagcgtttttagagcgtcttgaatttggttcgctcttgcatgaattcggccttttagaaagcccgttaccagccgaagaagcaccttggccaccgcccgaaggcgcgtttttaggttaccgtttgagtcgcccggaaccgatgtgggccgaattattggctcttgcagcgtctgcccagggacgtgtgtatcgcgcggaagaccctcatggtgcgctccgcggcctcaaagaagtccgtggactccttgccaaagacttagctgttgttgcattgcgcgaaggtcttgatttacctccgactgatgatccaatgcttcttgcgtacctcttggacccgtcaaacacgacgcccgaaggcgtagcccgtcgttacggcggcgagtggaccgaagatgcaggcgagcgcgcgttattggccgaacgtttgcaccagaatttattaggacgtttgcaaggcgaggaacgtctcctctggctttacgaagaagtggagaaaccattgagtcgcgtgctcgcgcatatggaagctaccggtgtcaaattagacgtggcgtatttggaggcactcagccttgaagttgctgccgaaatgcgccgcttggaggaagaagtattccgtttagcaggccactcctttaaccttaattctcgcgatcagttagaacgtgtgttgttcgatgaacttggtctccctcctatcggcaagacagagaagaccggtaaacgtagcacttcagcggcggttttagaagctcttcgcgaagtccatcccattgtggacaagatcttgcagtaccgcgaactcgcgaaattgaaaggcacctatattgaccctcttccggcattagtccacccgaaaacgggacgcctccatacccgcttcaaccaaacagccacggcgaccggtcgtttgtcctcctctgatccaaaccttcagaatattccagtacgtaccccattgggccagaagatccgccgcgcgtttgtagctgaggagggttggcgtttagtggccctcgattatagccaaattgaattacgtgtccttgcccatctttctggcgatgagaacctcatccgcgtgtttcaggaaggcaaagacattcacactcaaacggcaagctggatgtttggagtgccgtcggaagcgatcgatcctttgatgcgtcgtgcagcgaagaccatcaatttcggtgttctctacggtatgagtgcccatcgtttgtcgcaggaattaggcattccctatgaagaagctgcggcgttcattcagcgctactttcaaagctatcccaaagttaaagcatggatcgagaagactctcgaagaaggccgcacacgtggttacgtagagaccttatttggacgtcgccgctatgttcccgatttaaacgctcgcgtgaaatctgtccgtgaagccgccgaacgcatggcgttcaacatgcctgtacagggcacggcagctgacctcatgaaacttgcaatggtgcgcctttttccacaattgcgtgaagttggtgcccgcatgctcttgcaggtccacgatgaactcttgttagaagcgccaaaagagcgtgcggaagaggtggcagccctcgcgaaagaggttatggaaggcgtgtggcccttagcggtgcctcttgaagtcgaagttggtattggcgaggattggttggctgccaaaggataatga

SEQ ID NO: 784 - protein, 841 aa, synthetic construct
  REGION 1..841: note = Variant of DNA polymerase I from Thermus sp. strain 2.9
MHHHHHHGGSGMLPLFEPKGRVLLVDGHHLAYRNFFALKGLTTSRGEPVQGVYGFAKSLLKALKEDGDVVIVVFDAKAPSFRHEAYEAYKAGRAPTPEDFPRQLALMKELVDLLGLERLEVPGFEADDVLATLAKKAEREGYEVQILTADRDLFQLLSPRISVLHPEGHRITPEWLWEKYGLRPEQWVDFRALAGDPSDNIPGVKGIGEKTALKLLKEWGSLENLLKNLDQVKPESVREKILAHLEDLKLSRELSRVRTDLPLEVDFRGRREPDWEGLKAFLERLEFGSLLHEFGLLESPLPAEEAPWPPPEGAFLGYRLSRPEPMWAELLALAASAQGRVYRAEDPHGALRGLKEVRGLLAKDLAVVALREGLDLPPTDDPMLLAYLLDPSNTTPEGVARRYGGEWTEDAGERALLAERLHQNLLGRLQGEERLLWLYEEVEKPLSRVLAHMEATGVKLDVAYLEALSLEVAAEMRRLEEEVFRLAGHSFNLNSRDQLERVLFDELGLPPIGKTEKTGKRSTSAAVLEALREVHPIVDKILQYRELAKLKGTYIDPLPALVHPKTGRLHTRFNQTATATGRLSSSDPNLQNIPVRTPLGQKIRRAFVAEEGWRLVALDYSQIELRVLAHLSGDENLIRVFQEGKDIHTQTASWMFGVPSEAIDPLMRRAAKTINFGVLYGMSAHRLSQELGIPYEEAAAFIQRYFQSYPKVKAWIEKTLEEGRTRGYVETLFGRRRYVPDLNARVKSVREAAERMAFNMPVQGTAADLMKLAMVRLFPQLREVGARMLLQVHDELLLEAPKERAEEVAALAKEVMEGVWPLAVPLEVEVGIGEDWLAAKG

SEQ ID NO: 785 - DNA, 2529 bp, synthetic construct
  misc_feature 1..2529: note = Variant of DNA polymerase I from Thermus sp. strain 2.9
  source 1..2529: mol_type = other DNA
atgcaccatcatcatcatcatggcggtagcggcatgttaccgttgttcgaacctaaaggtcgcgtgcttctggttgatggccatcatctcgcgtatcgtaacttctttgccctgaaaggattaaccaccagccgtggcgagccggtacagggtgtctacggctttgcaaagtcgctcctgaaagctctgaaagaagacggtgatgtggtgattgttgtctttgatgcgaaagcgccaagttttcgccacgaagcgtacgaagcttacaaagccgggcgtgctccaacgccggaagactttcctcgccaattggcgcttatgaaggaattagtggatttgcttggcctcgaacgcttggaagttcccggtttcgaggcagacgacgtattagcgactctcgcaaagaaagccgaacgtgagggctatgaagtccagatcttgacagcagatcgcgatcttttccagcttttatctccgcgcatctcggtgttacacccggaagggcatcgtatcaccccggaatggctctgggagaaatatggtttgcgtcccgaacaatgggtggattttcgcgccttagcaggcgatccgagcgacaatattccgggagttaaaggtatcggcgagaagacggcgctcaagctccttaaagaatgggggtcgttggagaacttgcttaagaatttagatcaggtcaaaccagagtcagtgcgtgagaagattcttgcacacctcgaagacctcaaattaagccgcgaattgtcccgtgtacgcaccgatttgccgctcgaagttgatttccgtggccgccgcgaacctgacatggagggtcttaaagcgtttttagagcgtcttgaatttggttcgctcttgcatgaattcggccttttagaaagcccgttaccagccgaagaagcaccttggccaccgcccgaaggcgcgtttttaggttaccgtttgagtcgcccggaaccgatgtgggccgaattattggctcttgcagcgtctgcccagggacgtgtgtatcgcgcggaagaccctcatggtgcgctccgcggcctcaaagaagtccgtggactccttgccaaagacttagctgttgttgcattgcgcgaaggtcttgatttacctccgactgatgatccaatgcttcttgcgtacctcttggacccgtcaaacacgacgcccgaaggcgtagcccgtcgttacggcggcgagtggaccgaagatgcaggcgagcgcgcgttattggccgaacgtttgcacgccaatttattaggacgtttgcaaggcgaggaacgtctcctctggctttacgaagaagtggagaaaccattgagtcgcgtgctcgcgcatatggaagctaccggtgtcaaattagacgtggcgtatttggaggcactcagccttgaagttgctgccgaaatgcgccgcttggaggaagaagtattccgtttagcaggccactcctttaaccttaattctcgcgatcagttagaacgtgtgttgttcgatgaacttggtctccctcctatcggcaagacagagaagaccggtaaacgtagcacttcagcggcggttttagaagctcttcgcgaagtccatcccattgtggacaagatcttgcagtaccgcgaactcgcgaaattgaaaggcacctatattgaccctcttccggcattagtccacccgaaaacgggacgcctccatacccgcttcaaccaaacagccacggcgaccggtcgtttgtcctcctctgatccaaaccttcagaatattccagtacgtaccccattgggccagaagatccgccgcgcgtttgtagctgaggagggttggcgtttagtggccctcgattatagccaaattgaattacgtgtccttgcccatctttctggcgatgagaacctcatccgcgtgtttcaggaaggcaaagacattcacactcaaacggcaagctggatgtttggattatcagctgaagcgatcgatcctttgatgcgtcgtgcagcgaagaccatcaatttcggtgttctctacggtatgagtgcccatcgtttgtcgcaggaattaggcattccctatgaagaagctgcggcgttcattcagcgctactttcaaagctatcccaaagttaaagcatggatcgagaagactctcgaagaaggccgcacacgtggttacgtagagaccttatttggacgtcgccgctatgttcccgatttaaacgctcgcgtgaaatctgtccgtgaagccgccgaacgcatggcgttcaacatgcctgtacagggcacggcagctgacctcatgaaacttgcaatggtgcgcctttttccacaattgcgtgaagttggtgcccgcatgctcttgcaggtccacgatgaactcttgttagaagcgccaaaagagcgtgcggaagaggtggcagccctcgcgaaagaggttatggaaggcgtgtggcccttagcggtgcctcttgaagtcgaagttggtattggcgaggattggttggctgccaaaggataatga

SEQ ID NO: 786 - protein, 841 aa, synthetic construct
  REGION 1..841: note = Variant of DNA polymerase I from Thermus sp. strain 2.9
MHHHHHHGGSGMLPLFEPKGRVLLVDGHHLAYRNFFALKGLTTSRGEPVQGVYGFAKSLLKALKEDGDVVIVVFDAKAPSFRHEAYEAYKAGRAPTPEDFPRQLALMKELVDLLGLERLEVPGFEADDVLATLAKKAEREGYEVQILTADRDLFQLLSPRISVLHPEGHRITPEWLWEKYGLRPEQWVDFRALAGDPSDNIPGVKGIGEKTALKLLKEWGSLENLLKNLDQVKPESVREKILAHLEDLKLSRELSRVRTDLPLEVDFRGRREPDMEGLKAFLERLEFGSLLHEFGLLESPLPAEEAPWPPPEGAFLGYRLSRPEPMWAELLALAASAQGRVYRAEDPHGALRGLKEVRGLLAKDLAVVALREGLDLPPTDDPMLLAYLLDPSNTTPEGVARRYGGEWTEDAGERALLAERLHANLLGRLQGEERLLWLYEEVEKPLSRVLAHMEATGVKLDVAYLEALSLEVAAEMRRLEEEVFRLAGHSFNLNSRDQLERVLFDELGLPPIGKTEKTGKRSTSAAVLEALREVHPIVDKILQYRELAKLKGTYIDPLPALVHPKTGRLHTRFNQTATATGRLSSSDPNLQNIPVRTPLGQKIRRAFVAEEGWRLVALDYSQIELRVLAHLSGDENLIRVFQEGKDIHTQTASWMFGLSAEAIDPLMRRAAKTINFGVLYGMSAHRLSQELGIPYEEAAAFIQRYFQSYPKVKAWIEKTLEEGRTRGYVETLFGRRRYVPDLNARVKSVREAAERMAFNMPVQGTAADLMKLAMVRLFPQLREVGARMLLQVHDELLLEAPKERAEEVAALAKEVMEGVWPLAVPLEVEVGIGEDWLAAKG

SEQ ID NO: 787 - DNA, 2529 bp, synthetic construct
  misc_feature 1..2529: note = Variant of DNA polymerase I from Thermus sp. strain 2.9
  source 1..2529: mol_type = other DNA
atgcaccatcatcatcatcatggcggtagcggcatgttaccgttgttcgaacctaaaggtcgcgtgcttctggttgatggccatcatctcgcgtatcgtaacttctttgccctgaaaggattaaccaccagccgtggcgagccggtacagggtgtctacggctttgcaaagtcgctcctgaaagctctgaaagaagacggtgatgtggtgattgttgtctttgatgcgaaagcgccaagttttcgccacgaagcgtacgaagcttacaaagccgggcgtgctccaacgccggaagactttcctcgccaattggcgcttatgaaggaattagtggatttgcttggcctcgaacgcttggaagttcccggtttcgaggcagacgacgtattagcgactctcgcaaagaaagccgaacgtgagggctatgaagtccagatcttgacagcagatcgcgatcttttccagcttttatctccgcgcatctcggtgttacacccggaagggcatcgtatcaccccggaatggctctgggagaaatatggtttgcgtcccgaacaatgggtggattttcgcgccttagcaggcgatccgagcgacaatattccgggagttaaaggtatcggcgagaagacggcgctcaagctccttaaagaatgggggtcgttggagaacttgcttaagaatttagatcaggtcaaaccagagtcagtgcgtgagaagattcttgcacacctcgaagacctcaaattaagccgcgaattgtcccgtgtacgcaccgatttgccgctcgaagttgatttccgtggccgccgcgaacctgactgggagggtcttaaagcgtttttagagcgtcttgaatttggttcgctcttgcatgaattcggccttttagaaagcccgttaccagccgaagaagcaccttggccaccgcccgaaggcgcgtttttaggttaccgtttgagtcgcccggaaccgatgtgggccgaattattggctcttgcagcgtctgcccagggacgtgtgtatcgcgcggaagaccctcatggtgcgctccgcggcctcaaagaagtccgtggactccttgccaaagacttagctgttgttgcattgcgcgaaggtcttgatttacctccgactgatgatccaatgcttcttgcgtacctcttggacccgtcaaacacgacgcccgaaggcgtagcccgtcgttacggcggcgagtggaccgaagatgcaggcgagcgcgcgttattggccgaacgtttgcacgcaaatttattaggacgtttgcaaggcgaggaacgtctcctctggctttacgaagaagtggagaaaccattgagtcgcgtgctcgcgcatatggaagctaccggtgtcaaattagacgtggcgtatttggaggcactcagccttgaagttgctgccgaaatgcgccgcttggaggaagaagtattccgtttagcaggccactcctttaaccttaattctcgcgatcagttagaacgtgtgttgttcgatgaacttggtctccctcctatcggcaagacagagaagaccggtaaacgtagcacttcagcggcggttttagaagctcttcgcgaagtccatcccattgtggacaagatcttgcagtaccgcgaactcgcgaaattgaaaggcacctatattgaccgtcttccggcattagtccacccgaaaacgggacgcctccatacccgcttcaaccaaacagccacggcgaccggtcgtttgtcctcctctgatccaaaccttcagaatattccagtacgtaccccattgggccagaagatccgccgcgcgtttgtagctgaggagggttggcgtttagtggccctcgattatagccaaattgaattacgtgtccttgcccatctttctggcgatgagaacctcatccgcgtgtttcaggaaggcaaagacattcacactcaaacggcaagctggatgtttggagtgtcggcggaagcgatcgatcctttgatgcgtcgtgcagcgaagaccatcaatttcggtgttctctacggtatgagtgcccatcgtttgtcgcaggaattaggcattccctatgaagaagctgcggcgttcattcagcgctactttcaaagctatcccaaagttaaagcatggatcgagaagactctcgaagaaggccgcacacgtggttacgtagagaccttatttggacgtcgccgctatgttcccgatttaaacgctcgcgtgaaatctgtccgtgaagccgccgaacgcatggcgttcaacatgcctgtacagggcacggcagctgacctcatgaaacttgcaatggtgcgcctttttccacaattgcgtgaagttggtgcccgcatgctcttgcaggtccacgatgaactcttgttagaagcgccaaaagagcgtgcggaagaggtggcagccctcgcgaaagaggttatggaaggcgtgtggcccttagcggtgcctcttgaagtcgaagttggtattggcgaggattggttggctgccaaaggataatga

SEQ ID NO: 788 - protein, 841 aa, synthetic construct
  REGION 1..841: note = Variant of DNA polymerase I from Thermus sp. strain 2.9
MHHHHHHGGSGMLPLFEPKGRVLLVDGHHLAYRNFFALKGLTTSRGEPVQGVYGFAKSLLKALKEDGDVVIVVFDAKAPSFRHEAYEAYKAGRAPTPEDFPRQLALMKELVDLLGLERLEVPGFEADDVLATLAKKAEREGYEVQILTADRDLFQLLSPRISVLHPEGHRITPEWLWEKYGLRPEQWVDFRALAGDPSDNIPGVKGIGEKTALKLLKEWGSLENLLKNLDQVKPESVREKILAHLEDLKLSRELSRVRTDLPLEVDFRGRREPDWEGLKAFLERLEFGSLLHEFGLLESPLPAEEAPWPPPEGAFLGYRLSRPEPMWAELLALAASAQGRVYRAEDPHGALRGLKEVRGLLAKDLAVVALREGLDLPPTDDPMLLAYLLDPSNTTPEGVARRYGGEWTEDAGERALLAERLHANLLGRLQGEERLLWLYEEVEKPLSRVLAHMEATGVKLDVAYLEALSLEVAAEMRRLEEEVFRLAGHSFNLNSRDQLERVLFDELGLPPIGKTEKTGKRSTSAAVLEALREVHPIVDKILQYRELAKLKGTYIDRLPALVHPKTGRLHTRFNQTATATGRLSSSDPNLQNIPVRTPLGQKIRRAFVAEEGWRLVALDYSQIELRVLAHLSGDENLIRVFQEGKDIHTQTASWMFGVSAEAIDPLMRRAAKTINFGVLYGMSAHRLSQELGIPYEEAAAFIQRYFQSYPKVKAWIEKTLEEGRTRGYVETLFGRRRYVPDLNARVKSVREAAERMAFNMPVQGTAADLMKLAMVRLFPQLREVGARMLLQVHDELLLEAPKERAEEVAALAKEVMEGVWPLAVPLEVEVGIGEDWLAAKG

SEQ ID NO: 789 - DNA, 2529 bp, synthetic construct
  misc_feature 1..2529: note = Variant of DNA polymerase I from Thermus sp. strain 2.9
  source 1..2529: mol_type = other DNA
atgcaccatcatcatcatcatggcggtagcggcatgttaccgttgttcgaacctaaaggtcgcgtgcttctggttgatggccatcatctcgcgtatcgtaacttctttgccctgaaaggattaaccaccagccgtggcgagccggtacagggtgtctacggctttgcaaagtcgctcctgaaagctctgaaagaagacggtgatgtggtgattgttgtctttgatgcgaaagcgccaagttttcgccacgaagcgtacgaagcttacaaagccgggcgtgctccaacgccggaagactttcctcgccaattggcgcttatgaaggaattagtggatttgcttggcctcgaacgcttggaagttcccggtttcgaggcagacgacgtattagcgactctcgcaaagaaagccgaacgtgagggctatgaagtccagatcttgacagcagatcgcgatcttttccagcttttatctccgcgcatctcggtgttacacccggaagggcatcgtatcaccccggaatggctctgggagaaatatggtttgcgtcccgaacaatgggtggattttcgcgccttagcaggcgatccgagcgacaatattccgggagttaaaggtatcggcgagaagacggcgctcaagctccttaaagaatgggggtcgttggagaacttgcttaagaatttagatcaggtcaaaccagagtcagtgcgtgagaagattcttgcacacctcgaagacctcaaattaagccgcgaattgtcccgtgtacgcaccgatttgccgctcgaagttgatttccgtggccgccgcgaacctgactgggagggtcttaaagcgtttttagagcgtcttgaatttggttcgctcttgcatgaattcggccttttagaaagcccgttaccagccgaagaagcaccttggccaccgcccgaaggcgcgtttttaggttaccgtttgagtcgcccggaaccgatgtgggccgaattattggctcttgcagcgtctgcccagggacgtgtgtatcgcgcggaagaccctcatggtgcgctccgcggcctcaaagaagtccgtggactccttgccaaagacttagctgttgttgcattgcgcgaaggtcttgatttacctccgactgatgatccaatgcttcttgcgtacctcttggacccgtcaaacacgacgcccgaaggcgtagcccgtcgttacggcggcgagtggaccgaagatgcaggcgagcgcgcgttattggccgaacgtttgcacgcaaatttattaggacgtttgcaaggcgaggaacgtctcctctggctttacgaagaagtggagaaaccattgagtcgcgtgctcgcgcatatggaagctaccggtgtcaaattagacgtggcgtatttggaggcactcagccttgaagttgctgccgaaatgcgccgcttggaggaagaagtattccgtttagcaggccactcctttaaccttaattctcgcgatcagttagaacgtgtgttgttcgatgaacttggtctccctcctatcggcaagacagagaagaccggtaaacgtagcacttcagcggcggttttagaagctcttcgcgaagtccatcccattgtggacaagatcttgcagtaccgcgaactcgcgaaattgaaaggcacctatattgaccgtcttccggcattagtccacccgaaaacgggacgcctccatacccgcttcaaccaaacagccacggcgaccggtcgtttgtcctcctctgatccaaaccttcagaatattccagtacgtaccccattgggccagaagatccgccgcgcgtttgtagctgaggagggttggcgtttagtggccctcgattatagccaaattgaattacgtgtccttgcccatctttctggcgatgagaacctcatccgcgtgtttcaggaaggcaaagacattcacactcaaacggcaagctggatgtttggagtgccggcggaagcgatcgatcctttgatgcgtcgtgcagcgaagaccatcaatttcggtgttctctacggtatgagtgcccatcgtttgtcgcaggaattaggcattccctatgaagaagctgcggcgttcattcagcgctactttcaaagctatcccaaagttaaagcatggatcgagaagactctcgaagaaggccgcacacgtggttacgtagagaccttatttggacgtcgccgctatgttcccgatttaaacgctcgcgtgaaatctgtccgtgaagccgccgaacgcatggcgttcaacatgcctgtacagggcacggcagctgacctcatgaaacttgcaatggtgcgcctttttccacaattgcgtgaagttggtgcccgcatgctcttgcaggtccacgatgaactcttgttagaagcgccaaaagagcgtgcggaagaggtggcagccctcgcgaaagaggttatggaaggcgtgtggcccttagcggtgcctcttgaagtcgaagttggtattggcgaggattggttggctgccaaaggataatga

SEQ ID NO: 790 - protein, 841 aa, synthetic construct
  REGION 1..841: note = Variant of DNA polymerase I from Thermus sp. strain 2.9
MHHHHHHGGSGMLPLFEPKGRVLLVDGHHLAYRNFFALKGLTTSRGEPVQGVYGFAKSLLKALKEDGDVVIVVFDAKAPSFRHEAYEAYKAGRAPTPEDFPRQLALMKELVDLLGLERLEVPGFEADDVLATLAKKAEREGYEVQILTADRDLFQLLSPRISVLHPEGHRITPEWLWEKYGLRPEQWVDFRALAGDPSDNIPGVKGIGEKTALKLLKEWGSLENLLKNLDQVKPESVREKILAHLEDLKLSRELSRVRTDLPLEVDFRGRREPDWEGLKAFLERLEFGSLLHEFGLLESPLPAEEAPWPPPEGAFLGYRLSRPEPMWAELLALAASAQGRVYRAEDPHGALRGLKEVRGLLAKDLAVVALREGLDLPPTDDPMLLAYLLDPSNTTPEGVARRYGGEWTEDAGERALLAERLHANLLGRLQGEERLLWLYEEVEKPLSRVLAHMEATGVKLDVAYLEALSLEVAAEMRRLEEEVFRLAGHSFNLNSRDQLERVLFDELGLPPIGKTEKTGKRSTSAAVLEALREVHPIVDKILQYRELAKLKGTYIDRLPALVHPKTGRLHTRFNQTATATGRLSSSDPNLQNIPVRTPLGQKIRRAFVAEEGWRLVALDYSQIELRVLAHLSGDENLIRVFQEGKDIHTQTASWMFGVPAEAIDPLMRRAAKTINFGVLYGMSAHRLSQELGIPYEEAAAFIQRYFQSYPKVKAWIEKTLEEGRTRGYVETLFGRRRYVPDLNARVKSVREAAERMAFNMPVQGTAADLMKLAMVRLFPQLREVGARMLLQVHDELLLEAPKERAEEVAALAKEVMEGVWPLAVPLEVEVGIGEDWLAAKG

SEQ ID NO: 791 - DNA, 2529 bp, synthetic construct
  misc_feature 1..2529: note = Variant of DNA polymerase I from Thermus sp. strain 2.9
  source 1..2529: mol_type = other DNA
atgcaccatcatcatcatcatggcggtagcggcatgttaccgttgttcgaacctaaaggtcgcgtgcttctggttgatggccatcatctcgcgtatcgtaacttctttgccctgaaaggattaaccaccagccgtggcgagccggtacagggtgtctacggctttgcaaagtcgctcctgaaagctctgaaagaagacggtgatgtggtgattgttgtctttgatgcgaaagcgccaagttttcgccacgaagcgtacgaagcttacaaagccgggcgtgctccaacgccggaagactttcctcgccaattggcgcttatgaaggaattagtggatttgcttggcctcgaacgcttggaagttcccggtttcgaggcagacgacgtattagcgactctcgcaaagaaagccgaacgtgagggctatgaagtccagatcttgacagcagatcgcgatcttttccagcttttatctccgcgcatctcggtgttacacccggaagggcatcgtatcaccccggaatggctctgggagaaatatggtttgcgtcccgaacaatgggtggattttcgcgccttagccggcgatccgagcgacaatattccgggagttaaaggtatcggcgagaagacggcgctcaagctccttaaagaatgggggtcgttggagaacttgcttaagaatttagatcaggtcaaaccagagtcagtgcgtgagaagattcttgcacacctcgaagacctcaaattaagccgcgaattgtcccgtgtacgcaccgatttgccgctcgaagttgatttccgtggccgccgcgaacctgactgggagggtcttaaagcgtttttagagcgtcttgaatttggttcgctcttgcatgaattcggccttttagaaagcccgttaccagccgaagaagcaccttggccaccgcccgaaggcgcgtttttaggttaccgtttgagtcgcccggaaccgatgtgggccgaattattggctcttgcagcgtctgcccagggacgtgtgtatcgcgcggaagaccctcatggtgcgctccgcggcctcaaagaagtccgtggactccttgccaaagacttagctgttgttgcattgcgcgaaggtcttgatttacctccgactgatgatccaatgcttcttgcgtacctcttggacccgtcaaacacgacgcccgaaggcgtagcccgtcgttacggcggcgagtggaccgaagatgcaggcgagcgcgcgttattggccgaacgtttgcacgcaaatttattaggacgtttgcaaggcgaggaacgtctcctctggctttacgaagaagtggagaaaccattgagtcgcgtgctcgctcatatggaagctaccggtgtcaaattagacgtggcgtatttggaggcactcagccttgaagttgctgccgaactgcgccgcttggaggaagaagtattccgtttagcaggccactcctttaaccttaattctcgcgatcagttagaacgtgtgttgttcgatgaacttggtctccctcctatcggcaagacagagaagaccggtaaacgtagcacttcagcggcggttttagaagctcttcgcgaagtccatcccattgtggacaagatcttgcagtaccgcgaactcgcgaaattgaaaggcacctatattgaccgtcttccggcattagtccacccgaaaacgggacgcctccatacccgcttcaaccaaacagccacggcgaccggtcgtttgtcctcctctgatccaaaccttcagaatattccagtacgtaccccattgggccagaagatccgccgcgcgtttgtagctgaggagggttggcgtttagtggccctcgattatagccaaattgaattacgtgtccttgcccatctttctggcgatgagaacctcatccgcgtgtttcaggaaggcaaagacattcacactcaaacggcaagctggatgtttggagtgtcgtcggaagcgatcgatcctttgatgcgtcgtgcagcgaagaccatcaatttcggtgttctctacggtatgagtgccgctcgtttgtcgcaggaattaggcattccctatgaagaagctgcggcgttcattcagcgctactttcaaagctatcccaaagttaaagcatggatcgagaagactctcgaagaaggccgcacacgtggttacgtagagaccttatttggacgtcgccgctatgttcccgatttaaacgctcgcgtgaaatctgtccgtgaagccgccgaacgcatggcgttcaacatgcctgtacagggcacggcagctgacctcatgaaacttgcaatggtgcgcctttttccacaattgcgtgaagttggtgcccgcatgctcttgcaggtccacgatgaactcttgttagaagcgccaaaagagcgtgcggaagaggtggcagccctcgcgaaagaggttatggaaggcgtgtggcccttagcggtgcctcttgaagtcgaagttggtattggcgaggattggttggctgccaaaggataatga

SEQ ID NO: 792 - protein, 841 aa, synthetic construct
  REGION 1..841: note = Variant of DNA polymerase I from Thermus sp. strain 2.9
MHHHHHHGGSGMLPLFEPKGRVLLVDGHHLAYRNFFALKGLTTSRGEPVQGVYGFAKSLLKALKEDGDVVIVVFDAKAPSFRHEAYEAYKAGRAPTPEDFPRQLALMKELVDLLGLERLEVPGFEADDVLATLAKKAEREGYEVQILTADRDLFQLLSPRISVLHPEGHRITPEWLWEKYGLRPEQWVDFRALAGDPSDNIPGVKGIGEKTALKLLKEWGSLENLLKNLDQVKPESVREKILAHLEDLKLSRELSRVRTDLPLEVDFRGRREPDWEGLKAFLERLEFGSLLHEFGLLESPLPAEEAPWPPPEGAFLGYRLSRPEPMWAELLALAASAQGRVYRAEDPHGALRGLKEVRGLLAKDLAVVALREGLDLPPTDDPMLLAYLLDPSNTTPEGVARRYGGEWTEDAGERALLAERLHANLLGRLQGEERLLWLYEEVEKPLSRVLAHMEATGVKLDVAYLEALSLEVAAELRRLEEEVFRLAGHSFNLNSRDQLERVLFDELGLPPIGKTEKTGKRSTSAAVLEALREVHPIVDKILQYRELAKLKGTYIDRLPALVHPKTGRLHTRFNQTATATGRLSSSDPNLQNIPVRTPLGQKIRRAFVAEEGWRLVALDYSQIELRVLAHLSGDENLIRVFQEGKDIHTQTASWMFGVSSEAIDPLMRRAAKTINFGVLYGMSAARLSQELGIPYEEAAAFIQRYFQSYPKVKAWIEKTLEEGRTRGYVETLFGRRRYVPDLNARVKSVREAAERMAFNMPVQGTAADLMKLAMVRLFPQLREVGARMLLQVHDELLLEAPKERAEEVAALAKEVMEGVWPLAVPLEVEVGIGEDWLAAKG

SEQ ID NO: 793 - DNA, 2529 bp, synthetic construct
  misc_feature 1..2529: note = Variant of DNA polymerase I from Thermus sp. strain 2.9
  source 1..2529: mol_type = other DNA
atgcaccatcatcatcatcatggcggtagcggcatgttaccgttgttcgaacctaaaggtcgcgtgcttctggttgatggccatcatctcgcgtatcgtaacttctttgccctgaaaggattaaccaccagccgtggcgagccggtacagggtgtctacggctttgcaaagtcgctcctgaaagctctgaaagaagacggtgatgtggtgattgttgtctttgatgcgaaagcgccaagttttcgccacgaagcgtacgaagcttacaaagccgggcgtgctccaacgccggaagactttcctcgccaattggcgcttatgaaggaattagtggatttgcttggcctcgaacgcttggaagttcccggtttcgaggcagacgacgtattagcgactctcgcaaagaaagccgaacgtgagggctacgaagtccagatcttgacagcagatcgcgatcttttccagcttttatctccgcgcatctcggtgttacacccggaagggcatcgtatcaccccggaatggctctgggagaaatatggtttgcgtcccgaacaatgggtggattttcgcgccttagtcggcgatccgagcgacaatattccgggagttaaaggtatcggcgagaagacggcgctcaagctccttaaagaatgggggtcgttggagaacttgcttaagaatttagatcaggtcaaaccagagtcagtgcgtgagaagattcttgcacacctcgaagacctcaaattaagccgcgaattgtcccgtgtacgcaccgatttgccgctcgaagttgatttccgtggccgccgcgaacctgactgggagggtcttaaagcgtttttagagcgtcttgaatttggttcgctcttgcatgaattcggccttttagaaagcccgttaccagccgaagaagcaccttggccaccgcccgaaggcgcgtttttaggttaccgtttgagtcgcccggaaccgatgtgggccgaattattggctcttgcagcgtctgcccagggacgtgtgtatcgcgcggaagaccctcatggtgcgctccgcggcctcaaagaagtccgtggactccttgccaaagacttagctgttgttgcattgcgcgaaggtcttgatttacctccgactgatgatccaatgcttcttgcgtacctcttggacccgtcaaacacgacgcccgaaggcgtagcccgtcgttacggcggcgagtggaccgaagatgcaggcgagcgcgcgttattggccgaacgtttgcaccagaatttattaggacgtttgcaaggcgaggaacgtctcctctggctttacgaagaagtggagaaaccattgagtcgcgtgctcgcgcatatggaagctaccggtgtcaaattagacgtggcgtatttggaggcactcagccttgaagttgctgccgaaatgcgccgcttggaggaagaagtattccgtttagcaggccactcctttaaccttaattctcgcgatcagttagaacgtgtgttgttcgatgaacttggtctccctcctatcggcaagacagagaagaccggtaaacgtagcacttcagcggcggttttagaagctcttcgcgaagtccatcccattgtggacaagatcttgcagtaccgcgaactcgcgaaattgaaaggcacctatattgaccgtcttccggcattagtccacccgaaaacgggacgcctccatacccgcttcaaccaaacagccacggcgaccggtcgtttgtcctcctctgatccaaaccttcagaatattccagtacgtaccccattgggccagaagatccgccgcgcgtttgtagctgaggagggttggcgtttagtggccctcgattatagccaaattgaattacgtgtccttgcccatctttctggcgatgagaacctcatccgcgtgtttcaggaaggcaaagacattcacactcaaacggcaagctggatgtttggagtgccggcggaagcgatcgatcctttgatgcgtcgtgcagcgaagaccatcaatttcggtgttctctacggtatgagtgcccatcgtttgtcgcaggaattaggcattccctatgaagaagctgcggcgttcattcagcgctactttcaaagctatcccaaagttaaagcatggatcgagaagactctcgaagaaggccgcacacgtggttacgtagagaccttatttggacgtcgccgctatgttcccgatttaaccgctcgcgtgaaatctgtccgtgaagccgccgaacgcatggcgttcaacatgcctgtacagggcacggcagctgacctcatgaaacttgcaatggtgcgcctttttccacaattgcgtgaagttggtgcccgcatgctcttgcaggtccacgatgaactcttgttagaagcgccaaaagagcgtgcggaagaggtggcagccctcgcgaaagaggttatggaaggcgtgtggcccttagcggtgcctcttgaagtcgaagttggtattggcgaggattggttggctgccaaaggataatga

SEQ ID NO: 794 - protein, 841 aa, synthetic construct
  REGION 1..841: note = Variant of DNA polymerase I from Thermus sp. strain 2.9
MHHHHHHGGSGMLPLFEPKGRVLLVDGHHLAYRNFFALKGLTTSRGEPVQGVYGFAKSLLKALKEDGDVVIVVFDAKAPSFRHEAYEAYKAGRAPTPEDFPRQLALMKELVDLLGLERLEVPGFEADDVLATLAKKAEREGYEVQILTADRDLFQLLSPRISVLHPEGHRITPEWLWEKYGLRPEQWVDFRALVGDPSDNIPGVKGIGEKTALKLLKEWGSLENLLKNLDQVKPESVREKILAHLEDLKLSRELSRVRTDLPLEVDFRGRREPDWEGLKAFLERLEFGSLLHEFGLLESPLPAEEAPWPPPEGAFLGYRLSRPEPMWAELLALAASAQGRVYRAEDPHGALRGLKEVRGLLAKDLAVVALREGLDLPPTDDPMLLAYLLDPSNTTPEGVARRYGGEWTEDAGERALLAERLHQNLLGRLQGEERLLWLYEEVEKPLSRVLAHMEATGVKLDVAYLEALSLEVAAEMRRLEEEVFRLAGHSFNLNSRDQLERVLFDELGLPPIGKTEKTGKRSTSAAVLEALREVHPIVDKILQYRELAKLKGTYIDRLPALVHPKTGRLHTRFNQTATATGRLSSSDPNLQNIPVRTPLGQKIRRAFVAEEGWRLVALDYSQIELRVLAHLSGDENLIRVFQEGKDIHTQTASWMFGVPAEAIDPLMRRAAKTINFGVLYGMSAHRLSQELGIPYEEAAAFIQRYFQSYPKVKAWIEKTLEEGRTRGYVETLFGRRRYVPDLTARVKSVREAAERMAFNMPVQGTAADLMKLAMVRLFPQLREVGARMLLQVHDELLLEAPKERAEEVAALAKEVMEGVWPLAVPLEVEVGIGEDWLAAKG

SEQ ID NO: 795 - DNA, 2529 bp, synthetic construct
  misc_feature 1..2529: note = Variant of DNA polymerase I from Thermus sp. strain 2.9
  source 1..2529: mol_type = other DNA
atgcaccatcatcatcatcatggcggtagcggcatgttaccgttgttcgaacctaaaggtcgcgtgcttctggttgatggccatcatctcgcgtatcgtaacttctttgccctgaaaggattaaccaccagccgtggcgagccggtacagggtgtctacggctttgcaaagtcgctcctgaaagctctgaaagaagacggtgatgtggtgattgttgtctttgatgcgaaagcgccaagttttcgccacgaagcgtacgaagcttacaaagccgggcgtgctccaacgccggaagactttcctcgccaattggcgcttatgaaggaattagtggatttgcttggcctcgaacgcttggaagttcccggtttcgaggcagacgacgtattagcgactctcgcaaagaaagccgaacgtgagggctatgaagtccagatcttgacagcagatcgcgatcttttccagcttttatctccgcgcatctcggtgttacacccggaagggcatctgatcaccccggaatggctctgggagaaatatggtttgcgtcccgaacaatgggtggattttcgcgccttagccggcgatccgagcgacaatattccgggagttaaaggtatcggcgagaagacggcgctcaagctccttaaagaatgggggtcgttggagaacttgcttaagaatttagatcaggtcaaaccagagtcagtgcgtgagaagattcttgcacacctcgaagacctcaaattaagccgcgaattgtcccgtgtacgcaccgatttgccgctcgaagttgatttccgtggccgccgcgaacctgactgggagggtcttaaagcgtttttagagcgtcttgaatttggttcgctcttgcatgaattcggccttttagaaagcccgttaccagccgaagaagcaccttggccaccgcccgaaggcgcgtttttaggttaccgtttgagtcgcccggaaccgatgtgggccgaattattggctcttgcagcgtctgcccagggacgtgtgtatcgcgcggaagaccctcatggtgcgctccgcggcctcaaagaagtccgtggactccttgccaaagacttagctgttgttgcattgcgcgaaggtcttgatttacctccgactgatgatccaatgcttcttgcgtacctcttggacccgtcaaacacgacgcccgaaggcgtagcccgtcgttacggcggcgagtggaccgaagatgcaggcgagcgcgcgttattggccgaacgtttgcaccagaatttattaggacgtttgcaaggcgaggaacgtctcctctggctttacgaagaagtggagaaaccattgagtcgcgtgctcgctcatatggaagctaccggtgtcaaattagacgtggcgtatttggaggcactcagccttgaagttgctgccgaactgcgccgcttggaggaagaagtattccgtttagcaggccactcctttaaccttaattctcgcgatcagttagaacgtgtgttgttcgatgaacttggtctccctcctatcggcaagacagagaagaccggtaaacgtagcacttcagcggcggttttagaagctcttcgcgaagtccatcccattgtggacaagatcttgcagtaccgcgaactcgcgaaattgaaaggcacctatattgaccctcttccggcattagtccacccgaaaacgggacgcctccatacccgcttcaaccaaacagccacggcgaccggtcgtttgtcctcctctgatccaaaccttcagaatattccagtacgtaccccattgggccagaagatccgccgcgcgtttgtagctgaggagggttggcgtttagtggccctcgattatagccaaattgaattacgtgtccttgcccatctttctggcgatgagaacctcatccgcgtgtttcaggaaggcaaagacattcacactcaaacggcaagctggatgtttggagtgtcggcggaagcgatcgatcctttgatgcgtcgtgcagcgaagaccatcaatttcggtgttctctacggtatgagtgccgctcgtttgtcgcaggaattaggcattccctatgaagaagctgcggcgttcattcagcgctactttcaaagctatcccaaagttaaagcatggatcgagaagactctcgaagaaggccgcacacgtggttacgtagagaccttatttggacgtcgccgctatgttcccgatttaaacgctcgcgtgaaatctgtccgtgaagccgccgaacgcatggcgttcaacatgcctgtacagggcacggcagctgacctcatgaaacttgcaatggtgcgcctttttccacaattgcgtgaagttggtgcccgcatgctcttgcaggtccacgatgaactcttgttagaagcgccaaaagagcgtgcggaagaggtggcagccctcgcgaaagaggttatggaaggcgtgtggcccttagcggtgcctcttgaagtcgaagttggtattggcgaggattggttggctgccaaaggataatga

SEQ ID NO: 796 - protein, 841 aa, synthetic construct
  REGION 1..841: note = Variant of DNA polymerase I from Thermus sp. strain 2.9
MHHHHHHGGSGMLPLFEPKGRVLLVDGHHLAYRNFFALKGLTTSRGEPVQGVYGFAKSLLKALKEDGDVVIVVFDAKAPSFRHEAYEAYKAGRAPTPEDFPRQLALMKELVDLLGLERLEVPGFEADDVLATLAKKAEREGYEVQILTADRDLFQLLSPRISVLHPEGHLITPEWLWEKYGLRPEQWVDFRALAGDPSDNIPGVKGIGEKTALKLLKEWGSLENLLKNLDQVKPESVREKILAHLEDLKLSRELSRVRTDLPLEVDFRGRREPDWEGLKAFLERLEFGSLLHEFGLLESPLPAEEAPWPPPEGAFLGYRLSRPEPMWAELLALAASAQGRVYRAEDPHGALRGLKEVRGLLAKDLAVVALREGLDLPPTDDPMLLAYLLDPSNTTPEGVARRYGGEWTEDAGERALLAERLHQNLLGRLQGEERLLWLYEEVEKPLSRVLAHMEATGVKLDVAYLEALSLEVAAELRRLEEEVFRLAGHSFNLNSRDQLERVLFDELGLPPIGKTEKTGKRSTSAAVLEALREVHPIVDKILQYRELAKLKGTYIDPLPALVHPKTGRLHTRFNQTATATGRLSSSDPNLQNIPVRTPLGQKIRRAFVAEEGWRLVALDYSQIELRVLAHLSGDENLIRVFQEGKDIHTQTASWMFGVSAEAIDPLMRRAAKTINFGVLYGMSAARLSQELGIPYEEAAAFIQRYFQSYPKVKAWIEKTLEEGRTRGYVETLFGRRRYVPDLNARVKSVREAAERMAFNMPVQGTAADLMKLAMVRLFPQLREVGARMLLQVHDELLLEAPKERAEEVAALAKEVMEGVWPLAVPLEVEVGIGEDWLAAKG

SEQ ID NO: 797 - DNA, 2529 bp, synthetic construct
  misc_feature 1..2529: note = Variant of DNA polymerase I from Thermus sp. strain 2.9
  source 1..2529: mol_type = other DNA
atgcaccatcatcatcatcatggcggtagcggcatgttaccgttgttcgaacctaaaggtcgcgtgcttctggttgatggccatcatctcgcgtatcgtaacttctttgccctgaaaggattaaccaccagccgtggcgagccggtacagggtgtctacggctttgcaaagtcgctcctgaaagctctgaaagaagacggtgatgtggtgattgttgtctttgatgcgaaagcgccaagttttcgccacgaagcgtacgaagcttacaaagccgggcgtgctccaacgccggaagactttcctcgccaattggcgcttatgaaggaattagtggatttgcttggcctcgaacgcttggaagttcccggtttcgaggcagacgacgtattagcgactctcgcaaagaaagccgaacgtgagggctatgaagtccagatcttgacagcagatcgcgatcttttccagcttttatctccgcgcatctcggtgttacacccggaagggcatcgtatcaccccggaatggctctgggagaaatatggtttgcgtcccgaacaatgggtggattttcgcgccttagccggcgatccaagcgacaatattccgggagttaaaggtatcggcgagaagacggcgctcaagctccttaaagaatgggggtcgttggagaacttgcttaagaatttagatcaggtcaaaccagagtcagtgcgtgagaagattcttgcacacctcgaagacctcaaattaagccgcgaattgtcccgtgtacgcaccgatttgccgctcgaagttgatttccgtggccgccgcgaacctgactgggagggtcttaaagcgtttttagagcgtcttgaatttggttcgctcttgcatgaattcggccttttagaaagcccgttaccagccgaagaagcaccttggccaccgcccgaaggcgcgtttttaggttaccgtttgagtcgcccggaaccgatgtgggccgaattattggctcttgcagcgtctgcccagggacgtgtgtatcgcgcggaagaccctcatggtgcgctccgcggcctcaaagaagtccgtggactccttgccaaagacttagctgttgttgcattgcgcgaaggtcttgatttacctccgactgatgatccaatgcttcttgcgtacctcttggacccgtcaaacacgacgcccgaaggcgtagcccgtcgttacggcggcgagtggaccgaagatgcaggcgagcgcgcgttattggccgaacgtttgcacgcaaatttattaggacgtttgcaaggcgaggaacgtctcctctggctttacgaagaagtggagaaaccattgagtcgcgtgctcgctcatatggaagctaccggtgtcaaattagacgtggcgtatttggaggcactcagccttgaagttgctgccgaactgcgccgcttggaggaagaagtattccgtttagcaggccactcctttaaccttaattctcgcgatcagttagaacgtgtgttgttcgatgaacttggtctccctcctatcggcaagacagagaagaccggtaaacgtagcacttcagcggcggttttagaagctcttcgcgaagtccatcccattgtggacaagatcttgcagtaccgcgaactcgcgaaattgaaaggcacctatattgaccctcttccggcattagtccacccgaaaacgggacgcctccatacccgcttcaaccaaacagccacggcgaccggtcgtttgtcctcctctgatccaaaccttcagaatattccagtacgtaccccattgggccagaagatccgccgcgcgtttgtagctgaggagggttggcgtttagtggccctcgattatagccaaattgaattacgtgtccttgcccatctttctggcgatgagaacctcatccgcgtgtttcaggaaggcaaagacattcacactcaaacggcaagctggatgtttggagtgccgtcggaagcgatcgatcctttgatgcgtcgtgcagcgaagaccatcaatttcggtgttctctacggtatgagtgccgctcgtttgtcgcaggaattaggcattccctatgaagaagctgcggcgttcattcagcgctactttcaaagctatcccaaagttaaagcatggatcgagaagactctcgaagaaggccgcacacgtggttacgtagagaccttatttggacgtcgccgctatgttcccgatttaaccgctcgcgtgaaatctgtccgtgaagccgccgaacgcatggcgttcaacatgcctgtacagggcacggcagctgacctcatgaaacttgcaatggtgcgcctttttccacaattgcgtgaagttggtgcccgcatgctcttgcaggtccacgatgaactcttgttagaagcgccaaaagagcgtgcggaagaggtggcagccctcgcgaaagaggttatggaaggcgtgtggcccttagcggtgcctcttgaagtcgaagttggtattggcgaggattggttggctgccaaaggataatga

SEQ ID NO: 798 - protein, 841 aa, synthetic construct
  REGION 1..841: note = Variant of DNA polymerase I from Thermus sp. strain 2.9
MHHHHHHGGSGMLPLFEPKGRVLLVDGHHLAYRNFFALKGLTTSRGEPVQGVYGFAKSLLKALKEDGDVVIVVFDAKAPSFRHEAYEAYKAGRAPTPEDFPRQLALMKELVDLLGLERLEVPGFEADDVLATLAKKAEREGYEVQILTADRDLFQLLSPRISVLHPEGHRITPEWLWEKYGLRPEQWVDFRALAGDPSDNIPGVKGIGEKTALKLLKEWGSLENLLKNLDQVKPESVREKILAHLEDLKLSRELSRVRTDLPLEVDFRGRREPDWEGLKAFLERLEFGSLLHEFGLLESPLPAEEAPWPPPEGAFLGYRLSRPEPMWAELLALAASAQGRVYRAEDPHGALRGLKEVRGLLAKDLAVVALREGLDLPPTDDPMLLAYLLDPSNTTPEGVARRYGGEWTEDAGERALLAERLHANLLGRLQGEERLLWLYEEVEKPLSRVLAHMEATGVKLDVAYLEALSLEVAAELRRLEEEVFRLAGHSFNLNSRDQLERVLFDELGLPPIGKTEKTGKRSTSAAVLEALREVHPIVDKILQYRELAKLKGTYIDPLPALVHPKTGRLHTRFNQTATATGRLSSSDPNLQNIPVRTPLGQKIRRAFVAEEGWRLVALDYSQIELRVLAHLSGDENLIRVFQEGKDIHTQTASWMFGVPSEAIDPLMRRAAKTINFGVLYGMSAARLSQELGIPYEEAAAFIQRYFQSYPKVKAWIEKTLEEGRTRGYVETLFGRRRYVPDLTARVKSVREAAERMAFNMPVQGTAADLMKLAMVRLFPQLREVGARMLLQVHDELLLEAPKERAEEVAALAKEVMEGVWPLAVPLEVEVGIGEDWLAAKG

SEQ ID NO: 799 - DNA, 2529 bp, synthetic construct
  misc_feature 1..2529: note = Variant of DNA polymerase I from Thermus sp. strain 2.9
  source 1..2529: mol_type = other DNA
atgcaccatcatcatcatcatggcggtagcggcatgttaccgttgttcgaacctaaaggtcgcgtgcttctggttgatggccatcatctcgcgtatcgtaacttctttgccctgaaaggattaaccaccagccgtggcgagccggtacagggtgtctacggctttgcaaagtcgctcctgaaagctctgaaagaagacggtgatgtggtgattgttgtctttgatgcgaaagcgccaagttttcgccacgaagcgtacgaagcttacaaagccgggcgtgctccaacgccggaagactttcctcgccaattggcgcttatgaaggaattagtggatttgcttggcctcgaacgcttggaagttcccggtttcgaggcagacgacgtattagcgactctcgcaaagaaagccgaacgtgagggctatgaagtccagatcttgacagcagatcgcgatcttttccagcttttatctccgcgcatctcggtgttacacccggaagggcatctgatcaccccggaatggctctgggagaaatatggtttgcgtcccgaacaatgggtggattttcgcgccttagcaggcgatccgagcgacaatattccgggagttaaaggtatcggcgagaagacggcgctcaagctccttaaagaatgggggtcgttggagaacttgcttaagaatttagatcaggtcaaaccagagtcagtgcgtgagaagattcttgcacacctcgaagacctcaaattaagccgcgaattgtcccgtgtacgcaccgatttgccgctcgaagttgatttccgtggccgccgcgaacctgactgggagggtcttaaagcgtttttagagcgtcttgaatttggttcgctcttgcatgaattcggccttttagaaagcccgttaccagccgaagaagcaccttggccaccgcccgaaggcgcgtttttaggttaccgtttgagtcgcccggaaccgatgtgggccgaattattggctcttgcagcgtctgcccagggacgtgtgtatcgcgcggaagaccctcatggtgcgctccgcggcctcaaagaagtccgtggactccttgccaaagacttagctgttgttgcattgcgcgaaggtcttgatttacctccgactgatgatccaatgcttcttgcgtacctcttggacccgtcaaacacgacgcccgaaggcgtagcccgtcgttacggcggcgagtggaccgaagatgcaggcgagcgcgcgttattggccgaacgtttgcaccagaatttattaggacgtttgcaaggcgaggaacgtctcctctggctttacgaagaagtggagaaaccattgagtcgcgtgctcgctcatatggaagctaccggtgtcaaattagacgtggcgtatttggaggcactcagccttgaagttgctgccgaaatgcgccgcttggaggaagaagtattccgtttagcaggccactcctttaaccttaattctcgcgatcagttagaacgtgtgttgttcgatgaacttggtctccctcctatcggcaagacagagaagaccggtaaacgtagcacttcagcggcggttttagaagctcttcgcgaagtccatcccattgtggacaagatcttgcagtaccgcgaactcgcgaaattgaaaggcacctatattgaccctcttccggcattagtccacccgaaaacgggacgcctccatacccgcttcaaccaaacagccacggcgaccggtcgtttgtcctcctctgatccaaaccttcagaatattccagtacgtaccccattgggccagaagatccgccgcgcgtttgtagctgaggagggttggcgtttagtggccctcgattatagccaaattgaattacgtgtccttgcccatctttctggcgatgagaacctcatccgcgtgtttcaggaaggcaaagacattcacactcaaacggcaagctggatgtttggagtgccggcggaagcgatcgatcctttgatgcgtcgtgcagcgaagaccatcaatttcggtgttctctacggtatgagtgcccaccgtttgtcgcaggaattaggcattccctatgaagaagctgcggcgttcattcagcgctactttcaaagctatcccaaagttaaagcatggatcgagaagactctcgaagaaggccgcacacgtggttacgtagagaccttatttggacgtcgccgctatgttcccgatttaaccgctcgcgtgaaatctgtccgtgaagccgccgaacgcatggcgttcaacatgcctgtacagggcacggcagctgacctcatgaaacttgcaatggtgcgcctttttccacaattgcgtgaagttggtgcccgcatgctcttgcaggtccacgatgaactcttgttagaagcgccaaaagagcgtgcggaagaggtggcagccctcgcgaaagaggttatggaaggcgtgtggcccttagcggtgcctcttgaagtcgaagttggtattggcgaggattggttggctgccaaaggataatga

SEQ ID NO: 800 - protein, 841 aa, synthetic construct
  REGION 1..841: note = Variant of DNA polymerase I from Thermus sp. strain 2.9
MHHHHHHGGSGMLPLFEPKGRVLLVDGHHLAYRNFFALKGLTTSRGEPVQGVYGFAKSLLKALKEDGDVVIVVFDAKAPSFRHEAYEAYKAGRAPTPEDFPRQLALMKELVDLLGLERLEVPGFEADDVLATLAKKAEREGYEVQILTADRDLFQLLSPRISVLHPEGHLITPEWLWEKYGLRPEQWVDFRALAGDPSDNIPGVKGIGEKTALKLLKEWGSLENLLKNLDQVKPESVREKILAHLEDLKLSRELSRVRTDLPLEVDFRGRREPDWEGLKAFLERLEFGSLLHEFGLLESPLPAEEAPWPPPEGAFLGYRLSRPEPMWAELLALAASAQGRVYRAEDPHGALRGLKEVRGLLAKDLAVVALREGLDLPPTDDPMLLAYLLDPSNTTPEGVARRYGGEWTEDAGERALLAERLHQNLLGRLQGEERLLWLYEEVEKPLSRVLAHMEATGVKLDVAYLEALSLEVAAEMRRLEEEVFRLAGHSFNLNSRDQLERVLFDELGLPPIGKTEKTGKRSTSAAVLEALREVHPIVDKILQYRELAKLKGTYIDPLPALVHPKTGRLHTRFNQTATATGRLSSSDPNLQNIPVRTPLGQKIRRAFVAEEGWRLVALDYSQIELRVLAHLSGDENLIRVFQEGKDIHTQTASWMFGVPAEAIDPLMRRAAKTINFGVLYGMSAHRLSQELGIPYEEAAAFIQRYFQSYPKVKAWIEKTLEEGRTRGYVETLFGRRRYVPDLTARVKSVREAAERMAFNMPVQGTAADLMKLAMVRLFPQLREVGARMLLQVHDELLLEAPKERAEEVAALAKEVMEGVWPLAVPLEVEVGIGEDWLAAKG

SEQ ID NO: 801 - DNA, 2529 bp, synthetic construct
  misc_feature 1..2529: note = Variant of DNA polymerase I from Thermus sp. strain 2.9
  source 1..2529: mol_type = other DNA
atgcaccatcatcatcatcatggcggtagcggcatgttaccgttgttcgaacctaaaggtcgcgtgcttctggttgatggccatcatctcgcgtatcgtaacttctttgccctgaaaggattaaccaccagccgtggcgagccggtacagggtgtctacggctttgcaaagtcgctcctgaaagctctgaaagaagacggtgatgtggtgattgttgtctttgatgcgaaagcgccaagttttcgccacgaagcgtacgaagcttacaaagccgggcgtgctccaacgccggaagactttcctcgccaattggcgcttatgaaggaattagtggatttgcttggcctcgaacgcttggaagttcccggtttcgaggcagacgacgtattagcgactctcgcaaagaaagccgaacgtgagggctatgaagtccagatcttgacagcagatcgcgatcttttccagcttttatctccgcgcatctcggtgttacacccggaagggcatcgtatcaccccggaatggctctgggagaaatatggtttgcgtcccgaacaatgggtggattttcgcgccttagcaggcgatccgagcgacaatattccgggagttaaaggtatcggcgagaagacggcgctcaagctccttaaagaatgggggtcgttggagaacttgcttaagaatttagatcaggtcaaaccagagtcagtgcgtgagaagattcttgcacacctcgaagacctcaaattaagccgcgaattgtcccgtgtacgcaccgatttgccgctcgaagttgatttccgtggccgccgcgaacctgactgggagggtcttaaagcgtttttagagcgtcttgaatttggttcgctcttgcatgaattcggccttttagaaagcccgttaccagccgaagaagcaccttggccaccgcccgaaggcgcgtttttaggttaccgtttgagtcgcccggaaccgatgtgggccgaattattggctcttgcagcgtctgcccagggacgtgtgtatcgcgcggaagaccctcatggtgcgctccgcggcctcaaagaagtccgtggactccttgccaaagacttagctgttgttgcattgcgcgaaggtcttgatttacctccgactgatgatccaatgcttcttgcgtacctcttggacccgtcaaacacgacgcccgaaggcgtagcccgtcgttacggcggcgagtggaccgaagatgcaggcgagcgcgcgttattggccgaacgtttgcacgccaatttattaggacgtttgcaaggcgaggaacgtctcctctggctttacgaagaagtggagaaaccattgagtcgcgtgctcgcgcatatggaagctaccggtgtcaaattagacgtggcgtatttggaggcactcagccttgaagttgctgccgaaatgcgccgcttggaggaagaagtattccgtttagcaggccactcctttaaccttaattctcgcgatcagttagaacgtgtgttgttcgatgaacttggtctccctcctatcggcaagacagagaagaccggtaaacgtagcacttcagcggcggttttagaagctcttcgcgaagtccatcccattgtggacaagatcttgcagtaccgcgaactcgcgaaattgaaaggcacctatattgaccctcttccggcattagtccacccgaaaacgggacgcctccatacccgcttcaaccaaacagccacggcgaccggtcgtttgtcctcctctgatccaaaccttcagaatattccagtacgtaccccattgggccagaagatccgccgcgcgtttgtagctgaggagggttggcgtttagtggccctcgattatagccaaattgaattacgtgtccttgcccatctttctggcgatgagaacctcatccgcgtgtttcaggaaggcaaagacattcacactcaaacggcaagctggatgtttggagtgtcggcggaagcgatcgatcctttgatgcgtcgtgcagcgaagaccatcaatttcggtgttctctacggtatgagtgcccaccgtttgtcgcaggaattaggcattccctatgaagaagctgcggcgttcattcagcgctactttcaaagctatcccaaagttaaagcatggatcgagaagactctcgaagaaggccgcacacgtggttacgtagagaccttatttggacgtcgccgctatgttcccgatttaaccgctcgcgtgaaatctgtccgtgaagccgccgaacgcatggcgttcaacatgcctgtacagggcacggcagctgacctcatgaaacttgcaatggtgcgcctttttccacaattgcgtgaagttggtgcccgcatgctcttgcaggtccacgatgaactcttgttagaagcgccaaaagagcgtgcggaagaggtggcagccctcgcgaaagaggttatggaaggcgtgtggcccttagcggtgcctcttgaagtcgaagttggtattggcgaggattggttggctgccaaaggataatga

SEQ ID NO: 802 - protein, 841 aa, synthetic construct
  REGION 1..841: note = Variant of DNA polymerase I from Thermus sp. strain 2.9
MHHHHHHGGSGMLPLFEPKGRVLLVDGHHLAYRNFFALKGLTTSRGEPVQGVYGFAKSLLKALKEDGDVVIVVFDAKAPSFRHEAYEAYKAGRAPTPEDFPRQLALMKELVDLLGLERLEVPGFEADDVLATLAKKAEREGYEVQILTADRDLFQLLSPRISVLHPEGHRITPEWLWEKYGLRPEQWVDFRALAGDPSDNIPGVKGIGEKTALKLLKEWGSLENLLKNLDQVKPESVREKILAHLEDLKLSRELSRVRTDLPLEVDFRGRREPDWEGLKAFLERLEFGSLLHEFGLLESPLPAEEAPWPPPEGAFLGYRLSRPEPMWAELLALAASAQGRVYRAEDPHGALRGLKEVRGLLAKDLAVVALREGLDLPPTDDPMLLAYLLDPSNTTPEGVARRYGGEWTEDAGERALLAERLHANLLGRLQGEERLLWLYEEVEKPLSRVLAHMEATGVKLDVAYLEALSLEVAAEMRRLEEEVFRLAGHSFNLNSRDQLERVLFDELGLPPIGKTEKTGKRSTSAAVLEALREVHPIVDKILQYRELAKLKGTYIDPLPALVHPKTGRLHTRFNQTATATGRLSSSDPNLQNIPVRTPLGQKIRRAFVAEEGWRLVALDYSQIELRVLAHLSGDENLIRVFQEGKDIHTQTASWMFGVSAEAIDPLMRRAAKTINFGVLYGMSAHRLSQELGIPYEEAAAFIQRYFQSYPKVKAWIEKTLEEGRTRGYVETLFGRRRYVPDLTARVKSVREAAERMAFNMPVQGTAADLMKLAMVRLFPQLREVGARMLLQVHDELLLEAPKERAEEVAALAKEVMEGVWPLAVPLEVEVGIGEDWLAAKG

SEQ ID NO: 803 - DNA, 2529 bp, synthetic construct
  misc_feature 1..2529: note = Variant of DNA polymerase I from Thermus sp. strain 2.9
  source 1..2529: mol_type = other DNA
atgcaccatcatcatcatcatggcggtagcggcgagttaccgttgttcgaacctaaaggtcgcgtgcttctggttgatggccatcatctcgcgtatcgtaacttctttgccctgaaaggattaaccaccagccgtggcgagccggtacagggtgtctacggctttgcaaagtcgctcctgaaagctctgaaagaagacggtgatgtggtgattgttgtctttgatgcgaaagcgccaagttttcgccacgaagcgtacgaagcttacaaagccgggcgtgctccaacgccggaagactttcctcgccaattggcgcttatgaaggaattagtggatttgcttggcctcgaacgcttggaagttcccggtttcgaggcagacgacgtattagcgactctcgcaaagaaagccgaacgtgagggctatgaagtccagatcttgacagcagatcgcgatcttttccagcttttatctccgcgcatctcggtgttacacccggaagggcatcgtatcaccccggaatggctctgggagaaatatggtttgcgtcccgaacaatgggtggattttcgcgccttagcaggcgatccgagcgacaatattccgggagttaaaggtatcggcgagaagacggcgctcaagctccttaaagaatgggggtcgttggagaacttgcttaagaatttagatcaggtcaaaccagagtcagtgcgtgagaagattcttgcacacctcgaagacctcaaattaagccgcgaattgtcccgtgtacgcaccgatttgccgctcgaagttgatttccgtggccgccgcgaacctgactgggagggtcttaaagcgtttttagagcgtcttgaatttggttcgctcttgcatgaattcggccttttagaaagcccgttaccagccgaagaagcaccttggccaccgcccgaaggcgcgtttttaggttaccgtttgagtcgcccggaaccgatgtgggccgaattattggctcttgcagcgtctgcccagggacgtgtgtatcgcgcggaagaccctcatggtgcgctccgcggcctcaaagaagtccgtggactccttgccaaagacttagctgttgttgcattgcgcgaaggtcttgatttacctccgactgatgatccaatgcttcttgcgtacctcttggacccgtcaaacacgacgcccgaaggcgtagcccgtcgttacggcggcgagtggaccgaagatgcaggcgagcgcgcgttattggccgaacgtttgcacgccaatttattaggacgtttgcaaggcgaggaacgtctcctctggctttacgaagaagtggagaaaccattgagtcgcgtgctcgcgcatatggaagctaccggtgtcaaattagacgtggcgtatttggaggcactcagccttgaagttgctgccgaaatgcgccgcttggaggaagaagtattccgtttagcaggccactcctttaaccttaattctcgcgatcagttagaacgtgtgttgttcgatgaacttggtctccctcctatcggcaagacagagaagaccggtaaacgtagcacttcagcggcggttttagaagctcttcgcgaagtccatcccattgtggacaagatcttgcagtaccgcgaactcgcgaaattgaaaggcacctatattgaccctcttccggcattagtccacccgaaaacgggacgcctccatacccgcttcaaccaaacagccacggcgaccggtcgtttgtcctcctctgatccaaaccttcagaatattccagtacgtaccccattgggccagaagatccgccgcgcgtttgtagctgaggagggttggcgtttagtggccctcgattatagccaaattgaattacgtgtccttgcccatctttctggcgatgagaacctcatccgcgtgtttcaggaaggcaaagacattcacactcaaacggcaagctggatgtttggattatcagctgaagcgatcgatcctttgatgcgtcgtgcagcgaagaccatcaatttcggtgttctctacggtatgagtgcccatcgtttgtcgcaggaattaggcattccctatgaagaagctgcggcgttcattcagcgctactttcaaagctatcccaaagttaaagcatggatcgagaagactctcgaagaaggccgcacacgtggttacgtagagaccttatttggacgtcgccgctatgttcccgatttaaacgctcgcgtgaaatctgtccgtgaagccgccgaacgcatggcgttcaacatgcctgtacagggcacggcagctgacctcatgaaacttgcaatggtgcgcctttttccacaattgcgtgaagttggtgcccgcatgctcttgcaggtccacgatgaactcttgttagaagcgccaaaagagcgtgcggaagaggtggcagccctcgcgaaagaggttatggaaggcgtgtggcccttagcggtgcctcttgaagtcgaagttggtattggcgaggattggttggctgccaaaggataatga

SEQ ID NO: 804 - protein, 841 aa, synthetic construct
  REGION 1..841: note = Variant of DNA polymerase I from Thermus sp. strain 2.9
MHHHHHHGGSGELPLFEPKGRVLLVDGHHLAYRNFFALKGLTTSRGEPVQGVYGFAKSLLKALKEDGDVVIVVFDAKAPSFRHEAYEAYKAGRAPTPEDFPRQLALMKELVDLLGLERLEVPGFEADDVLATLAKKAEREGYEVQILTADRDLFQLLSPRISVLHPEGHRITPEWLWEKYGLRPEQWVDFRALAGDPSDNIPGVKGIGEKTALKLLKEWGSLENLLKNLDQVKPESVREKILAHLEDLKLSRELSRVRTDLPLEVDFRGRREPDWEGLKAFLERLEFGSLLHEFGLLESPLPAEEAPWPPPEGAFLGYRLSRPEPMWAELLALAASAQGRVYRAEDPHGALRGLKEVRGLLAKDLAVVALREGLDLPPTDDPMLLAYLLDPSNTTPEGVARRYGGEWTEDAGERALLAERLHANLLGRLQGEERLLWLYEEVEKPLSRVLAHMEATGVKLDVAYLEALSLEVAAEMRRLEEEVFRLAGHSFNLNSRDQLERVLFDELGLPPIGKTEKTGKRSTSAAVLEALREVHPIVDKILQYRELAKLKGTYIDPLPALVHPKTGRLHTRFNQTATATGRLSSSDPNLQNIPVRTPLGQKIRRAFVAEEGWRLVALDYSQIELRVLAHLSGDENLIRVFQEGKDIHTQTASWMFGLSAEAIDPLMRRAAKTINFGVLYGMSAHRLSQELGIPYEEAAAFIQRYFQSYPKVKAWIEKTLEEGRTRGYVETLFGRRRYVPDLNARVKSVREAAERMAFNMPVQGTAADLMKLAMVRLFPQLREVGARMLLQVHDELLLEAPKERAEEVAALAKEVMEGVWPLAVPLEVEVGIGEDWLAAKG

SEQ ID NO: 805 - DNA, 2529 bp, synthetic construct
  misc_feature 1..2529: note = Variant of DNA polymerase I from Thermus sp. strain 2.9
  source 1..2529: mol_type = other DNA
atgcaccatcatcatcatcatggcggtagcggcatgttaccgttgttcgaacctaaaggtcgcgtgcttctggttgatggccatcatctcgcgtatcgtaacttctttgccctgaaaggattaaccaccagccgtggcgagccggtacagggtgtctacggctttgcaaagtcgctcctgaaagctctgaaagaagacggtgatgtggtgattgttgtctttgatgcgaaagcgccaagttttcgccacgaagcgtacgaagcttacaaagccgggcgtgctccaacgccggaagactttcctcgccaattggcgcttatgaaggaattagtggatttgcttggcctcgaacgcttggaagttcccggtttcgaggcagacgacgtattagcgactctcgcaaagaaagccgaacgtgagggctatgaagtccagatcttgacagcagatcgcgatcttttccagcttttatctccgcgcatctcggtgttacacccggaagggcatctgatcaccccggaatggctctgggagaaatatggtttgcgtcccgaacaatgggtggattttcgcgccttagtcggcgatccgagcgacaatattccgggagttaaaggtatcggcgagaagacggcgctcaagctccttaaagaatgggggtcgttggagaacttgcttaagaatttagatcaggtcaaaccagagtcagtgcgtgagaagattcttgcacacctcgaagacctcaaattaagccgcgaattgtcccgtgtacgcaccgatttgccgctcgaagttgatttccgtggccgccgcgaacctgactgggagggtcttaaagcgtttttagagcgtcttgaatttggttcgctcttgcatgaattcggccttttagaaagcccgttaccagccgaagaagcaccttggccaccgcccgaaggcgcgtttttaggttaccgtttgagtcgcccggaaccgatgtgggccgaattattggctcttgcagcgtctgcccagggacgtgtgtatcgcgcggaagaccctcatggtgcgctccgcggcctcaaagaagtccgtggactccttgccaaagacttagctgttgttgcattgcgcgaaggtcttgatttacctccgactgatgatccaatgcttcttgcgtacctcttggacccgtcaaacacgacgcccgaaggcgtagcccgtcgttacggcggcgagtggaccgaagatgcaggcgagcgcgcgttattggccgaacgtttgcaccagaatttattaggacgtttgcaaggcgaggaacgtctcctctggctttacgaagaagtggagaaaccattgagtcgcgtgctcgcgcatatggaagctaccggtgtcaaattagacgtggcgtatttggaggcactcagccttgaagttgctgccgaaatgcgccgcttggaggaagaagtattccgtttagcaggccactcctttaaccttaattctcgcgatcagttagaacgtgtgttgttcgatgaacttggtctccctcctatcggcaagacagagaagaccggtaaacgtagcacttcagcggcggttttagaagctcttcgcgaagtccatcccattgtggacaagatcttgcagtaccgcgaactcgcgaaattgaaaggcacctatattgaccgtcttccggcattagtccacccgaaaacgggacgcctccatacccgcttcaaccaaacagccacggcgaccggtcgtttgtcctcctctgatccaaaccttcagaatattccagtacgtaccccattgggccagaagatccgccgcgcgtttgtagctgaggagggttggcgtttagtggccctcgattatagccaaattgaattacgtgtccttgcccatctttctggcgatgagaacctcatccgcgtgtttcaggaaggcaaagacattcacactcaaacggcaagctggatgtttggagtgccggcggaagcgatcgatcctttgatgcgtcgtgcagcgaagaccatcaatttcggtgttctctacggtatgagtgcccaccgtttgtcgcaggaattaggcattccctatgaagaagctgcggcgttcattcagcgctactttcaaagctatcccaaagttaaagcatggatcgagaagactctcgaagaaggccgcacacgtggttacgtagagaccttatttggacgtcgccgctatgttcccgatttaaccgctcgcgtgaaatctgtccgtgaagccgccgaacgcatggcgttcaacatgcctgtacagggcacggcagctgacctcatgaaacttgcaatggtgcgcctttttccacaattgcgtgaagttggtgcccgcatgctcttgcaggtccacgatgaactcttgttagaagcgccaaaagagcgtgcggaagaggtggcagccctcgcgaaagaggttatggaaggcgtgtggcccttagcggtgcctcttgaagtcgaagttggtattggcgaggattggttggctgccaaaggataatga

SEQ ID NO: 806 - protein, 841 aa, synthetic construct
  REGION 1..841: note = Variant of DNA polymerase I from Thermus sp. strain 2.9
MHHHHHHGGSGMLPLFEPKGRVLLVDGHHLAYRNFFALKGLTTSRGEPVQGVYGFAKSLLKALKEDGDVVIVVFDAKAPSFRHEAYEAYKAGRAPTPEDFPRQLALMKELVDLLGLERLEVPGFEADDVLATLAKKAEREGYEVQILTADRDLFQLLSPRISVLHPEGHLITPEWLWEKYGLRPEQWVDFRALVGDPSDNIPGVKGIGEKTALKLLKEWGSLENLLKNLDQVKPESVREKILAHLEDLKLSRELSRVRTDLPLEVDFRGRREPDWEGLKAFLERLEFGSLLHEFGLLESPLPAEEAPWPPPEGAFLGYRLSRPEPMWAELLALAASAQGRVYRAEDPHGALRGLKEVRGLLAKDLAVVALREGLDLPPTDDPMLLAYLLDPSNTTPEGVARRYGGEWTEDAGERALLAERLHQNLLGRLQGEERLLWLYEEVEKPLSRVLAHMEATGVKLDVAYLEALSLEVAAEMRRLEEEVFRLAGHSFNLNSRDQLERVLFDELGLPPIGKTEKTGKRSTSAAVLEALREVHPIVDKILQYRELAKLKGTYIDRLPALVHPKTGRLHTRFNQTATATGRLSSSDPNLQNIPVRTPLGQKIRRAFVAEEGWRLVALDYSQIELRVLAHLSGDENLIRVFQEGKDIHTQTASWMFGVPAEAIDPLMRRAAKTINFGVLYGMSAHRLSQELGIPYEEAAAFIQRYFQSYPKVKAWIEKTLEEGRTRGYVETLFGRRRYVPDLTARVKSVREAAERMAFNMPVQGTAADLMKLAMVRLFPQLREVGARMLLQVHDELLLEAPKERAEEVAALAKEVMEGVWPLAVPLEVEVGIGEDWLAAKG

SEQ ID NO: 807 - DNA, 2529 bp, synthetic construct
  misc_feature 1..2529: note = Variant of DNA polymerase I from Thermus sp. strain 2.9
  source 1..2529: mol_type = other DNA
atgcaccatcatcatcatcatggcggtagcggcatgttaccgttgttcgaacctaaaggtcgcgtgcttctggttgatggccatcatctcgcgtatcgtaacttctttgccctgaaaggattaaccaccagccgtggcgagccggtacagggtgtctacggctttgcaaagtcgctcctgaaagctctgaaagaagacggtgatgtggtgattgttgtctttgatgcgaaagcgccaagttttcgccacgaagcgtacgaagcttacaaagccgggcgtgctccaacgccggaagactttcctcgccaattggcgcttatgaaggaattagtggatttgcttggcctcgaacgcttggaagttcccggtttcgaggcagacgacgtattagcgactctcgcaaagaaagccgaacgtgagggctatgaagtccagatcttgacagcagatcgcgatcttttccagcttttatctccgcgcatctcggtgttacacccggaagggcatcgtatcaccccggaatggctctgggagaaatatggtttgcgtcccgaacaatgggtggattttcgcgccttagccggcgatccgagcgacaatattccgggagttaaaggtatcggcgagaagacggcgctcaagctccttaaagaatgggggtcgttggagaacttgcttaagaatttagatcaggtcaaaccagagtcagtgcgtgagaagattcttgcacacctcgaagacctcaaattaagccgcgaattgtcccgtgtacgcaccgatttgccgctcgaagttgatttccgtggccgccgcgaacctgactgggagggtcttaaagcgtttttagagcgtcttgaatttggttcgctcttgcatgaattcggccttttagaaagcccgttaccagccgaagaagcaccttggccaccgcccgaaggcgcgtttttaggttaccgtttgagtcgcccggaaccgatgtgggccgaattattggctcttgcagcgtctgcccagggacgtgtgtatcgcgcggaagaccctcatggtgcgctccgcggcctcaaagaagtccgtggactccttgccaaagacttagctgttgttgcattgcgcgaaggtcttgatttacctccgactgatgatccaatgcttcttgcgtacctcttggacccgtcaaacacgacgcccgaaggcgtagcccgtcgttacggcggcgagtggaccgaagatgcaggcgagcgcgcgttattggccgaacgtttgcacgcaaatttattaggacgtttgcaaggcgaggaacgtctcctctggctttacgaagaagtggagaaaccattgagtcgcgtgctcgctcatatggaagctaccggtgtcaaattagacgtggcgtatttggaggcactcagccttgaagttgctgccgaaatgcgccgcttggaggaagaagtattccgtttagcaggccactcctttaaccttaattctcgcgatcagttagaacgtgtgttgttcgatgaacttggtctccctcctatcggcaagacagagaagaccggtaaacgtagcacttcagcggcggttttagaagctcttcgcgaagtccatcccattgtggacaagatcttgcagtaccgcgaactcgcgaaattgaaaggcacctatattgaccctcttccggcattagtccacccgaaaacgggacgcctccatacccgcttcaaccaaacagccacggcgaccggtcgtttgtcctcctctgatccaaaccttcagaatattccagtacgtaccccattgggccagaagatccgccgcgcgtttgtagctgaggagggttggcgtttagtggccctcgattatagccaaattgaattacgtgtccttgcccatctttctggcgatgagaacctcatccgcgtgtttcaggaaggcaaagacattcacactcaaacggcaagctggatgtttggagtgccggcggaagcgatcgatcctttgatgcgtcgtgcagcgaagaccatcaatttcggtgttctctacggtatgagtgcccatcgtttgtcgcaggaattaggcattccctatgaagaagctgcggcgttcattcagcgctactttcaaagctatcccaaagttaaagcatggatcgagaagactctcgaagaaggccgcacacgtggttacgtagagaccttatttggacgtcgccgctatgttcccgatttaaacgctcgcgtgaaatctgtccgtgaagccgccgaacgcatggcgttcaacatgcctgtacagggcacggcagctgacctcatgaaacttgcaatggtgcgcctttttccacaattgcgtgaagttggtgcccgcatgctcttgcaggtccacgatgaactcttgttagaagcgccaaaagagcgtgcggaagaggtggcagccctcgcgaaagaggttatggaaggcgtgtggcccttagcggtgcctcttgaagtcgaagttggtattggcgaggattggttggctgccaaaggataatga

SEQ ID NO: 808 - protein, 841 aa, synthetic construct
  REGION 1..841: note = Variant of DNA polymerase I from Thermus sp. strain 2.9
MHHHHHHGGSGMLPLFEPKGRVLLVDGHHLAYRNFFALKGLTTSRGEPVQGVYGFAKSLLKALKEDGDVVIVVFDAKAPSFRHEAYEAYKAGRAPTPEDFPRQLALMKELVDLLGLERLEVPGFEADDVLATLAKKAEREGYEVQILTADRDLFQLLSPRISVLHPEGHRITPEWLWEKYGLRPEQWVDFRALAGDPSDNIPGVKGIGEKTALKLLKEWGSLENLLKNLDQVKPESVREKILAHLEDLKLSRELSRVRTDLPLEVDFRGRREPDWEGLKAFLERLEFGSLLHEFGLLESPLPAEEAPWPPPEGAFLGYRLSRPEPMWAELLALAASAQGRVYRAEDPHGALRGLKEVRGLLAKDLAVVALREGLDLPPTDDPMLLAYLLDPSNTTPEGVARRYGGEWTEDAGERALLAERLHANLLGRLQGEERLLWLYEEVEKPLSRVLAHMEATGVKLDVAYLEALSLEVAAEMRRLEEEVFRLAGHSFNLNSRDQLERVLFDELGLPPIGKTEKTGKRSTSAAVLEALREVHPIVDKILQYRELAKLKGTYIDPLPALVHPKTGRLHTRFNQTATATGRLSSSDPNLQNIPVRTPLGQKIRRAFVAEEGWRLVALDYSQIELRVLAHLSGDENLIRVFQEGKDIHTQTASWMFGVPAEAIDPLMRRAAKTINFGVLYGMSAHRLSQELGIPYEEAAAFIQRYFQSYPKVKAWIEKTLEEGRTRGYVETLFGRRRYVPDLNARVKSVREAAERMAFNMPVQGTAADLMKLAMVRLFPQLREVGARMLLQVHDELLLEAPKERAEEVAALAKEVMEGVWPLAVPLEVEVGIGEDWLAAKG

SEQ ID NO: 809 - DNA, 2529 bp, synthetic construct
  misc_feature 1..2529: note = Variant of DNA polymerase I from Thermus sp. strain 2.9
  source 1..2529: mol_type = other DNA
atgcaccatcatcatcatcatggcggtagcggcatgttaccgttgttcgaacctaaaggtcgcgtgcttctggttgatggccatcatctcgcgtatcgtaacttctttgccctgaaaggattaaccaccagccgtggcgagccggtacagggtgtctacggctttgcaaagtcgctcctgaaagctctgaaagaagacggtgatgtggtgattgttgtctttgatgcgaaagcgccaagttttcgccacgaagcgtacgaagcttacaaagccgggcgtgctccaacgccggaagactttcctcgccaattggcgcttatgaaggaattagtggatttgcttggcctcgaacgcttggaagttcccggtttcgaggcagacgacgtattagcgactctcgcaaagaaagccgaacgtgagggctatgaagtccagatcttgacagcagatcgcgatcttttccagcttttatctccgcgcatctcggtgttacacccggaagggcatcgtatcaccccggaatggctctgggagaaatatggtttgcgtcccgaacaatgggtggattttcgcgccttagccggcgatccgagcgacaatattccgggagttaaaggtatcggcgagaagacggcgctcaagctccttaaagaatgggggtcgttggagaacttgcttaagaatttagatcaggtcaaaccagagtcagtgcgtgagaagattcttgcacacctcgaagacctcaaattaagccgcgaattgtcccgtgtacgcaccgatttgccgctcgaagttgatttccgtggccgccgcgaacctgactgggagggtcttaaagcgtttttagagcgtcttgaatttggttcgctcttgcatgaattcggccttttagaaagcccgttaccagccgaagaagcaccttggccaccgcccgaaggcgcgtttttaggttaccgtttgagtcgcccggaaccgatgtgggccgaattattggctcttgcagcgtctgcccagggacgtgtgtatcgcgcggaagaccctcatggtgcgctccgcggcctcaaagaagtccgtggactccttgccaaagacttagctgttgttgcattgcgcgaaggtcttgatttacctccgactgatgatccaatgcttcttgcgtacctcttggacccgtcaaacacgacgcccgaaggcgtagcccgtcgttacggcggcgagtggaccgaagatgcaggcgagcgcgcgttattggccgaacgtttgcacgcaaatttattaggacgtttgcaaggcgaggaacgtctcctctggctttacgaagaagtggagaaaccattgagtcgcgtgctcgctcatatggaagctaccggtgtcaaattagacgtggcgtatttggaggcactcagccttgaagttgctgccgaaatgcgccgcttggaggaagaagtattccgtttagcaggccactcctttaaccttaattctcgcgatcagttagaacgtgtgttgttcgatgaacttggtctccctcctatcggcaagacagagaagaccggtaaacgtagcacttcagcggcggttttagaagctcttcgcgaagtccatcccattgtggacaagatcttgcagtaccgcgaactcgcgaaattgaaaggcacctatattgaccgtcttccggcattagtccacccgaaaacgggacgcctccatacccgcttcaaccaaacagccacggcgaccggtcgtttgtcctcctctgatccaaaccttcagaatattccagtacgtaccccattgggccagaagatccgccgcgcgtttgtagctgaggagggttggcgtttagtggccctcgattatagccaaattgaattacgtgtccttgcccatctttctggcgatgagaacctcatccgcgtgtttcaggaaggcaaagacattcacactcaaacggcaagctggatgtttggattatcagctgaagcgatcgatcctttgatgcgtcgtgcagcgaagaccatcaatttcggtgttctctacggtatgagtgcccaccgtttgtcgcaggaattaggcattccctatgaagaagctgcggcgttcattcagcgctactttcaaagctatcccaaagttaaagcatggatcgagaagactctcgaagaaggccgcacacgtggttacgtagagaccttatttggacgtcgccgctatgttcccgatttaaccgctcgcgtgaaatctgtccgtgaagccgccgaacgcatggcgttcaacatgcctgtacagggcacggcagctgacctcatgaaacttgcaatggtgcgcctttttccacaattgcgtgaagttggtgcccgcatgctcttgcaggtccacgatgaactcttgttagaagcgccaaaagagcgtgcggaagaggtggcagccctcgcgaaagaggttatggaaggcgtgtggcccttagcggtgcctcttgaagtcgaagttggtattggcgaggattggttggctgccaaaggataatga

SEQ ID NO: 810 - protein, 841 aa, synthetic construct
  REGION 1..841: note = Variant of DNA polymerase I from Thermus sp. strain 2.9
MHHHHHHGGSGMLPLFEPKGRVLLVDGHHLAYRNFFALKGLTTSRGEPVQGVYGFAKSLLKALKEDGDVVIVVFDAKAPSFRHEAYEAYKAGRAPTPEDFPRQLALMKELVDLLGLERLEVPGFEADDVLATLAKKAEREGYEVQILTADRDLFQLLSPRISVLHPEGHRITPEWLWEKYGLRPEQWVDFRALAGDPSDNIPGVKGIGEKTALKLLKEWGSLENLLKNLDQVKPESVREKILAHLEDLKLSRELSRVRTDLPLEVDFRGRREPDWEGLKAFLERLEFGSLLHEFGLLESPLPAEEAPWPPPEGAFLGYRLSRPEPMWAELLALAASAQGRVYRAEDPHGALRGLKEVRGLLAKDLAVVALREGLDLPPTDDPMLLAYLLDPSNTTPEGVARRYGGEWTEDAGERALLAERLHANLLGRLQGEERLLWLYEEVEKPLSRVLAHMEATGVKLDVAYLEALSLEVAAEMRRLEEEVFRLAGHSFNLNSRDQLERVLFDELGLPPIGKTEKTGKRSTSAAVLEALREVHPIVDKILQYRELAKLKGTYIDRLPALVHPKTGRLHTRFNQTATATGRLSSSDPNLQNIPVRTPLGQKIRRAFVAEEGWRLVALDYSQIELRVLAHLSGDENLIRVFQEGKDIHTQTASWMFGLSAEAIDPLMRRAAKTINFGVLYGMSAHRLSQELGIPYEEAAAFIQRYFQSYPKVKAWIEKTLEEGRTRGYVETLFGRRRYVPDLTARVKSVREAAERMAFNMPVQGTAADLMKLAMVRLFPQLREVGARMLLQVHDELLLEAPKERAEEVAALAKEVMEGVWPLAVPLEVEVGIGEDWLAAKG

SEQ ID NO: 811 - DNA, 2529 bp, synthetic construct
  misc_feature 1..2529: note = Variant of DNA polymerase I from Thermus sp. strain 2.9
  source 1..2529: mol_type = other DNA
atgcaccatcatcatcatcatggcggtagcggcatgttaccgttgttcgaacctaaaggtcgcgtgcttctggttgatggccatcatctcgcgtatcgtaacttctttgccctgaaaggattaaccaccagccgtggcgagccggtacagggtgtctacggctttgcaaagtcgctcctgaaagctctgaaagaagacggtgatgtggtgattgttgtctttgatgcgaaagcgccaagttttcgccacgaagcgtacgaagcttacaaagccgggcgtgctccaacgccggaagactttcctcgccaattggcgcttatgaaggaattagtggatttgcttggcctcgaacgcttggaagttcccggtttcgaggcagacgacgtattagcgactctcgcaaagaaagccgaacgtgagggctatgaagtccagatcttgacagcagatcgcgatcttttccagcttttatctccgcgcatctcggtgttacacccggaagggcatctgatcaccccggaatggctctgggagaaatatggtttgcgtcccgaacaatgggtggattttcgcgccttagcaggcgatccgagcgacaatattccgggagttaaaggtatcggcgagaagacggcgctcaagctccttaaagaatgggggtcgttggagaacttgcttaagaatttagatcaggtcaaaccagagtcagtgcgtgagaagattcttgcacacctcgaagacctcaaattaagccgcgaattgtcccgtgtacgcaccgatttgccgctcgaagttgatttccgtggccgccgcgaacctgactgggagggtcttaaagcgtttttagagcgtcttgaatttggttcgctcttgcatgaattcggccttttagaaagcccgttaccagccgaagaagcaccttggccaccgcccgaaggcgcgtttttaggttaccgtttgagtcgcccggaaccgatgtgggccgaattattggctcttgcagcgtctgcccagggacgtgtgtatcgcgcggaagaccctcatggtgcgctccgcggcctcaaagaagtccgtggactccttgccaaagacttagctgttgttgcattgcgcgaaggtcttgatttacctccgactgatgatccaatgcttcttgcgtacctcttggacccgtcaaacacgacgcccgaaggcgtagcccgtcgttacggcggcgagtggaccgaagatgcaggcgagcgcgcgttattggccgaacgtttgcacgcaaatttattaggacgtttgcaaggcgaggaacgtctcctctggctttacgaagaagtggagaaaccattgagtcgcgtgctcgcgcatatggaagctaccggtgtcaaattagacgtggcgtatttggaggcactcagccttgaagttgctgccgaaatgcgccgcttggaggaagaagtattccgtttagcaggccactcctttaaccttaattctcgcgatcagttagaacgtgtgttgttcgatgaacttggtctccctcctatcggcaagacagagaagaccggtaaacgtagcacttcagcggcggttttagaagctcttcgcgaagtccatcccattgtggacaagatcttgcagtaccgcgaactcgcgaaattgaaaggcacctatattgaccctcttccggcattagtccacccgaaaacgggacgcctccatacccgcttcaaccaaacagccacggcgaccggtcgtttgtcctcctctgatccaaaccttcagaatattccagtacgtaccccattgggccagaagatccgccgcgcgtttgtagctgaggagggttggcgtttagtggccctcgattatagccaaattgaattacgtgtccttgcccatctttctggcgatgagaacctcatccgcgtgtttcaggaaggcaaagacattcacactcaaacggcaagctggatgtttggagtgtcggcggaagcgatcgatcctttgatgcgtcgtgcagcgaagaccatcaatttcggtgttctctacggtatgagtgcccatcgtttgtcgcaggaattaggcattccctatgaagaagctgcggcgttcattcagcgctactttcaaagctatcccaaagttaaagcatggatcgagaagactctcgaagaaggccgcacacgtggttacgtagagaccttatttggacgtcgccgctatgttcccgatttaaacgctcgcgtgaaatctgtccgtgaagccgccgaacgcatggcgttcaacatgcctgtacagggcacggcagctgacctcatgaaacttgcaatggtgcgcctttttccacaattgcgtgaagttggtgcccgcatgctcttgcaggtccacgatgaactcttgttagaagcgccaaaagagcgtgcggaagaggtggcagccctcgcgaaagaggttatggaaggcgtgtggcccttagcggtgcctcttgaagtcgaagttggtattggcgaggattggttggctgccaaaggataatga

SEQ ID NO: 812 - protein, 841 aa, synthetic construct
  REGION 1..841: note = Variant of DNA polymerase I from Thermus sp. strain 2.9
MHHHHHHGGSGMLPLFEPKGRVLLVDGHHLAYRNFFALKGLTTSRGEPVQGVYGFAKSLLKALKEDGDVVIVVFDAKAPSFRHEAYEAYKAGRAPTPEDFPRQLALMKELVDLLGLERLEVPGFEADDVLATLAKKAEREGYEVQILTADRDLFQLLSPRISVLHPEGHLITPEWLWEKYGLRPEQWVDFRALAGDPSDNIPGVKGIGEKTALKLLKEWGSLENLLKNLDQVKPESVREKILAHLEDLKLSRELSRVRTDLPLEVDFRGRREPDWEGLKAFLERLEFGSLLHEFGLLESPLPAEEAPWPPPEGAFLGYRLSRPEPMWAELLALAASAQGRVYRAEDPHGALRGLKEVRGLLAKDLAVVALREGLDLPPTDDPMLLAYLLDPSNTTPEGVARRYGGEWTEDAGERALLAERLHANLLGRLQGEERLLWLYEEVEKPLSRVLAHMEATGVKLDVAYLEALSLEVAAEMRRLEEEVFRLAGHSFNLNSRDQLERVLFDELGLPPIGKTEKTGKRSTSAAVLEALREVHPIVDKILQYRELAKLKGTYIDPLPALVHPKTGRLHTRFNQTATATGRLSSSDPNLQNIPVRTPLGQKIRRAFVAEEGWRLVALDYSQIELRVLAHLSGDENLIRVFQEGKDIHTQTASWMFGVSAEAIDPLMRRAAKTINFGVLYGMSAHRLSQELGIPYEEAAAFIQRYFQSYPKVKAWIEKTLEEGRTRGYVETLFGRRRYVPDLNARVKSVREAAERMAFNMPVQGTAADLMKLAMVRLFPQLREVGARMLLQVHDELLLEAPKERAEEVAALAKEVMEGVWPLAVPLEVEVGIGEDWLAAKG

SEQ ID NO: 813 - DNA, 2529 bp, synthetic construct
  misc_feature 1..2529: note = Variant of DNA polymerase I from Thermus sp. strain 2.9
  source 1..2529: mol_type = other DNA
atgcaccatcatcatcatcatggcggtagcggcatgttaccgttgttcgaacctaaaggtcgcgtgcttctggttgatggccatcatctcgcgtatcgtaacttctttgccctgaaaggattaaccaccagccgtggcgagccggtacagggtgtctacggctttgcaaagtcgctcctgaaagctctgaaagaagacggtgatgtggtgattgttgtctttgatgcgaaagcgccaagttttcgccacgaagcgtacgaagcttacaaagccgggcgtgctccaacgccggaagactttcctcgccaattggcgcttatgaaggaattagtggatttgcttggcctcgaacgcttggaagttcccggtttcgaggcagacgacgtattagcgactctcgcaaagaaagccgaacgtgagggctatgaagtccagatcttgacagcagatcgcgatcttttccagcttttatctccgcgcatctcggtgttacacccggaagggcatcgtatcaccccggaatggctctgggagaaatatggtttgcgtcccgaacaatgggtggattttcgcgccttagccggcgatccgagcgacaatattccgggagttaaaggtatcggcgagaagacggcgctcaagctccttaaagaatgggggtcgttggagaacttgcttaagaatttagatcaggtcaaaccagagtcagtgcgtgagaagattcttgcacacctcgaagacctcaaattaagccgcgaattgtcccgtgtacgcaccgatttgccgctcgaagttgatttccgtggccgccgcgaacctgactgggagggtcttaaagcgtttttagagcgtcttgaatttggttcgctcttgcatgaattcggccttttagaaagcccgttaccagccgaagaagcaccttggccaccgcccgaaggcgcgtttttaggttaccgtttgagtcgcccggaaccgatgtgggccgaattattggctcttgcagcgtctgcccagggacgtgtgtatcgcgcggaagaccctcatggtgcgctccgcggcctcaaagaagtccgtggactccttgccaaagacttagctgttgttgcattgcgcgaaggtcttgatttacctccgactgatgatccaatgcttcttgcgtacctcttggacccgtcaaacacgacgcccgaaggcgtagcccgtcgttacggcggcgagtggaccgaagatgcaggcgagcgcgcgttattggccgaacgtttgcaccagaatttattaggacgtttgcaaggcgaggaacgtctcctctggctttacgaagaagtggagaaaccattgagtcgcgtgctcgctcatatggaagctaccggtgtcaaattagacgtggcgtatttggaggcactcagccttgaagttgctgccgaaatgcgccgcttggaggaagaagtattccgtttagcaggccactcctttaaccttaattctcgcgatcagttagaacgtgtgttgttcgatgaacttggtctccctcctatcggcaagacagagaagaccggtaaacgtagcacttcagcggcggttttagaagctcttcgcgaagtccatcccattgtggacaagatcttgcagtaccgcgaactcgcgaaattgaaaggcacctatattgaccgtcttccggcattagtccacccgaaaacgggacgcctccatacccgcttcaaccaaacagccacggcgaccggtcgtttgtcctcctctgatccaaaccttcagaatattccagtacgtaccccattgggccagaagatccgccgcgcgtttgtagctgaggagggttggcgtttagtggccctcgattatagccaaattgaattacgtgtccttgcccatctttctggcgatgagaacctcatccgcgtgtttcaggaaggcaaagacattcacactcaaacggcaagctggatgtttggagtgtcgtcggaagcgatcgatcctttgatgcgtcgtgcagcgaagaccatcaatttcggtgttctctacggtatgagtgcccaccgtttgtcgcaggaattaggcattccctatgaagaagctgcggcgttcattcagcgctactttcaaagctatcccaaagttaaagcatggatcgagaagactctcgaagaaggccgcacacgtggttacgtagagaccttatttggacgtcgccgctatgttcccgatttaaccgctcgcgtgaaatctgtccgtgaagccgccgaacgcatggcgttcaacatgcctgtacagggcacggcagctgacctcatgaaacttgcaatggtgcgcctttttccacaattgcgtgaagttggtgcccgcatgctcttgcaggtccacgatgaactcttgttagaagcgccaaaagagcgtgcggaagaggtggcagccctcgcgaaagaggttatggaaggcgtgtggcccttagcggtgcctcttgaagtcgaagttggtattggcgaggattggttggctgccaaaggataatga

SEQ ID NO: 814 - protein, 841 aa, synthetic construct
  REGION 1..841: note = Variant of DNA polymerase I from Thermus sp. strain 2.9
MHHHHHHGGSGMLPLFEPKGRVLLVDGHHLAYRNFFALKGLTTSRGEPVQGVYGFAKSLLKALKEDGDVVIVVFDAKAPSFRHEAYEAYKAGRAPTPEDFPRQLALMKELVDLLGLERLEVPGFEADDVLATLAKKAEREGYEVQILTADRDLFQLLSPRISVLHPEGHRITPEWLWEKYGLRPEQWVDFRALAGDPSDNIPGVKGIGEKTALKLLKEWGSLENLLKNLDQVKPESVREKILAHLEDLKLSRELSRVRTDLPLEVDFRGRREPDWEGLKAFLERLEFGSLLHEFGLLESPLPAEEAPWPPPEGAFLGYRLSRPEPMWAELLALAASAQGRVYRAEDPHGALRGLKEVRGLLAKDLAVVALREGLDLPPTDDPMLLAYLLDPSNTTPEGVARRYGGEWTEDAGERALLAERLHQNLLGRLQGEERLLWLYEEVEKPLSRVLAHMEATGVKLDVAYLEALSLEVAAEMRRLEEEVFRLAGHSFNLNSRDQLERVLFDELGLPPIGKTEKTGKRSTSAAVLEALREVHPIVDKILQYRELAKLKGTYIDRLPALVHPKTGRLHTRFNQTATATGRLSSSDPNLQNIPVRTPLGQKIRRAFVAEEGWRLVALDYSQIELRVLAHLSGDENLIRVFQEGKDIHTQTASWMFGVSSEAIDPLMRRAAKTINFGVLYGMSAHRLSQELGIPYEEAAAFIQRYFQSYPKVKAWIEKTLEEGRTRGYVETLFGRRRYVPDLTARVKSVREAAERMAFNMPVQGTAADLMKLAMVRLFPQLREVGARMLLQVHDELLLEAPKERAEEVAALAKEVMEGVWPLAVPLEVEVGIGEDWLAAKG

SEQ ID NO: 815 - DNA, 2529 bp, synthetic construct
  misc_feature 1..2529: note = Variant of DNA polymerase I from Thermus sp. strain 2.9
  source 1..2529: mol_type = other DNA
atgcaccatcatcatcatcatggcggtagcggcatgttaccgttgttcgaacctaaaggtcgcgtgcttctggttgatggccatcatctcgcgtatcgtaacttctttgccctgaaaggattaaccaccagccgtggcgagccggtacagggtgtctacggctttgcaaagtcgctcctgaaagctctgaaagaagacggtgatgtggtgattgttgtctttgatgcgaaagcgccaagttttcgccacgaagcgtacgaagcttacaaagccgggcgtgctccaacgccggaagactttcctcgccaattggcgcttatgaaggaattagtggatttgcttggcctcgaacgcttggaagttcccggtttcgaggcagacgacgtattagcgactctcgcaaagaaagccgaacgtgagggctatgaagtccagatcttgacagcagatcgcgatcttttccagcttttatctccgcgcatctcggtgttacacccggaagggcatctgatcaccccggaatggctctgggagaaatatggtttgcgtcccgaacaatgggtggattttcgcgccttagccggcgatccgagcgacaatattccgggagttaaaggtatcggcgagaagacggcgctcaagctccttaaagaatgggggtcgttggagaacttgcttaagaatttagatcaggtcaaaccagagtcagtgcgtgagaagattcttgcacacctcgaagacctcaaattaagccgcgaattgtcccgtgtacgcaccgatttgccgctcgaagttgatttccgtggccgccgcgaacctgactgggagggtcttaaagcgtttttagagcgtcttgaatttggttcgctcttgcatgaattcggccttttagaaagcccgttaccagccgaagaagcaccttggccaccgcccgaaggcgcgtttttaggttaccgtttgagtcgcccggaaccgatgtgggccgaattattggctcttgcagcgtctgcccagggacgtgtgtatcgcgcggaagaccctcatggtgcgctccgcggcctcaaagaagtccgtggactccttgccaaagacttagctgttgttgcattgcgcgaaggtcttgatttacctccgactgatgatccaatgcttcttgcgtacctcttggacccgtcaaacacgacgcccgaaggcgtagcccgtcgttacggcggcgagtggaccgaagatgcaggcgagcgcgcgttattggccgaacgtttgcaccagaatttattaggacgtttgcaaggcgaggaacgtctcctctggctttacgaagaagtggagaaaccattgagtcgcgtgctccaccatatggaagctaccggtgtcaaattagacgtggcgtatttggaggcactcagccttgaagttgctgccgaaatgcgccgcttggaggaagaagtattccgtttagcaggccactcctttaaccttaattctcgcgatcagttagaacgtgtgttgttcgatgaacttggtctccctcctatcggcaagacagagaagaccggtaaacgtagcacttcagcggcggttttagaagctcttcgcgaagtccatcccattgtggacaagatcttgcagtaccgcgaactcgcgaaattgaaaggcacctatattgaccgtcttccggcattagtccacccgaaaacgggacgcctccatacccgcttcaaccaaacagccacggcgaccggtcgtttgtcctcctctgatccaaaccttcagaatattccagtacgtaccccattgggccagaagatccgccgcgcgtttgtagctgaggagggttggcgtttagtggccctcgattatagccaaattgaattacgtgtccttgcccatctttctggcgatgagaacctcatccgcgtgtttcaggaaggcaaagacattcacactcaaacggcaagctggatgtttggagtgccggcggaagcgatcgatcctttgatgcgtcgtgcagcgaagaccatcaatttcggtgttctctacggtatgagtgccgctcgtttgtcgcaggaattaggcattccctatgaagaagctgcggcgttcattcagcgctactttcaaagctatcccaaagttaaagcatggatcgagaagactctcgaagaaggccgcacacgtggttacgtagagaccttatttggacgtcgccgctatgttcccgatttaaccgctcgcgtgaaatctgtccgtgaagccgccgaacgcatggcgttcaacatgcctgtacagggcacggcagctgacctcatgaaacttgcaatggtgcgcctttttccacaattgcgtgaagttggtgcccgcatgctcttgcaggtccacgatgaactcttgttagaagcgccaaaagagcgtgcggaagaggtggcagccctcgcgaaagaggttatggaaggcgtgtggcccttagcggtgcctcttgaagtcgaagttggtattggcgaggattggttggctgccaaaggataatga

SEQ ID NO: 816 - protein, 841 aa, synthetic construct
  REGION 1..841: note = Variant of DNA polymerase I from Thermus sp. strain 2.9
MHHHHHHGGSGMLPLFEPKGRVLLVDGHHLAYRNFFALKGLTTSRGEPVQGVYGFAKSLLKALKEDGDVVIVVFDAKAPSFRHEAYEAYKAGRAPTPEDFPRQLALMKELVDLLGLERLEVPGFEADDVLATLAKKAEREGYEVQILTADRDLFQLLSPRISVLHPEGHLITPEWLWEKYGLRPEQWVDFRALAGDPSDNIPGVKGIGEKTALKLLKEWGSLENLLKNLDQVKPESVREKILAHLEDLKLSRELSRVRTDLPLEVDFRGRREPDWEGLKAFLERLEFGSLLHEFGLLESPLPAEEAPWPPPEGAFLGYRLSRPEPMWAELLALAASAQGRVYRAEDPHGALRGLKEVRGLLAKDLAVVALREGLDLPPTDDPMLLAYLLDPSNTTPEGVARRYGGEWTEDAGERALLAERLHQNLLGRLQGEERLLWLYEEVEKPLSRVLHHMEATGVKLDVAYLEALSLEVAAEMRRLEEEVFRLAGHSFNLNSRDQLERVLFDELGLPPIGKTEKTGKRSTSAAVLEALREVHPIVDKILQYRELAKLKGTYIDRLPALVHPKTGRLHTRFNQTATATGRLSSSDPNLQNIPVRTPLGQKIRRAFVAEEGWRLVALDYSQIELRVLAHLSGDENLIRVFQEGKDIHTQTASWMFGVPAEAIDPLMRRAAKTINFGVLYGMSAARLSQELGIPYEEAAAFIQRYFQSYPKVKAWIEKTLEEGRTRGYVETLFGRRRYVPDLTARVKSVREAAERMAFNMPVQGTAADLMKLAMVRLFPQLREVGARMLLQVHDELLLEAPKERAEEVAALAKEVMEGVWPLAVPLEVEVGIGEDWLAAKG

SEQ ID NO: 817 - DNA, 2529 bp, synthetic construct
  misc_feature 1..2529: note = Variant of DNA polymerase I from Thermus sp. strain 2.9
  source 1..2529: mol_type = other DNA
atgcaccatcatcatcatcatggcggtagcggcatgttaccgttgttcgaacctaaaggtcgcgtgcttctggttgatggccatcatctcgcgtatcgtaacttctttgccctgaaaggattaaccaccagccgtggcgagccggtacagggtgtctacggctttgcaaagtcgctcctgaaagctctgaaagaagacggtgatgtggtgattgttgtctttgatgcgaaagcgccaagttttcgccacgaagcgtacgaagcttacaaagccgggcgtgctccaacgccggaagactttcctcgccaattggcgcttatgaaggaattagtggatttgcttggcctcgaacgcttggaagttcccggtttcgaggcagacgacgtattagcgactctcgcaaagaaagccgaacgtgagggctatgaagtccagatcttgacagcagatcgcgatcttttccagcttttatctccgcgcatctcggtgttacacccggaagggcatcgtatcaccccggaatggctctgggagaaatatggtttgcgtcccgaacaatgggtggattttcgcgccttagcaggcgatccgagcgacaatattccgggagttaaaggtatcggctggaagacggcgctcaagctccttaaagaatgggggtcgttggagaacttgcttaagaatttagatcaggtcaaaccagagtcagtgcgtgagaagattcttgcacacctcgaagacctcaaattaagccgcgaattgtcccgtgtacgcaccgatttgccgctcgaagttgatttccgtggccgccgcgaacctgactgggagggtcttaaagcgtttttagagcgtcttgaatttggttcgctcttgcatgaattcggccttttagaaagcccgttaccagccgaagaagcaccttggccaccgcccgaaggcgcgtttttaggttaccgtttgagtcgcccggaaccgatgtgggccgaattattggctcttgcagcgtctgcccagggacgtgtgtatcgcgcggaagaccctcatggtgcgctccgcggcctcaaagaagtccgtggactccttgccaaagacttagctgttgttgcattgcgcgaaggtcttgatttacctccgactgatgatccaatgcttcttgcgtacctcttggacccgtcaaacacgacgcccgaaggcgtagcccgtcgttacggcggcgagtggaccgaagatgcaggcgagcgcgcgttattggccgaacgtttgcacgccaatttattaggacgtttgcaaggcgaggaacgtctcctctggctttacgaagaagtggagaaaccattgagtcgcgtgctcgcgcatatggaagctaccggtgtcaaattagacgtggcgtatttggaggcactcagccttgaagttgctgccgaaatgcgccgcttggaggaagaagtattccgtttagcaggccactcctttaaccttaattctcgcgatcagttagaacgtgtgttgttcgatgaacttggtctccctcctatcggcaagacagagaagaccggtaaacgtagcacttcagcggcggttttagaagctcttcgcgaagtccatcccattgtggacaagatcttgcagtaccgcgaactcgcgaaattgaaaggcacctatattgaccctcttccggcattagtccacccgaaaacgggacgcctccatacccgcttcaaccaaacagccacggcgaccggtcgtttgtcctcctctgatccaaaccttcagaatattccagtacgtaccccattgggccagaagatccgccgcgcgtttgtagctgaggagggttggcgtttagtggccctcgattatagccaaattgaattacgtgtccttgcccatctttctggcgatgagaacctcatccgcgtgtttcaggaaggcaaagacattcacactcaaacggcaagctggatgtttggattatcagctgaagcgatcgatcctttgatgcgtcgtgcagcgaagaccatcaatttcggtgttctctacggtatgagtgcccatcgtttgtcgcaggaattaggcattccctatgaagaagctgcggcgttcattcagcgctactttcaaagctatcccaaagttaaagcatggatcgagaagactctcgaagaaggccgcacacgtggttacgtagagaccttatttggacgtcgccgctatgttcccgatttaaacgctcgcgtgaaatctgtccgtgaagccgccgaacgcatggcgttcaacatgcctgtacagggcacggcagctgacctcatgaaacttgcaatggtgcgcctttttccacaattgcgtgaagttggtgcccgcatgctcttgcaggtccacgatgaactcttgttagaagcgccaaaagagcgtgcggaagaggtggcagccctcgcgaaagaggttatggaaggcgtgtggcccttagcggtgcctcttgaagtcgaagttggtattggcgaggattggttggctgccaaaggataatga

SEQ ID NO: 818 - protein, 841 aa, synthetic construct
  REGION 1..841: note = Variant of DNA polymerase I from Thermus sp. strain 2.9
MHHHHHHGGSGMLPLFEPKGRVLLVDGHHLAYRNFFALKGLTTSRGEPVQGVYGFAKSLLKALKEDGDVVIVVFDAKAPSFRHEAYEAYKAGRAPTPEDFPRQLALMKELVDLLGLERLEVPGFEADDVLATLAKKAEREGYEVQILTADRDLFQLLSPRISVLHPEGHRITPEWLWEKYGLRPEQWVDFRALAGDPSDNIPGVKGIGWKTALKLLKEWGSLENLLKNLDQVKPESVREKILAHLEDLKLSRELSRVRTDLPLEVDFRGRREPDWEGLKAFLERLEFGSLLHEFGLLESPLPAEEAPWPPPEGAFLGYRLSRPEPMWAELLALAASAQGRVYRAEDPHGALRGLKEVRGLLAKDLAVVALREGLDLPPTDDPMLLAYLLDPSNTTPEGVARRYGGEWTEDAGERALLAERLHANLLGRLQGEERLLWLYEEVEKPLSRVLAHMEATGVKLDVAYLEALSLEVAAEMRRLEEEVFRLAGHSFNLNSRDQLERVLFDELGLPPIGKTEKTGKRSTSAAVLEALREVHPIVDKILQYRELAKLKGTYIDPLPALVHPKTGRLHTRFNQTATATGRLSSSDPNLQNIPVRTPLGQKIRRAFVAEEGWRLVALDYSQIELRVLAHLSGDENLIRVFQEGKDIHTQTASWMFGLSAEAIDPLMRRAAKTINFGVLYGMSAHRLSQELGIPYEEAAAFIQRYFQSYPKVKAWIEKTLEEGRTRGYVETLFGRRRYVPDLNARVKSVREAAERMAFNMPVQGTAADLMKLAMVRLFPQLREVGARMLLQVHDELLLEAPKERAEEVAALAKEVMEGVWPLAVPLEVEVGIGEDWLAAKG

SEQ ID NO: 819 - DNA, 2529 bp, synthetic construct
  misc_feature 1..2529: note = Variant of DNA polymerase I from Thermus sp. strain 2.9
  source 1..2529: mol_type = other DNA
atgcaccatcatcatcatcatggcggtagcggcatgttaccgttgttcgaacctaaaggtcgcgtgcttctggttgatggccatcatctcgcgtatcgtaacttctttgccctgaaaggattaaccaccagccgtggcgagccggtacagggtgtctacggctttgcaaagtcgctcctgaaagctctgaaagaagacggtgatgtggtgattgttgtctttgatgcgaaagcgccaagttttcgccacgaagcgtacgaagcttacaaagccgggcgtgctccaacgccggaagactttcctcgccaattggcgcttatgaaggaattagtggatttgcttggcctcgaacgcttggaagttcccggtttcgaggcagacgacgtattagcgactctcgcaaagaaagccgaacgtgagggctatgaagtccagatcttgacagcagatcgcgatcttttccagcttttatctccgcgcatctcggtgttacacccggaagggcatctgatcaccccggaatggctctgggagaaatatggtttgcgtcccgaacaatgggtggattttcgcgccttagccggcgatccgagcgacaatattccgggagttaaaggtatcggcgagaagacggcgctcaagctccttaaagaatgggggtcgttggagaacttgcttaagaatttagatcaggtcaaaccagagtcagtgcgtgagaagattcttgcacacctcgaagacctcaaattaagccgcgaattgtcccgtgtacgcaccgatttgccgctcgaagttgatttccgtggccgccgcgaacctgactgggagggtcttaaagcgtttttagagcgtcttgaatttggttcgctcttgcatgaattcggccttttagaaagcccgttaccagccgaagaagcaccttggccaccgcccgaaggcgcgtttttaggttaccgtttgagtcgcccggaaccgatgtgggccgaattattggctcttgcagcgtctgcccagggacgtgtgtatcgcgcggaagaccctcatggtgcgctccgcggcctcaaagaagtccgtggactccttgccaaagacttagctgttgttgcattgcgcgaaggtcttgatttacctccgactgatgatccaatgcttcttgcgtacctcttggacccgtcaaacacgacgcccgaaggcgtagcccgtcgttacggcggcgagtggaccgaagatgcaggcgagcgcgcgttattggccgaacgtttgcacgcaaatttattaggacgtttgcaaggcgaggaacgtctcctctggctttacgaagaagtggagaaaccattgagtcgcgtgctcgctcatatggaagctaccggtgtcaaattagacgtggcgtatttggaggcactcagccttgaagttgctgccgaaatgcgccgcttggaggaagaagtattccgtttagcaggccactcctttaaccttaattctcgcgatcagttagaacgtgtgttgttcgatgaacttggtctccctcctatcggcaagacagagaagaccggtaaacgtagcacttcagcggcggttttagaagctcttcgcgaagtccatcccattgtggacaagatcttgcagtaccgcgaactcgcgaaattgaaaggcacctatattgaccgtcttccggcattagtccacccgaaaacgggacgcctccatacccgcttcaaccaaacagccacggcgaccggtcgtttgtcctcctctgatccaaaccttcagaatattccagtacgtaccccattgggccagaagatccgccgcgcgtttgtagctgaggagggttggcgtttagtggccctcgattatagccaaattgaattacgtgtccttgcccatctttctggcgatgagaacctcatccgcgtgtttcaggaaggcaaagacattcacactcaaacggcaagctggatgtttggagtgtcgtcggaagcgatcgatcctttgatgcgtcgtgcagcgaagaccatcaatttcggtgttctctacggtatgagtgccgctcgtttttcgcaggaattaggcattccctatgaagaagctgcggcgttcattcagcgctactttcaaagctatcccaaagttaaagcatggatcgagaagactctcgaagaaggccgcacacgtggttacgtagagaccttatttggacgtcgccgctatgttcccgatttaaacgctcgcgtgaaatctgtccgtgaagccgccgaacgcatggcgttcaacatgcctgtacagggcacggcagctgacctcatgaaacttgcaatggtgcgcctttttccacaattgcgtgaagttggtgcccgcatgctcttgcaggtccacgatgaactcttgttagaagcgccaaaagagcgtgcggaagaggtggcagccctcgcgaaagaggttatggaaggcgtgtggcccttagcggtgcctcttgaagtcgaagttggtattggcgaggattggttggctgccaaaggataatga

SEQ ID NO: 820 - protein, 841 aa, synthetic construct
  REGION 1..841: note = Variant of DNA polymerase I from Thermus sp. strain 2.9
MHHHHHHGGSGMLPLFEPKGRVLLVDGHHLAYRNFFALKGLTTSRGEPVQGVYGFAKSLLKALKEDGDVVIVVFDAKAPSFRHEAYEAYKAGRAPTPEDFPRQLALMKELVDLLGLERLEVPGFEADDVLATLAKKAEREGYEVQILTADRDLFQLLSPRISVLHPEGHLITPEWLWEKYGLRPEQWVDFRALAGDPSDNIPGVKGIGEKTALKLLKEWGSLENLLKNLDQVKPESVREKILAHLEDLKLSRELSRVRTDLPLEVDFRGRREPDWEGLKAFLERLEFGSLLHEFGLLESPLPAEEAPWPPPEGAFLGYRLSRPEPMWAELLALAASAQGRVYRAEDPHGALRGLKEVRGLLAKDLAVVALREGLDLPPTDDPMLLAYLLDPSNTTPEGVARRYGGEWTEDAGERALLAERLHANLLGRLQGEERLLWLYEEVEKPLSRVLAHMEATGVKLDVAYLEALSLEVAAEMRRLEEEVFRLAGHSFNLNSRDQLERVLFDELGLPPIGKTEKTGKRSTSAAVLEALREVHPIVDKILQYRELAKLKGTYIDRLPALVHPKTGRLHTRFNQTATATGRLSSSDPNLQNIPVRTPLGQKIRRAFVAEEGWRLVALDYSQIELRVLAHLSGDENLIRVFQEGKDIHTQTASWMFGVSSEAIDPLMRRAAKTINFGVLYGMSAARFSQELGIPYEEAAAFIQRYFQSYPKVKAWIEKTLEEGRTRGYVETLFGRRRYVPDLNARVKSVREAAERMAFNMPVQGTAADLMKLAMVRLFPQLREVGARMLLQVHDELLLEAPKERAEEVAALAKEVMEGVWPLAVPLEVEVGIGEDWLAAKG

SEQ ID NO: 821 - DNA, 2529 bp, synthetic construct
  misc_feature 1..2529: note = Variant of DNA polymerase I from Thermus sp. strain 2.9
  source 1..2529: mol_type = other DNA
atgcaccatcatcatcatcatggcggtagcggcatgttaccgttgttcgaacctaaaggtcgcgtgcttctggttgatggccatcatctcgcgtatcgtaacttctttgccctgaaaggattaaccaccagccgtggcgagccggtacagggtgtctacggctttgcaaagtcgctcctgaaagctctgaaagaagacggtgatgtggtgattgttgtctttgatgcgaaagcgccaagttttcgccacgaagcgtacgaagcttacaaagccgggcgtgctccaacgccggaagactttcctcgccaattggcgcttatgaaggaattagtggatttgcttggcctcgaacgcttggaagttcccggtttcgaggcagacgacgtattagcgactctcgcaaagaaagccgaacgtgagggctatgaagtccagatcttgacagcagatcgcgatcttttccagcttttatctccgcgcatctcggtgttacacccggaagggcatctgatcaccccggaatggctctgggagaaatatggtttgcgtcccgaacaatgggtggattttcgcgccttagcaggcgatccgagcgacaatattccgggagttaaaggtatcggcgagaagacggcgctcaagctccttaaagaatgggggtcgttggagaacttgcttaagaatttagatcaggtcaaaccagagtcagtgcgtgagaagattcttgcacacctcgaagacctcaaattaagccgcgaattgtcccgtgtacgcaccgatttgccgctcgaagttgatttccgtggccgccgcgaacctgactgggagggtcttaaagcgtttttagagcgtcttgaatttggttcgctcttgcatgaattcggccttttagaaagcccgttaccagccgaagaagcaccttggccaccgcccgaaggcgcgtttttaggttaccgtttgagtcgcccggaaccgatgtgggccgaattattggctcttgcagcgtctgcccagggacgtgtgtatcgcgcggaagaccctcatggtgcgctccgcggcctcaaagaagtccgtggactccttgccaaagacttagctgttgttgcattgcgcgaaggtcttgatttacctccgactgatgatccaatgcttcttgcgtacctcttggacccgtcaaacacgacgcccgaaggcgtagcccgtcgttacggcggcgagtggaccgaagatgcaggcgagcgcgcgttattggccgaacgtttgcaccagaatttattaggacgtttgcaaggcgaggaacgtctcctctggctttacgaagaagtggagaaaccattgagtcgcgtgctcgctcatatggaagctaccggtgtcaaattagacgtggcgtatttggaggcactcagccttgaagttgctgccgaaatgcgccgcttggaggaagaagtattccgtttagcaggccactcctttaaccttaattctcgcgatcagttagaacgtgtgttgttcgatgaacttggtctccctcctatcggcaagacagagaagaccggtaaacgtagcacttcagcggcggttttagaagctcttcgcgaagtccatcccattgtggacaagatcttgcagtaccgcgaactcgcgaaattgaaaggcacctatattgaccctcttccggcattagtccacccgaaaacgggacgcctccatacccgcttcaaccaaacagccacggcgaccggtcgtttgtcctcctctgatccaaaccttcagaatattccagtacgtaccccattgggccagaagatccgccgcgcgtttgtagctgaggagggttggcgtttagtggccctcgattatagccaaattgaattacgtgtccttgcccatctttctggcgatgagaacctcatccgcgtgtttcaggaaggcaaagacattcacactcaaacggcaagctggatgtttggagtgtcgtcggaagcgatcgatcctttgatgcgtcgtgcagcgaagaccatcaatttcggtgttctctacggtatgagtgcccaccgtttgtcgcaggaattaggcattccctatgaagaagctgcggcgttcattcagcgctactttcaaagctatcccaaagttaaagcatggatcgagaagactctcgaagaaggccgcacacgtggttacgtagagaccttatttggacgtcgccgctatgttcccgatttaaacgctcgcgtgaaatctgtccgtgaagccgccgaacgcatggcgttcaacatgcctgtacagggcacggcagctgacctcatgaaacttgcaatggtgcgcctttttccacaattgcgtgaagttggtgcccgcatgctcttgcaggtccacgatgaactcttgttagaagcgccaaaagagcgtgcggaagaggtggcagccctcgcgaaagaggttatggaaggcgtgtggcccttagcggtgcctcttgaagtcgaagttggtattggcgaggattggttggctgccaaaggataatga

SEQ ID NO: 822 - protein, 841 aa, synthetic construct
  REGION 1..841: note = Variant of DNA polymerase I from Thermus sp. strain 2.9
MHHHHHHGGSGMLPLFEPKGRVLLVDGHHLAYRNFFALKGLTTSRGEPVQGVYGFAKSLLKALKEDGDVVIVVFDAKAPSFRHEAYEAYKAGRAPTPEDFPRQLALMKELVDLLGLERLEVPGFEADDVLATLAKKAEREGYEVQILTADRDLFQLLSPRISVLHPEGHLITPEWLWEKYGLRPEQWVDFRALAGDPSDNIPGVKGIGEKTALKLLKEWGSLENLLKNLDQVKPESVREKILAHLEDLKLSRELSRVRTDLPLEVDFRGRREPDWEGLKAFLERLEFGSLLHEFGLLESPLPAEEAPWPPPEGAFLGYRLSRPEPMWAELLALAASAQGRVYRAEDPHGALRGLKEVRGLLAKDLAVVALREGLDLPPTDDPMLLAYLLDPSNTTPEGVARRYGGEWTEDAGERALLAERLHQNLLGRLQGEERLLWLYEEVEKPLSRVLAHMEATGVKLDVAYLEALSLEVAAEMRRLEEEVFRLAGHSFNLNSRDQLERVLFDELGLPPIGKTEKTGKRSTSAAVLEALREVHPIVDKILQYRELAKLKGTYIDPLPALVHPKTGRLHTRFNQTATATGRLSSSDPNLQNIPVRTPLGQKIRRAFVAEEGWRLVALDYSQIELRVLAHLSGDENLIRVFQEGKDIHTQTASWMFGVSSEAIDPLMRRAAKTINFGVLYGMSAHRLSQELGIPYEEAAAFIQRYFQSYPKVKAWIEKTLEEGRTRGYVETLFGRRRYVPDLNARVKSVREAAERMAFNMPVQGTAADLMKLAMVRLFPQLREVGARMLLQVHDELLLEAPKERAEEVAALAKEVMEGVWPLAVPLEVEVGIGEDWLAAKG

SEQ ID NO: 823 - DNA, 2529 bp, synthetic construct
  misc_feature 1..2529: note = Variant of DNA polymerase I from Thermus sp. strain 2.9
  source 1..2529: mol_type = other DNA
atgcaccatcatcatcatcatggcggtagcggcatgttaccgttgttcgaacctaaaggtcgcgtgcttctggttgatggccatcatctcgcgtatcgtaacttctttgccctgaaaggattaaccaccagccgtggcgagccggtacagggtgtctacggctttgcaaagtcgctcctgaaagctctgaaagaagacggtgatgtggtgattgttgtctttgatgcgaaagcgccaagttttcgccacgaagcgtacgaagcttacaaagccgggcgtgctccaacgccggaagactttcctcgccaattggcgcttatgaaggaattagtggatttgcttggcctcgaacgcttggaagttcccggtttcgaggcagacgacgtattagcgactctcgcaaagaaagccgaacgtgagggctatgaagtccagatcttgacagcagatcgcgatcttttccagcttttatctccgcgcatctcggtgttacacccggaagggcatcgtatcaccccggaatggctctgggagaaatatggtttgcgtcccgaacaatgggtggattttcgcgccttagtcggcgatccgagcgacaatattccgggagttaaaggtatcggcgagaagacggcgctcaagctccttaaagaatgggggtcgttggagaacttgcttaagaatttagatcaggtcaaaccagagtcagtgcgtgagaagattcttgcacacctcgaagacctcaaattaagccgcgaattgtcccgtgtacgcaccgatttgccgctcgaagttgatttccgtggccgccgcgaacctgactgggagggtcttaaagcgtttttagagcgtcttgaatttggttcgctcttgcatgaattcggccttttagaaagcccgttaccagccgaagaagcaccttggccaccgcccgaaggcgcgtttttaggttaccgtttgagtcgcccggaaccgatgtgggccgaattattggctcttgcagcgtctgcccagggacgtgtgtatcgcgcggaagaccctcatggtgcgctccgcggcctcaaagaagtccgtggactccttgccaaagacttagctgttgttgcattgcgcgaaggtcttgatttacctccgactgatgatccaatgcttcttgcgtacctcttggacccgtcaaacacgacgcccgaaggcgtagcccgtcgttacggcggcgagtggaccgaagatgcaggcgagcgcgcgttattggccgaacgtttgcacgcaaatttattaggacgtttgcaaggcgaggaacgtctcctctggctttacgaagaagtggagaaaccattgagtcgcgtgctcgctcatatggaagctaccggtgtcaaattagacgtggcgtatttggaggcactcagccttgaagttgctgccgaaatgcgccgcttggaggaagaagtattccgtttagcaggccactcctttaaccttaattctcgcgatcagttagaacgtgtgttgttcgatgaacttggtctccctcctatcggcaagacagagaagaccggtaaacgtagcacttcagcggcggttttagaagctcttcgcgaagtccatcccattgtggacaagatcttgcagtaccgcgaactcgcgaaattgaaaggcacctatattgaccctcttccggcattagtccacccgaaaacgggacgcctccatacccgcttcaaccaaacagccacggcgaccggtcgtttgtcctcctctgatccaaaccttcagaatattccagtacgtaccccattgggccagaagatccgccgcgcgtttgtagctgaggagggttggcgtttagtggccctcgattatagccaaattgaattacgtgtccttgcccatctttctggcgatgagaacctcatccgcgtgtttcaggaaggcaaagacattcacactcaaacggcaagctggatgtttggagtgccggcggaagcgatcgatcctttgatgcgtcgtgcagcgaagaccatcaatttcggtgttctctacggtatgagtgccgctcgtttgtcgcaggaattaggcattccctatgaagaagctgcggcgttcattcagcgctactttcaaagctatcccaaagttaaagcatggatcgagaagactctcgaagaaggccgcacacgtggttacgtagagaccttatttggacgtcgccgctatgttcccgatttaaacgctcgcgtgaaatctgtccgtgaagccgccgaacgcatggcgttcaacatgcctgtacagggcacggcagctgacctcatgaaacttgcaatggtgcgcctttttccacaattgcgtgaagttggtgcccgcatgctcttgcaggtccacgatgaactcttgttagaagcgccaaaagagcgtgcggaagaggtggcagccctcgcgaaagaggttatggaaggcgtgtggcccttagcggtgcctcttgaagtcgaagttggtattggcgaggattggttggctgccaaaggataatga

SEQ ID NO: 824 - protein, 841 aa, synthetic construct
  REGION 1..841: note = Variant of DNA polymerase I from Thermus sp. strain 2.9
MHHHHHHGGSGMLPLFEPKGRVLLVDGHHLAYRNFFALKGLTTSRGEPVQGVYGFAKSLLKALKEDGDVVIVVFDAKAPSFRHEAYEAYKAGRAPTPEDFPRQLALMKELVDLLGLERLEVPGFEADDVLATLAKKAEREGYEVQILTADRDLFQLLSPRISVLHPEGHRITPEWLWEKYGLRPEQWVDFRALVGDPSDNIPGVKGIGEKTALKLLKEWGSLENLLKNLDQVKPESVREKILAHLEDLKLSRELSRVRTDLPLEVDFRGRREPDWEGLKAFLERLEFGSLLHEFGLLESPLPAEEAPWPPPEGAFLGYRLSRPEPMWAELLALAASAQGRVYRAEDPHGALRGLKEVRGLLAKDLAVVALREGLDLPPTDDPMLLAYLLDPSNTTPEGVARRYGGEWTEDAGERALLAERLHANLLGRLQGEERLLWLYEEVEKPLSRVLAHMEATGVKLDVAYLEALSLEVAAEMRRLEEEVFRLAGHSFNLNSRDQLERVLFDELGLPPIGKTEKTGKRSTSAAVLEALREVHPIVDKILQYRELAKLKGTYIDPLPALVHPKTGRLHTRFNQTATATGRLSSSDPNLQNIPVRTPLGQKIRRAFVAEEGWRLVALDYSQIELRVLAHLSGDENLIRVFQEGKDIHTQTASWMFGVPAEAIDPLMRRAAKTINFGVLYGMSAARLSQELGIPYEEAAAFIQRYFQSYPKVKAWIEKTLEEGRTRGYVETLFGRRRYVPDLNARVKSVREAAERMAFNMPVQGTAADLMKLAMVRLFPQLREVGARMLLQVHDELLLEAPKERAEEVAALAKEVMEGVWPLAVPLEVEVGIGEDWLAAKG

SEQ ID NO: 825 - DNA, 2529 bp, synthetic construct
  misc_feature 1..2529: note = Variant of DNA polymerase I from Thermus sp. strain 2.9
  source 1..2529: mol_type = other DNA
atgcaccatcatcatcatcatggcggtagcggcatgttaccgttgttcgaacctaaaggtcgcgtgcttctggttgatggccatcatctcgcgtatcgtaacttctttgccctgaaaggattaaccaccagccgtggcgagccggtacagggtgtctacggctttgcaaagtcgctcctgaaagctctgaaagaagacggtgatgtggtgattgttgtctttgatgcgaaagcgccaagttttcgccacgaagcgtacgaagcttacaaagccgggcgtgctccaacgccggaagactttcctcgccaattggcgcttatgaaggaattagtggatttgcttggcctcgaacgcttggaagttcccggtttcgaggcagacgacgtattagcgactctcgcaaagaaagccgaacgtgagggctatgaagtccagatcttgacagcagatcgcgatcttttccagcttttatctccgcgcatctcggtgttacacccggaagggcatcgtatcaccccggaatggctctgggagaaatatggtttgcgtcccgaacaatgggtggattttcgcgccttagtcggcgatccgagcgacaatattccgggagttaaaggtatcggcgagaagacggcgctcaagctccttaaagaatgggggtcgttggagaacttgcttaagaatttagatcaggtcaaaccagagtcagtgcgtgagaagattcttgcacacctcgaagacctcaaattaagccgcgaattgtcccgtgtacgcaccgatttgccgctcgaagttgatttccgtggccgccgcgaacctgactgggagggtcttaaagcgtttttagagcgtcttgaatttggttcgctcttgcatgaattcggccttttagaaagcccgttaccagccgaagaagcaccttggccaccgcccgaaggcgcgtttttaggttaccgtttgagtcgcccggaaccgatgtgggccgaattattggctcttgcagcgtctgcccagggacgtgtgtatcgcgcggaagaccctcatggtgcgctccgcggcctcaaagaagtccgtggactccttgccaaagacttagctgttgttgcattgcgcgaaggtcttgatttacctccgactgatgatccaatgcttcttgcgtacctcttggacccgtcaaacacgacgcccgaaggcgtagcccgtcgttacggcggcgagtggaccgaagatgcaggcgagcgcgcgttattggccgaacgtttgcacgcaaatttattaggacgtttgcaaggcgaggaacgtctcctctggctttacgaagaagtggagaaaccattgagtcgcgtgctcgcgcatatggaagctaccggtgtcaaattagacgtggcgtatttggaggcactcagccttgaagttgctgccgaaatgcgccgcttggaggaagaagtattccgtttagcaggccactcctttaaccttaattctcgcgatcagttagaacgtgtgttgttcgatgaacttggtctccctcctatcggcaagacagagaagaccggtaaacgtagcacttcagcggcggttttagaagctcttcgcgaagtccatcccattgtggacaagatcttgcagtaccgcgaactcgcgaaattgaaaggcacctatattgaccgtcttccggcattagtccacccgaaaacgggacgcctccatacccgcttcaaccaaacagccacggcgaccggtcgtttgtcctcctctgatccaaaccttcagaatattccagtacgtaccccattgggccagaagatccgccgcgcgtttgtagctgaggagggttggcgtttagtggccctcgattatagccaaattgaattacgtgtccttgcccatctttctggcgatgagaacctcatccgcgtgtttcaggaaggcaaagacattcacactcaaacggcaagctggatgtttggagtgccggcggaagcgatcgatcctttgatgcgtcgtgcagcgaagaccatcaatttcggtgttctctacggtatgagtgccgctcgtttgtcgcaggaattaggcattccctatgaagaagctgcggcgttcattcagcgctactttcaaagctatcccaaagttaaagcatggatcgagaagactctcgaagaaggccgcacacgtggttacgtagagaccttatttggacgtcgccgctatgttcccgatttaaacgctcgcgtgaaatctgtccgtgaagccgccgaacgcatggcgttcaacatgcctgtacagggcacggcagctgacctcatgaaacttgcaatggtgcgcctttttccacaattgcgtgaagttggtgcccgcatgctcttgcaggtccacgatgaactcttgttagaagcgccaaaagagcgtgcggaagaggtggcagccctcgcgaaagaggttatggaaggcgtgtggcccttagcggtgcctcttgaagtcgaagttggtattggcgaggattggttggctgccaaaggataatga

SEQ ID NO: 826 - protein, 841 aa, synthetic construct
  REGION 1..841: note = Variant of DNA polymerase I from Thermus sp. strain 2.9
MHHHHHHGGSGMLPLFEPKGRVLLVDGHHLAYRNFFALKGLTTSRGEPVQGVYGFAKSLLKALKEDGDVVIVVFDAKAPSFRHEAYEAYKAGRAPTPEDFPRQLALMKELVDLLGLERLEVPGFEADDVLATLAKKAEREGYEVQILTADRDLFQLLSPRISVLHPEGHRITPEWLWEKYGLRPEQWVDFRALVGDPSDNIPGVKGIGEKTALKLLKEWGSLENLLKNLDQVKPESVREKILAHLEDLKLSRELSRVRTDLPLEVDFRGRREPDWEGLKAFLERLEFGSLLHEFGLLESPLPAEEAPWPPPEGAFLGYRLSRPEPMWAELLALAASAQGRVYRAEDPHGALRGLKEVRGLLAKDLAVVALREGLDLPPTDDPMLLAYLLDPSNTTPEGVARRYGGEWTEDAGERALLAERLHANLLGRLQGEERLLWLYEEVEKPLSRVLAHMEATGVKLDVAYLEALSLEVAAEMRRLEEEVFRLAGHSFNLNSRDQLERVLFDELGLPPIGKTEKTGKRSTSAAVLEALREVHPIVDKILQYRELAKLKGTYIDRLPALVHPKTGRLHTRFNQTATATGRLSSSDPNLQNIPVRTPLGQKIRRAFVAEEGWRLVALDYSQIELRVLAHLSGDENLIRVFQEGKDIHTQTASWMFGVPAEAIDPLMRRAAKTINFGVLYGMSAARLSQELGIPYEEAAAFIQRYFQSYPKVKAWIEKTLEEGRTRGYVETLFGRRRYVPDLNARVKSVREAAERMAFNMPVQGTAADLMKLAMVRLFPQLREVGARMLLQVHDELLLEAPKERAEEVAALAKEVMEGVWPLAVPLEVEVGIGEDWLAAKG

SEQ ID NO: 827 - DNA, 2529 bp, synthetic construct
  misc_feature 1..2529: note = Variant of DNA polymerase I from Thermus sp. strain 2.9
  source 1..2529: mol_type = other DNA
atgcaccatcatcatcatcatggcggtagcggcatgttaccgttgttcgaacctaaaggtcgcgtgcttctggttgatggccatcatctcgcgtatcgtaacttctttgccctgaaaggattaaccaccagccgtggcgagccggtacagggtgtctacggctttgcaaagtcgctcctgaaagctctgaaagaagacggtgatgtggtgattgttgtctttgatgcgaaagcgccaagttttcgccacgaagcgtacgaagcttacaaagccgggcgtgctccaacgccggaagactttcctcgccaattggcgcttatgaaggaattagtggatttgcttggcctcgaacgcttggaagttcccggtttcgaggcagacgacgtattagcgactctcgcaaagaaagccgaacgtgagggctatgaagtccagatcttgacagcagatcgcgatcttttccagcttttatctccgcgcatctcggtgttacacccggaagggcatcgtatcaccccggaatggctctgggagaaatatggtttgcgtcccgaacaatgggtggattttcgcgccttagtcggcgatccgagcgacaatattccgggagttaaaggtatcggcgagaagacggcgctcaagctccttaaagaatgggggtcgttggagaacttgcttaagaatttagatcaggtcaaaccagagtcagtgcgtgagaagattcttgcacacctcgaagacctcaaattaagccgcgaattgtcccgtgtacgcaccgatttgccgctcgaagttgatttccgtggccgccgcgaacctgactgggagggtcttaaagcgtttttagagcgtcttgaatttggttcgctcttgcatgaattcggccttttagaaagcccgttaccagccgaagaagcaccttggccaccgcccgaaggcgcgtttttaggttaccgtttgagtcgcccggaaccgatgtgggccgaattattggctcttgcagcgtctgcccagggacgtgtgtatcgcgcggaagaccctcatggtgcgctccgcggcctcaaagaagtccgtggactccttgccaaagacttagctgttgttgcattgcgcgaaggtcttgatttacctccgactgatgatccaatgcttcttgcgtacctcttggacccgtcaaacacgacgcccgaaggcgtagcccgtcgttacggcggcgagtggaccgaagatgcaggcgagcgcgcgttattggccgaacgtttgcacgcaaatttattaggacgtttgcaaggcgaggaacgtctcctctggctttacgaagaagtggagaaaccattgagtcgcgtgctccaccatatggaagctaccggtgtcaaattagacgtggcgtatttggaggcactcagccttgaagttgctgccgaactgcgccgcttggaggaagaagtattccgtttagcaggccactcctttaaccttaattctcgcgatcagttagaacgtgtgttgttcgatgaacttggtctccctcctatcggcaagacagagaagaccggtaaacgtagcacttcagcggcggttttagaagctcttcgcgaagtccatcccattgtggacaagatcttgcagtaccgcgaactcgcgaaattgaaaggcacctatattgaccgtcttccggcattagtccacccgaaaacgggacgcctccatacccgcttcaaccaaacagccacggcgaccggtcgtttgtcctcctctgatccaaaccttcagaatattccagtacgtaccccattgggccagaagatccgccgcgcgtttgtagctgaggagggttggcgtttagtggccctcgattatagccaaattgaattacgtgtccttgcccatctttctggcgatgagaacctcatccgcgtgtttcaggaaggcaaagacattcacactcaaacggcaagctggatgtttggagtgccggcggaagcgatcgatcctttgatgcgtcgtgcagcgaagaccatcaatttcggtgttctctacggtatgagtgcccaccgtttgtcgcaggaattaggcattccctatgaagaagctgcggcgttcattcagcgctactttcaaagctatcccaaagttaaagcatggatcgagaagactctcgaagaaggccgcacacgtggttacgtagagaccttatttggacgtcgccgctatgttcccgatttaaacgctcgcgtgaaatctgtccgtgaagccgccgaacgcatggcgttcaacatgcctgtacagggcacggcagctgacctcatgaaacttgcaatggtgcgcctttttccacaattgcgtgaagttggtgcccgcatgctcttgcaggtccacgatgaactcttgttagaagcgccaaaagagcgtgcggaagaggtggcagccctcgcgaaagaggttatggaaggcgtgtggcccttagcggtgcctcttgaagtcgaagttggtattggcgaggattggttggctgccaaaggataatga

SEQ ID NO: 828 - protein, 841 aa, synthetic construct
  REGION 1..841: note = Variant of DNA polymerase I from Thermus sp. strain 2.9
MHHHHHHGGSGMLPLFEPKGRVLLVDGHHLAYRNFFALKGLTTSRGEPVQGVYGFAKSLLKALKEDGDVVIVVFDAKAPSFRHEAYEAYKAGRAPTPEDFPRQLALMKELVDLLGLERLEVPGFEADDVLATLAKKAEREGYEVQILTADRDLFQLLSPRISVLHPEGHRITPEWLWEKYGLRPEQWVDFRALVGDPSDNIPGVKGIGEKTALKLLKEWGSLENLLKNLDQVKPESVREKILAHLEDLKLSRELSRVRTDLPLEVDFRGRREPDWEGLKAFLERLEFGSLLHEFGLLESPLPAEEAPWPPPEGAFLGYRLSRPEPMWAELLALAASAQGRVYRAEDPHGALRGLKEVRGLLAKDLAVVALREGLDLPPTDDPMLLAYLLDPSNTTPEGVARRYGGEWTEDAGERALLAERLHANLLGRLQGEERLLWLYEEVEKPLSRVLHHMEATGVKLDVAYLEALSLEVAAELRRLEEEVFRLAGHSFNLNSRDQLERVLFDELGLPPIGKTEKTGKRSTSAAVLEALREVHPIVDKILQYRELAKLKGTYIDRLPALVHPKTGRLHTRFNQTATATGRLSSSDPNLQNIPVRTPLGQKIRRAFVAEEGWRLVALDYSQIELRVLAHLSGDENLIRVFQEGKDIHTQTASWMFGVPAEAIDPLMRRAAKTINFGVLYGMSAHRLSQELGIPYEEAAAFIQRYFQSYPKVKAWIEKTLEEGRTRGYVETLFGRRRYVPDLNARVKSVREAAERMAFNMPVQGTAADLMKLAMVRLFPQLREVGARMLLQVHDELLLEAPKERAEEVAALAKEVMEGVWPLAVPLEVEVGIGEDWLAAKG

SEQ ID NO: 829 - DNA, 2529 bp, synthetic construct
  misc_feature 1..2529: note = Variant of DNA polymerase I from Thermus sp. strain 2.9
  source 1..2529: mol_type = other DNA
atgcaccatcatcatcatcatggcggtagcggcatgttaccgttgttcgaacctaaaggtcgcgtgcttctggttgatggccatcatctcgcgtatcgtaacttctttgccctgaaaggattaaccaccagccgtggcgagccggtacagggtgtctacggctttgcaaagtcgctcctgaaagctctgaaagaagacggtgatgtggtgattgttgtctttgatgcgaaagcgccaagttttcgccacgaagcgtacgaagcttacaaagccgggcgtgctccaacgccggaagactttcctcgccaattggcgcttatgaaggaattagtggatttgcttggcctcgaacgcttggaagttcccggtttcgaggcagacgacgtattagcgactctcgcaaagaaagccgaacgtgagggctatgaagtccagatcttgacagcagatcgcgatcttttccagcttttatctccgcgcatctcggtgttacacccggaagggcatctgatcaccccggaatggctctgggagaaatatggtttgcgtcccgaacaatgggtggattttcgcgccttagcaggcgatccgagcgacaatattccgggagttaaaggtatcggcgagaagacggcgctcaagctccttaaagaatgggggtcgttggagaacttgcttaagaatttagatcaggtcaaaccagagtcagtgcgtgagaagattcttgcacacctcgaagacctcaaattaagccgcgaattgtcccgtgtacgcaccgatttgccgctcgaagttgatttccgtggccgccgcgaacctgactgggagggtcttaaagcgtttttagagcgtcttgaatttggttcgctcttgcatgaattcggccttttagaaagcccgttaccagccgaagaagcaccttggccaccgcccgaaggcgcgtttttaggttaccgtttgagtcgcccggaaccgatgtgggccgaattattggctcttgcagcgtctgcccagggacgtgtgtatcgcgcggaagaccctcatggtgcgctccgcggcctcaaagaagtccgtggactccttgccaaagacttagctgttgttgcattgcgcgaaggtcttgatttacctccgactgatgatccaatgcttcttgcgtacctcttggacccgtcaaacacgacgcccgaaggcgtagcccgtcgttacggcggcgagtggaccgaagatgcaggcgagcgcgcgttattggccgaacgtttgcaccagaatttattaggacgtttgcaaggcgaggaacgtctcctctggctttacgaagaagtggagaaaccattgagtcgcgtgctcgctcatatggaagctaccggtgtcaaattagacgtggcgtatttggaggcactcagccttgaagttgctgccgaaatgcgccgcttggaggaagaagtattccgtttagcaggccactcctttaaccttaattctcgcgatcagttagaacgtgtgttgttcgatgaacttggtctccctcctatcggcaagacagagaagaccggtaaacgtagcacttcagcggcggttttagaagctcttcgcgaagtccatcccattgtggacaagatcttgcagtaccgcgaactcgcgaaattgaaaggcacctatattgaccgtcttccggcattagtccacccgaaaacgggacgcctccatacccgcttcaaccaaacagccacggcgaccggtcgtttgtcctcctctgatccaaaccttcagaatattccagtacgtaccccattgggccagaagatccgccgcgcgtttgtagctgaggagggttggcgtttagtggccctcgattatagccaaattgaattacgtgtccttgcccatctttctggcgatgagaacctcatccgcgtgtttcaggaaggcaaagacattcacactcaaacggcaagctggatgtttggactgccgtcggaagcgatcgatcctttgatgcgtcgtgcagcgaagaccatcaatttcggtgttctctacggtatgagtgccgctcgtttgtcgcaggaattaggcattccctatgaagaagctgcggcgttcattcagcgctactttcaaagctatcccaaagttaaagcatggatcgagaagactctcgaagaaggccgcacacgtggttacgtagagaccttatttggacgtcgccgctatgttcccgatttaaccgctcgcgtgaaatctgtccgtgaagccgccgaacgcatggcgttcaacatgcctgtacagggcacggcagctgacctcatgaaacttgcaatggtgcgcctttttccacaattgcgtgaagttggtgcccgcatgctcttgcaggtccacgatgaactcttgttagaagcgccaaaagagcgtgcggaagaggtggcagccctcgcgaaagaggttatggaaggcgtgtggcccttagcggtgcctcttgaagtcgaagttggtattggcgaggattggttggctgccaaaggataatga

SEQ ID NO: 830 - protein, 841 aa, synthetic construct
  REGION 1..841: note = Variant of DNA polymerase I from Thermus sp. strain 2.9
MHHHHHHGGSGMLPLFEPKGRVLLVDGHHLAYRNFFALKGLTTSRGEPVQGVYGFAKSLLKALKEDGDVVIVVFDAKAPSFRHEAYEAYKAGRAPTPEDFPRQLALMKELVDLLGLERLEVPGFEADDVLATLAKKAEREGYEVQILTADRDLFQLLSPRISVLHPEGHLITPEWLWEKYGLRPEQWVDFRALAGDPSDNIPGVKGIGEKTALKLLKEWGSLENLLKNLDQVKPESVREKILAHLEDLKLSRELSRVRTDLPLEVDFRGRREPDWEGLKAFLERLEFGSLLHEFGLLESPLPAEEAPWPPPEGAFLGYRLSRPEPMWAELLALAASAQGRVYRAEDPHGALRGLKEVRGLLAKDLAVVALREGLDLPPTDDPMLLAYLLDPSNTTPEGVARRYGGEWTEDAGERALLAERLHQNLLGRLQGEERLLWLYEEVEKPLSRVLAHMEATGVKLDVAYLEALSLEVAAEMRRLEEEVFRLAGHSFNLNSRDQLERVLFDELGLPPIGKTEKTGKRSTSAAVLEALREVHPIVDKILQYRELAKLKGTYIDRLPALVHPKTGRLHTRFNQTATATGRLSSSDPNLQNIPVRTPLGQKIRRAFVAEEGWRLVALDYSQIELRVLAHLSGDENLIRVFQEGKDIHTQTASWMFGLPSEAIDPLMRRAAKTINFGVLYGMSAARLSQELGIPYEEAAAFIQRYFQSYPKVKAWIEKTLEEGRTRGYVETLFGRRRYVPDLTARVKSVREAAERMAFNMPVQGTAADLMKLAMVRLFPQLREVGARMLLQVHDELLLEAPKERAEEVAALAKEVMEGVWPLAVPLEVEVGIGEDWLAAKG

SEQ ID NO: 831 - DNA, 2529 bp, synthetic construct
  misc_feature 1..2529: note = Variant of DNA polymerase I from Thermus sp. strain 2.9
  source 1..2529: mol_type = other DNA
atgcaccatcatcatcatcatggcggtagcggcatgttaccgttgttcgaacctaaaggtcgcgtgcttctggttgatggccatcatctcgcgtatcgtaacttctttgccctgaaaggattaaccaccagccgtggcgagccggtacagggtgtctacggctttgcaaagtcgctcctgaaagctctgaaagaagacggtgatgtggtgattgttgtctttgatgcgaaagcgccaagttttcgccacgaagcgtacgaagcttacaaagccgggcgtgctccaacgccggaagactttcctcgccaattggcgcttatgaaggaattagtggatttgcttggcctcgaacgcttggaagttcccggtttcgaggcagacgacgtattagcgactctcgcaaagaaagccgaacgtgagggctatgaagtccagatcttgacagcagatcgcgatcttttccagcttttatctccgcgcatctcggtgttacacccggaagggcatcgtatcaccccggaatggctctgggagaaatatggtttgcgtcccgaacaatgggtggattttcgcgccttagcaggcgatccgagcgacaatattccgggagttaaaggtatcggcgagaagacggcgctcaagctccttaaagaatgggggtcgttggagaacttgcttaagaatttagatcaggtcaaaccagagtcagtgcgtgagaagattcttgcacacctcgaagacctcaaattaagccgcgaattgtcccgtgtacgcaccgatttgccgctcgaagttgatttccgtggccgccgcgaacctgactgggagggtcttaaagcgtttttagagcgtcttgaatttggttcgctcttgcatgaattcggccttttagaaagcccgttaccagccgaagaagcaccttggccaccgcccgaaggcgcgtttttaggttaccgtttgagtcgcccggaaccgatgtgggccgaattattggctcttgcagcgtctgcccagggacgtgtgtatcgcgcggaagaccctcatggtgcgctccgcggcctcaaagaagtccgtggactccttgccaaagacttagctgttgttgcattgcgcgaaggtcttgatttacctccgactgatgatccaatgcttcttgcgtacctcttggacccgtcaaacacgacgcccgaaggcgtagcccgtcgttacggcggcgagtggaccgaagatgcaggcgagcgcgcgttattggccgaacgtttgcacgcaaatttattaggacgtttgcaaggcgaggaacgtctcctctggctttacgaagaagtggagaaaccattgagtcgcgtgctcgctcatatggaagctaccggtgtcaaattagacgtggcgtatttggaggcactcagccttgaagttgctgccgaactgcgccgcttggaggaagaagtattccgtttagcaggccactcctttaaccttaattctcgcgatcagttagaacgtgtgttgttcgatgaacttggtctccctcctatcggcaagacagagaagaccggtaaacgtagcacttcagcggcggttttagaagctcttcgcgaagtccatcccattgtggacaagatcttgcagtaccgcgaactcgcgaaattgaaaggcacctatattgaccgtcttccggcattagtccacccgaaaacgggacgcctccatacccgcttcaaccaaacagccacggcgaccggtcgtttgtcctcctctgatccaaaccttcagaatattccagtacgtaccccattgggccagaagatccgccgcgcgtttgtagctgaggagggttggcgtttagtggccctcgattatagccaaattgaattacgtgtccttgcccatctttctggcgatgagaacctcatccgcgtgtttcaggaaggcaaagacattcacactcaaacggcaagctggatgtttggagtgccggcggaagcgatcgatcctttgatgcgtcgtgcagcgaagaccatcaatttcggtgttctctacggtatgagtgcccatcgtttgtcgcaggaattaggcattccctatgaagaagctgcggcgttcattcagcgctactttcaaagctatcccaaagttaaagcatggatcgagaagactctcgaagaaggccgcacacgtggttacgtagagaccttatttggacgtcgccgctatgttcccgatttaaacgctcgcgtgaaatctgtccgtgaagccgccgaacgcatggcgttcaacatgcctgtacagggcacggcagctgacctcatgaaacttgcaatggtgcgcctttttccacaattgcgtgaagttggtgcccgcatgctcttgcaggtccacgatgaactcttgttagaagcgccaaaagagcgtgcggaagaggtggcagccctcgcgaaagaggttatggaaggcgtgtggcccttagcggtgcctcttgaagtcgaagttggtattggcgaggattggttggctgccaaaggataatga

SEQ ID NO: 832 - protein, 841 aa, synthetic construct
  REGION 1..841: note = Variant of DNA polymerase I from Thermus sp. strain 2.9
MHHHHHHGGSGMLPLFEPKGRVLLVDGHHLAYRNFFALKGLTTSRGEPVQGVYGFAKSLLKALKEDGDVVIVVFDAKAPSFRHEAYEAYKAGRAPTPEDFPRQLALMKELVDLLGLERLEVPGFEADDVLATLAKKAEREGYEVQILTADRDLFQLLSPRISVLHPEGHRITPEWLWEKYGLRPEQWVDFRALAGDPSDNIPGVKGIGEKTALKLLKEWGSLENLLKNLDQVKPESVREKILAHLEDLKLSRELSRVRTDLPLEVDFRGRREPDWEGLKAFLERLEFGSLLHEFGLLESPLPAEEAPWPPPEGAFLGYRLSRPEPMWAELLALAASAQGRVYRAEDPHGALRGLKEVRGLLAKDLAVVALREGLDLPPTDDPMLLAYLLDPSNTTPEGVARRYGGEWTEDAGERALLAERLHANLLGRLQGEERLLWLYEEVEKPLSRVLAHMEATGVKLDVAYLEALSLEVAAELRRLEEEVFRLAGHSFNLNSRDQLERVLFDELGLPPIGKTEKTGKRSTSAAVLEALREVHPIVDKILQYRELAKLKGTYIDRLPALVHPKTGRLHTRFNQTATATGRLSSSDPNLQNIPVRTPLGQKIRRAFVAEEGWRLVALDYSQIELRVLAHLSGDENLIRVFQEGKDIHTQTASWMFGVPAEAIDPLMRRAAKTINFGVLYGMSAHRLSQELGIPYEEAAAFIQRYFQSYPKVKAWIEKTLEEGRTRGYVETLFGRRRYVPDLNARVKSVREAAERMAFNMPVQGTAADLMKLAMVRLFPQLREVGARMLLQVHDELLLEAPKERAEEVAALAKEVMEGVWPLAVPLEVEVGIGEDWLAAKG

SEQ ID NO: 833 - DNA, 2529 bp, synthetic construct
  misc_feature 1..2529: note = Variant of DNA polymerase I from Thermus sp. strain 2.9
  source 1..2529: mol_type = other DNA
atgcaccatcatcatcatcatggcggtagcggcatgttaccgttgttcgaacctaaaggtcgcgtgcttctggttgatggccatcatctcgcgtatcgtaacttctttgccctgaaaggattaaccaccagccgtggcgagccggtacagggtgtctacggctttgcaaagtcgctcctgaaagctctgaaagaagacggtgatgtggtgattgttgtctttgatgcgaaagcgccaagttttcgccacgaagcgtacgaagcttacaaagccgggcgtgctccaacgccggaagactttcctcgccaattggcgcttatgaaggaattagtggatttgcttggcctcgaacgcttggaagttcccggtttcgaggcagacgacgtattagcgactctcgcaaagaaagccgaacgtgagggctatgaagtccagatcttgacagcagatcgcgatcttttccagcttttatctccgcgcatctcggtgttacacccggaagggcatcgtatcaccccggaatggctctgggagaaatatggtttgcgtcccgaacaatgggtggattttcgcgccttagcaggcgatccgagcgacaatattccgggagttaaaggtatcggcgagaagacggcgctcaagctccttaaagaatgggggtcgttggagaacttgcttaagaatttagatcaggtcaaaccagagtcagtgcgtgagaagattcttgcacacctcgaagacctcaaattaagccgcgaattgtcccgtgtacgcaccgatttgccgctcgaagttgatttccgtggccgccgcgaacctgactgggagggtcttaaagcgtttttagagcgtcttgaatttggttcgctcttgcatgaattcggccttttagaaagcccgttaccagccgaagaagcaccttggccaccgcccgaaggcgcgtttttaggttaccgtttgagtcgcccggaaccgatgtgggccgaattattggctcttgcagcgtctgcccagggacgtgtgtatcgcgcggaagaccctcatggtgcgctccgcggcctcaaagaagtccgtggactccttgccaaagacttagctgttgttgcattgcgcgaaggtcttgatttacctccgactgatgatccaatgcttcttgcgtacctcttggacccgtcaaacacgacgcccgaaggcgtagcccgtcgttacggcggcgagtggaccgaagatgcaggcgagcgcgcgttattggccgaacgtttgcaccagaatttattaggacgtttgcaaggcgaggaacgtctcctctggctttacgaagaagtggagaaaccattgagtcgcgtgctcgctcatatggaagctaccggtgtcaaattagacgtggcgtatttggaggcactcagccttgaagttgctgccgaaatgcgccgcttggaggaagaagtattccgtttagcaggccactcctttaaccttaattctcgcgatcagttagaacgtgtgttgttcgatgaacttggtctccctcctatcggcaagacagagaagaccggtaaacgtagcacttcagcggcggttttagaagctcttcgcgaagtccatcccattgtggacaagatcttgcagtaccgcgaactcgcgaaattgaaaggcacctatattgaccgtcttccggcattagtccacccgaaaacgggacgcctccatacccgcttcaaccaaacagccacggcgaccggtcgtttgtcctcctctgatccaaaccttcagaatattccagtacgtaccccattgggccagaagatccgccgcgcgtttgtagctgaggagggttggcgtttagtggccctcgattatagccaaattgaattacgtgtccttgcccatctttctggcgatgagaacctcatccgcgtgtttcaggaaggcaaagacattcacactcaaacggcaagctggatgtttggagtgtcggcggaagcgatcgatcctttgatgcgtcgtgcagcgaagaccatcaatttcggtgttctctacggtatgagtgcccaccgtttgtcgcaggaattaggcattccctatgaagaagctgcggcgttcattcagcgctactttcaaagctatcccaaagttaaagcatggatcgagaagactctcgaagaaggccgcacacgtggttacgtagagaccttatttggacgtcgccgctatgttcccgatttaaacgctcgcgtgaaatctgtccgtgaagccgccgaacgcatggcgttcaacatgcctgtacagggcacggcagctgacctcatgaaacttgcaatggtgcgcctttttccacaattgcgtgaagttggtgcccgcatgctcttgcaggtccacgatgaactcttgttagaagcgccaaaagagcgtgcggaagaggtggcagccctcgcgaaagaggttatggaaggcgtgtggcccttagcggtgcctcttgaagtcgaagttggtattggcgaggattggttggctgccaaaggataatga

SEQ ID NO: 834 - protein, 841 aa, synthetic construct
  REGION 1..841: note = Variant of DNA polymerase I from Thermus sp. strain 2.9
MHHHHHHGGSGMLPLFEPKGRVLLVDGHHLAYRNFFALKGLTTSRGEPVQGVYGFAKSLLKALKEDGDVVIVVFDAKAPSFRHEAYEAYKAGRAPTPEDFPRQLALMKELVDLLGLERLEVPGFEADDVLATLAKKAEREGYEVQILTADRDLFQLLSPRISVLHPEGHRITPEWLWEKYGLRPEQWVDFRALAGDPSDNIPGVKGIGEKTALKLLKEWGSLENLLKNLDQVKPESVREKILAHLEDLKLSRELSRVRTDLPLEVDFRGRREPDWEGLKAFLERLEFGSLLHEFGLLESPLPAEEAPWPPPEGAFLGYRLSRPEPMWAELLALAASAQGRVYRAEDPHGALRGLKEVRGLLAKDLAVVALREGLDLPPTDDPMLLAYLLDPSNTTPEGVARRYGGEWTEDAGERALLAERLHQNLLGRLQGEERLLWLYEEVEKPLSRVLAHMEATGVKLDVAYLEALSLEVAAEMRRLEEEVFRLAGHSFNLNSRDQLERVLFDELGLPPIGKTEKTGKRSTSAAVLEALREVHPIVDKILQYRELAKLKGTYIDRLPALVHPKTGRLHTRFNQTATATGRLSSSDPNLQNIPVRTPLGQKIRRAFVAEEGWRLVALDYSQIELRVLAHLSGDENLIRVFQEGKDIHTQTASWMFGVSAEAIDPLMRRAAKTINFGVLYGMSAHRLSQELGIPYEEAAAFIQRYFQSYPKVKAWIEKTLEEGRTRGYVETLFGRRRYVPDLNARVKSVREAAERMAFNMPVQGTAADLMKLAMVRLFPQLREVGARMLLQVHDELLLEAPKERAEEVAALAKEVMEGVWPLAVPLEVEVGIGEDWLAAKG

SEQ ID NO: 835 - DNA, 2529 bp, synthetic construct
  misc_feature 1..2529: note = Variant of DNA polymerase I from Thermus sp. strain 2.9
  source 1..2529: mol_type = other DNA
atgcaccatcatcatcatcatggcggtagcggcatgttaccgttgttcgaacctaaaggtcgcgtgcttctggttgatggccatcatctcgcgtatcgtaacttctttgccctgaaaggattaaccaccagccgtggcgagccggtacagggtgtctacggctttgcaaagtcgctcctgaaagctctgaaagaagacggtgatgtggtgattgttgtctttgatgcgaaagcgccaagttttcgccacgaagcgtacgaagcttacaaagccgggcgtgctccaacgccggaagactttcctcgccaattggcgcttatgaaggaattagtggatttgcttggcctcgaacgcttggaagttcccggtttcgaggcagacgacgtattagcgactctcgcaaagaaagccgaacgtgagggctatgaagtccagatcttgacagcagatcgcgatcttttccagcttttatctccgcgcatctcggtgttacacccggaagggcatcgtatcaccccggaatggctctgggagaaatatggtttgcgtcccgaacaatgggtggattttcgcgccttagccggcgatccgagcgacaatattccgggagttaaaggtatcggcgagaagacggcgctcaagctccttaaagaatgggggtcgttggagaacttgcttaagaatttagatcaggtcaaaccagagtcagtgcgtgagaagattcttgcacacctcgaagacctcaaattaagccgcgaattgtcccgtgtacgcaccgatttgccgctcgaagttgatttccgtggccgccgcgaacctgactgggagggtcttaaagcgtttttagagcgtcttgaatttggttcgctcttgcatgaattcggccttttagaaagcccgttaccagccgaagaagcaccttggccaccgcccgaaggcgcgtttttaggttaccgtttgagtcgcccggaaccgatgtgggccgaattattggctcttgcagcgtctgcccagggacgtgtgtatcgcgcggaagaccctcatggtgcgctccgcggcctcaaagaagtccgtggactccttgccaaagacttagctgttgttgcattgcgcgaaggtcttgatttacctccgactgatgatccaatgcttcttgcgtacctcttggacccgtcaaacacgacgcccgaaggcgtagcccgtcgttacggcggcgagtggaccgaagatgcaggcgagcgcgcgttattggccgaacgtttgcacgcaaatttattaggacgtttgcaaggcgaggaacgtctcctctggctttacgaagaagtggagaaaccattgagtcgcgtgctcgctcatatggaagctaccggtgtcaaattagacgtggcgtatttggaggcactcagccttgaagttgctgccgaactgcgccgcttggaggaagaagtattccgtttagcaggccactcctttaaccttaattctcgcgatcagttagaacgtgtgttgttcgatgaacttggtctccctcctatcggcaagacagagaagaccggtaaacgtagcacttcagcggcggttttagaagctcttcgcgaagtccatcccattgtggacaagatcttgcagtaccgcgaactcgcgaaattgaaaggcacctatattgaccctcttccggcattagtccacccgaaaacgggacgcctccatacccgcttcaaccaaacagccacggcgaccggtcgtttgtcctcctctgatccaaaccttcagaatattccagtacgtaccccattgggccagaagatccgccgcgcgtttgtagctgaggagggttggcgtttagtggccctcgattatagccaaattgaattacgtgtccttgcccatctttctggcgatgagaacctcatccgcgtgtttcaggaaggcaaagacattcacactcaaacggcaagctggatgtttggattatcagctgaagcgatcgatcctttgatgcgtcgtgcagcgaagaccatcaatttcggtgttctctacggtatgagtgcccaccgtttgtcgcaggaattaggcattccctatgaagaagctgcggcgttcattcagcgctactttcaaagctatcccaaagttaaagcatggatcgagaagactctcgaagaaggccgcacacgtggttacgtagagaccttatttggacgtcgccgctatgttcccgatttaaacgctcgcgtgaaatctgtccgtgaagccgccgaacgcatggcgttcaacatgcctgtacagggcacggcagctgacctcatgaaacttgcaatggtgcgcctttttccacaattgcgtgaagttggtgcccgcatgctcttgcaggtccacgatgaactcttgttagaagcgccaaaagagcgtgcggaagaggtggcagccctcgcgaaagaggttatggaaggcgtgtggcccttagcggtgcctcttgaagtcgaagttggtattggcgaggattggttggctgccaaaggataatga

SEQ ID NO: 836 - protein, 841 aa, synthetic construct
  REGION 1..841: note = Variant of DNA polymerase I from Thermus sp. strain 2.9
MHHHHHHGGSGMLPLFEPKGRVLLVDGHHLAYRNFFALKGLTTSRGEPVQGVYGFAKSLLKALKEDGDVVIVVFDAKAPSFRHEAYEAYKAGRAPTPEDFPRQLALMKELVDLLGLERLEVPGFEADDVLATLAKKAEREGYEVQILTADRDLFQLLSPRISVLHPEGHRITPEWLWEKYGLRPEQWVDFRALAGDPSDNIPGVKGIGEKTALKLLKEWGSLENLLKNLDQVKPESVREKILAHLEDLKLSRELSRVRTDLPLEVDFRGRREPDWEGLKAFLERLEFGSLLHEFGLLESPLPAEEAPWPPPEGAFLGYRLSRPEPMWAELLALAASAQGRVYRAEDPHGALRGLKEVRGLLAKDLAVVALREGLDLPPTDDPMLLAYLLDPSNTTPEGVARRYGGEWTEDAGERALLAERLHANLLGRLQGEERLLWLYEEVEKPLSRVLAHMEATGVKLDVAYLEALSLEVAAELRRLEEEVFRLAGHSFNLNSRDQLERVLFDELGLPPIGKTEKTGKRSTSAAVLEALREVHPIVDKILQYRELAKLKGTYIDPLPALVHPKTGRLHTRFNQTATATGRLSSSDPNLQNIPVRTPLGQKIRRAFVAEEGWRLVALDYSQIELRVLAHLSGDENLIRVFQEGKDIHTQTASWMFGLSAEAIDPLMRRAAKTINFGVLYGMSAHRLSQELGIPYEEAAAFIQRYFQSYPKVKAWIEKTLEEGRTRGYVETLFGRRRYVPDLNARVKSVREAAERMAFNMPVQGTAADLMKLAMVRLFPQLREVGARMLLQVHDELLLEAPKERAEEVAALAKEVMEGVWPLAVPLEVEVGIGEDWLAAKG

SEQ ID NO: 837 - DNA, 2529 bp, synthetic construct
  misc_feature 1..2529: note = Variant of DNA polymerase I from Thermus sp. strain 2.9
  source 1..2529: mol_type = other DNA
atgcaccatcatcatcatcatggcggtagcggcatgttaccgttgttcgaacctaaaggtcgcgtgcttctggttgatggccatcatctcgcgtatcgtaacttctttgccctgaaaggattaaccaccagccgtggcgagccggtacagggtgtctacggctttgcaaagtcgctcctgaaagctctgaaagaagacggtgatgtggtgattgttgtctttgatgcgaaagcgccaagttttcgccacgaagcgtacgaagcttacaaagccgggcgtgctccaacgccggaagactttcctcgccaattggcgcttatgaaggaattagtggatttgcttggcctcgaacgcttggaagttcccggtttcgaggcagacgacgtattagcgactctcgcaaagaaagccgaacgtgagggctatgaagtccagatcttgacagcagatcgcgatcttttccagcttttatctccgcgcatctcggtgttacacccggaagggcatctgatcaccccggaatggctctgggagaaatatggtttgcgtcccgaacaatgggtggattttcgcgccttagcaggcgatccgagcgacaatattccgggagttaaaggtatcggcgagaagacggcgctcaagctccttaaagaatgggggtcgttggagaacttgcttaagaatttagatcaggtcaaaccagagtcagtgcgtgagaagattcttgcacacctcgaagacctcaaattaagccgcgaattgtcccgtgtacgcaccgatttgccgctcgaagttgatttccgtggccgccgcgaacctgactgggagggtcttaaagcgtttttagagcgtcttgaatttggttcgctcttgcatgaattcggccttttagaaagcccgttaccagccgaagaagcaccttggccaccgcccgaaggcgcgtttttaggttaccgtttgagtcgcccggaaccgatgtgggccgaattattggctcttgcagcgtctgcccagggacgtgtgtatcgcgcggaagaccctcatggtgcgctccgcggcctcaaagaagtccgtggactccttgccaaagacttagctgttgttgcattgcgcgaaggtcttgatttacctccgactgatgatccaatgcttcttgcgtacctcttggacccgtcaaacacgacgcccgaaggcgtagcccgtcgttacggcggcgagtggaccgaagatgcaggcgagcgcgcgttattggccgaacgtttgcaccagaatttattaggacgtttgcaaggcgaggaacgtctcctctggctttacgaagaagtggagaaaccattgagtcgcgtgctcgcgcatatggaagctaccggtgtcaaattagacgtggcgtatttggaggcactcagccttgaagttgctgccgaaatgcgccgcttggaggaagaagtattccgtttagcaggccactcctttaaccttaattctcgcgatcagttagaacgtgtgttgttcgatgaacttggtctccctcctatcggcaagacagagaagaccggtaaacgtagcacttcagcggcggttttagaagctcttcgcgaagtccatcccattgtggacaagatcttgcagtaccgcgaactcgcgaaattgaaaggcacctatattgaccgtcttccggcattagtccacccgaaaacgggacgcctccatacccgcttcaaccaaacagccacggcgaccggtcgtttgtcctcctctgatccaaaccttcagaatattccagtacgtaccccattgggccagaagatccgccgcgcgtttgtagctgaggagggttggcgtttagtggccctcgattatagccaaattgaattacgtgtccttgcccatctttctggcgatgagaacctcatccgcgtgtttcaggaaggcaaagacattcacactcaaacggcaagctggatgtttggattatcagctgaagcgatcgatcctttgatgcgtcgtgcagcgaagaccatcaatttcggtgttctctacggtatgagtgccgctcgtttgtcgcaggaattaggcattccctatgaagaagctgcggcgttcattcagcgctactttcaaagctatcccaaagttaaagcatggatcgagaagactctcgaagaaggccgcacacgtggttacgtagagaccttatttggacgtcgccgctatgttcccgatttaaccgctcgcgtgaaatctgtccgtgaagccgccgaacgcatggcgttcaacatgcctgtacagggcacggcagctgacctcatgaaacttgcaatggtgcgcctttttccacaattgcgtgaagttggtgcccgcatgctcttgcaggtccacgatgaactcttgttagaagcgccaaaagagcgtgcggaagaggtggcagccctcgcgaaagaggttatggaaggcgtgtggcccttagcggtgcctcttgaagtcgaagttggtattggcgaggattggttggctgccaaaggataatga

SEQ ID NO: 838 - protein, 841 aa, synthetic construct
  REGION 1..841: note = Variant of DNA polymerase I from Thermus sp. strain 2.9
MHHHHHHGGSGMLPLFEPKGRVLLVDGHHLAYRNFFALKGLTTSRGEPVQGVYGFAKSLLKALKEDGDVVIVVFDAKAPSFRHEAYEAYKAGRAPTPEDFPRQLALMKELVDLLGLERLEVPGFEADDVLATLAKKAEREGYEVQILTADRDLFQLLSPRISVLHPEGHLITPEWLWEKYGLRPEQWVDFRALAGDPSDNIPGVKGIGEKTALKLLKEWGSLENLLKNLDQVKPESVREKILAHLEDLKLSRELSRVRTDLPLEVDFRGRREPDWEGLKAFLERLEFGSLLHEFGLLESPLPAEEAPWPPPEGAFLGYRLSRPEPMWAELLALAASAQGRVYRAEDPHGALRGLKEVRGLLAKDLAVVALREGLDLPPTDDPMLLAYLLDPSNTTPEGVARRYGGEWTEDAGERALLAERLHQNLLGRLQGEERLLWLYEEVEKPLSRVLAHMEATGVKLDVAYLEALSLEVAAEMRRLEEEVFRLAGHSFNLNSRDQLERVLFDELGLPPIGKTEKTGKRSTSAAVLEALREVHPIVDKILQYRELAKLKGTYIDRLPALVHPKTGRLHTRFNQTATATGRLSSSDPNLQNIPVRTPLGQKIRRAFVAEEGWRLVALDYSQIELRVLAHLSGDENLIRVFQEGKDIHTQTASWMFGLSAEAIDPLMRRAAKTINFGVLYGMSAARLSQELGIPYEEAAAFIQRYFQSYPKVKAWIEKTLEEGRTRGYVETLFGRRRYVPDLTARVKSVREAAERMAFNMPVQGTAADLMKLAMVRLFPQLREVGARMLLQVHDELLLEAPKERAEEVAALAKEVMEGVWPLAVPLEVEVGIGEDWLAAKG

SEQ ID NO: 839 - DNA, 2529 bp, synthetic construct
  misc_feature 1..2529: note = Variant of DNA polymerase I from Thermus sp. strain 2.9
  source 1..2529: mol_type = other DNA
atgcaccatcatcatcatcatggcggtagcggcatgttaccgttgttcgaacctaaaggtcgcgtgcttctggttgatggccatcatctcgcgtatcgtaacttctttgccctgaaaggattaaccaccagccgtggcgagccggtacagggtgtctacggctttgcaaagtcgctcctgaaagctctgaaagaagacggtgatgtggtgattgttgtctttgatgcgaaagcgccaagttttcgccacgaagcgtacgaagcttacaaagccgggcgtgctccaacgccggaagactttcctcgccaattggcgcttatgaaggaattagtggatttgcttggcctcgaacgcttggaagttcccggtttcgaggcagacgacgtattagcgactctcgcaaagaaagccgaacgtgagggctatgaagtccagatcttgacagcagatcgcgatcttttccagcttttatctccgcgcatctcggtgttacacccggaagggcatcgtatcaccccggaatggctctgggagaaatatggtttgcgtcccgaacaatgggtggattttcgcgccttagccggcgatccgagcgacaatattccgggagttaaaggtatcggcgagaagacggcgctcaagctccttaaagaatgggggtcgttggagaacttgcttaagaatttagatcaggtcaaaccagagtcagtgcgtgagaagattcttgcacacctcgaagacctcaaattaagccgcgaattgtcccgtgtacgcaccgatttgccgctcgaagttgatttccgtggccgccgcgaacctgactgggagggtcttaaagcgtttttagagcgtcttgaatttggttcgctcttgcatgaattcggccttttagaaagcccgttaccagccgaagaagcaccttggccaccgcccgaaggcgcgtttttaggttaccgtttgagtcgcccggaaccgatgtgggccgaattattggctcttgcagcgtctgcccagggacgtgtgtatcgcgcggaagaccctcatggtgcgctccgcggcctcaaagaagtccgtggactccttgccaaagacttagctgttgttgcattgcgcgaaggtcttgatttacctccgactgatgatccaatgcttcttgcgtacctcttggacccgtcaaacacgacgcccgaaggcgtagcccgtcgttacggcggcgagtggaccgaagatgcaggcgagcgcgcgttattggccgaacgtttgcacgccaatttattaggacgtttgcaaggcgaggaacgtctcctctggctttacgaagaagtggagaaaccattgagtcgcgtgctcgctcatatggaagctaccggtgtcaaattagacgtggcgtatttggaggcactcagccttgaagttgctgccgaaatgcgccgcttggaggaagaagtattccgtttagcaggccactcctttaaccttaattctcgcgatcagttagaacgtgtgttgttcgatgaacttggtctccctcctatcggcaagacagagaagaccggtaaacgtagcacttcagcggcggttttagaagctcttcgcgaagtccatcccattgtggacaagatcttgcagtaccgcgaactcgcgaaattgaaaggcacctatattgaccctcttccggcattagtccacccgaaaacgggacgcctccatacccgcttcaaccaaacagccacggcgaccggtcgtttgtcctcctctgatccaaaccttcagaatattccagtacgtaccccattgggccagaagatccgccgcgcgtttgtagctgaggagggttggcgtttagtggccctcgattatagccaaattgaattacgtgtccttgcccatctttctggcgatgagaacctcatccgcgtgtttcaggaaggcaaagacattcacactcaaacggcaagctggatgtttggagtgccgtcggaagcgatcgatcctttgatgcgtcgtgcagcgaagaccatcaatttcggtgttctctacggtatgagtgccgctcgtttgtcgcaggaattaggcattccctatgaagaagctgcggcgttcattcagcgctactttcaaagctatcccaaagttaaagcatggatcgagaagactctcgaagaaggccgcacacgtggttacgtagagaccttatttggacgtcgccgctatgttcccgatttaaccgctcgcgtgaaatctgtccgtgaagccgccgaacgcatggcgttcaacatgcctgtacagggcacggcagctgacctcatgaaacttgcaatggtgcgcctttttccacaattgcgtgaagttggtgcccgcatgctcttgcaggtccacgatgaactcttgttagaagcgccaaaagagcgtgcggaagaggtggcagccctcgcgaaagaggttatggaaggcgtgtggcccttagcggtgcctcttgaagtcgaagttggtattggcgaggattggttggctgccaaaggataatga

SEQ ID NO: 840 - protein, 841 aa, synthetic construct
  REGION 1..841: note = Variant of DNA polymerase I from Thermus sp. strain 2.9
MHHHHHHGGSGMLPLFEPKGRVLLVDGHHLAYRNFFALKGLTTSRGEPVQGVYGFAKSLLKALKEDGDVVIVVFDAKAPSFRHEAYEAYKAGRAPTPEDFPRQLALMKELVDLLGLERLEVPGFEADDVLATLAKKAEREGYEVQILTADRDLFQLLSPRISVLHPEGHRITPEWLWEKYGLRPEQWVDFRALAGDPSDNIPGVKGIGEKTALKLLKEWGSLENLLKNLDQVKPESVREKILAHLEDLKLSRELSRVRTDLPLEVDFRGRREPDWEGLKAFLERLEFGSLLHEFGLLESPLPAEEAPWPPPEGAFLGYRLSRPEPMWAELLALAASAQGRVYRAEDPHGALRGLKEVRGLLAKDLAVVALREGLDLPPTDDPMLLAYLLDPSNTTPEGVARRYGGEWTEDAGERALLAERLHANLLGRLQGEERLLWLYEEVEKPLSRVLAHMEATGVKLDVAYLEALSLEVAAEMRRLEEEVFRLAGHSFNLNSRDQLERVLFDELGLPPIGKTEKTGKRSTSAAVLEALREVHPIVDKILQYRELAKLKGTYIDPLPALVHPKTGRLHTRFNQTATATGRLSSSDPNLQNIPVRTPLGQKIRRAFVAEEGWRLVALDYSQIELRVLAHLSGDENLIRVFQEGKDIHTQTASWMFGVPSEAIDPLMRRAAKTINFGVLYGMSAARLSQELGIPYEEAAAFIQRYFQSYPKVKAWIEKTLEEGRTRGYVETLFGRRRYVPDLTARVKSVREAAERMAFNMPVQGTAADLMKLAMVRLFPQLREVGARMLLQVHDELLLEAPKERAEEVAALAKEVMEGVWPLAVPLEVEVGIGEDWLAAKG

SEQ ID NO: 841 - DNA, 2529 bp, synthetic construct
  misc_feature 1..2529: note = Variant of DNA polymerase I from Thermus sp. strain 2.9
  source 1..2529: mol_type = other DNA
atgcaccatcatcatcatcatggcggtagcggcatgttaccgttgttcgaacctaaaggtcgcgtgcttctggttgatggccatcatctcgcgtatcgtaacttctttgccctgaaaggattaaccaccagccgtggcgagccggtacagggtgtctacggctttgcaaagtcgctcctgaaagctctgaaagaagacggtgatgtggtgattgttgtctttgatgcgaaagcgccaagttttcgccacgaagcgtacgaagcttacaaagccgggcgtgctccaacgccggaagactttcctcgccaattggcgcttatgaaggaattagtggatttgcttggcctcgaacgcttggaagttcccggtttcgaggcagacgacgtattagcgactctcgcaaagaaagccgaacgtgagggctatgaagtccagatcttgacagcagatcgcgatcttttccagcttttatctccgcgcatctcggtgttacacccggaagggcatctgatcaccccggaatggctctgggagaaatatggtttgcgtcccgaacaatgggtggattttcgcgccttagcaggcgatccgagcgacaatattccgggagttaaaggtatcggcgagaagacggcgctcaagctccttaaagaatgggggtcgttggagaacttgcttaagaatttagatcaggtcaaaccagagtcagtgcgtgagaagattcttgcacacctcgaagacctcaaattaagccgcgaattgtcccgtgtacgcaccgatttgccgctcgaagttgatttccgtggccgccgcgaacctgactgggagggtcttaaagcgtttttagagcgtcttgaatttggttcgctcttgcatgaattcggccttttagaaagcccgttaccagccgaagaagcaccttggccaccgcccgaaggcgcgtttttaggttaccgtttgagtcgcccggaaccgatgtgggccgaattattggctcttgcagcgtctgcccagggacgtgtgtatcgcgcggaagaccctcatggtgcgctccgcggcctcaaagaagtccgtggactccttgccaaagacttagctgttgttgcattgcgcgaaggtcttgatttacctccgactgatgatccaatgcttcttgcgtacctcttggacccgtcaaacacgacgcccgaaggcgtagcccgtcgttacggcggcgagtggaccgaagatgcaggcgagcgcgcgttattggccgaacgtttgcaccagaatttattaggacgtttgcaaggcgaggaacgtctcctctggctttacgaagaagtggagaaaccattgagtcgcgtgctcgcgcatatggaagctaccggtgtcaaattagacgtggcgtatttggaggcactcagccttgaagttgctgccgaactgcgccgcttggaggaagaagtattccgtttagcaggccactcctttaaccttaattctcgcgatcagttagaacgtgtgttgttcgatgaacttggtctccctcctatcggcaagacagagaagaccggtaaacgtagcacttcagcggcggttttagaagctcttcgcgaagtccatcccattgtggacaagatcttgcagtaccgcgaactcgcgaaattgaaaggcacctatattgaccctcttccggcattagtccacccgaaaacgggacgcctccatacccgcttcaaccaaacagccacggcgaccggtcgtttgtcctcctctgatccaaaccttcagaatattccagtacgtaccccattgggccagaagatccgccgcgcgtttgtagctgaggagggttggcgtttagtggccctcgattatagccaaattgaattacgtgtccttgcccatctttctggcgatgagaacctcatccgcgtgtttcaggaaggcaaagacattcacactcaaacggcaagctggatgtttggagtgtcgtcggaagcgatcgatcctttgatgcgtcgtgcagcgaagaccatcaatttcggtgttctctacggtatgagtgccgctcgtttgtcgcaggaattaggcattccctatgaagaagctgcggcgttcattcagcgctactttcaaagctatcccaaagttaaagcatggatcgagaagactctcgaagaaggccgcacacgtggttacgtagagaccttatttggacgtcgccgctatgttcccgatttaaccgctcgcgtgaaatctgtccgtgaagccgccgaacgcatggcgttcaacatgcctgtacagggcacggcagctgacctcatgaaacttgcaatggtgcgcctttttccacaattgcgtgaagttggtgcccgcatgctcttgcaggtccacgatgaactcttgttagaagcgccaaaagagcgtgcggaagaggtggcagccctcgcgaaagaggttatggaaggcgtgtggcccttagcggtgcctcttgaagtcgaagttggtattggcgaggattggttggctgccaaaggataatga

SEQ ID NO: 842 - protein, 841 aa, synthetic construct
  REGION 1..841: note = Variant of DNA polymerase I from Thermus sp. strain 2.9
MHHHHHHGGSGMLPLFEPKGRVLLVDGHHLAYRNFFALKGLTTSRGEPVQGVYGFAKSLLKALKEDGDVVIVVFDAKAPSFRHEAYEAYKAGRAPTPEDFPRQLALMKELVDLLGLERLEVPGFEADDVLATLAKKAEREGYEVQILTADRDLFQLLSPRISVLHPEGHLITPEWLWEKYGLRPEQWVDFRALAGDPSDNIPGVKGIGEKTALKLLKEWGSLENLLKNLDQVKPESVREKILAHLEDLKLSRELSRVRTDLPLEVDFRGRREPDWEGLKAFLERLEFGSLLHEFGLLESPLPAEEAPWPPPEGAFLGYRLSRPEPMWAELLALAASAQGRVYRAEDPHGALRGLKEVRGLLAKDLAVVALREGLDLPPTDDPMLLAYLLDPSNTTPEGVARRYGGEWTEDAGERALLAERLHQNLLGRLQGEERLLWLYEEVEKPLSRVLAHMEATGVKLDVAYLEALSLEVAAELRRLEEEVFRLAGHSFNLNSRDQLERVLFDELGLPPIGKTEKTGKRSTSAAVLEALREVHPIVDKILQYRELAKLKGTYIDPLPALVHPKTGRLHTRFNQTATATGRLSSSDPNLQNIPVRTPLGQKIRRAFVAEEGWRLVALDYSQIELRVLAHLSGDENLIRVFQEGKDIHTQTASWMFGVSSEAIDPLMRRAAKTINFGVLYGMSAARLSQELGIPYEEAAAFIQRYFQSYPKVKAWIEKTLEEGRTRGYVETLFGRRRYVPDLTARVKSVREAAERMAFNMPVQGTAADLMKLAMVRLFPQLREVGARMLLQVHDELLLEAPKERAEEVAALAKEVMEGVWPLAVPLEVEVGIGEDWLAAKG

SEQ ID NO: 843 - DNA, 2529 bp, synthetic construct
  misc_feature 1..2529: note = Variant of DNA polymerase I from Thermus sp. strain 2.9
  source 1..2529: mol_type = other DNA
atgcaccatcatcatcatcatggcggtagcggcatgttaccgttgttcgaacctaaaggtcgcgtgcttctggttgatggccatcatctcgcgtatcgtaacttctttgccctgaaaggattaaccaccagccgtggcgagccggtacagggtgtctacggctttgcaaagtcgctcctgaaagctctgaaagaagacggtgatgtggtgattgttgtctttgatgcgaaagcgccaagttttcgccacgaagcgtacgaagcttacaaagccgggcgtgctccaacgccggaagactttcctcgccaattggcgcttatgaaggaattagtggatttgcttggcctcgaacgcttggaagttcccggtttcgaggcagacgacgtattagcgactctcgcaaagaaagccgaacgtgagggctatgaagtccagatcttgacagcagatcgcgatcttttccagcttttatctccgcgcatctcggtgttacacccggaagggcatcgtatcaccccggaatggctctgggagaaatatggtttgcgtcccgaacaatgggtggattttcgcgccttagcaggcgatccgagcgacaatattccgggagttaaaggtatcggcgtgaagacggcgctcaagctccttaaagaatgggggtcgttggagaacttgcttaagaatttagatcaggtcaaaccagagtcagtgcgtgagaagattcttgcacacctcgaagacctcaaattaagccgcgaattgtcccgtgtacgcaccgatttgccgctcgaagttgatttccgtggccgccgcgaacctgactgggagggtcttaaagcgtttttagagcgtcttgaatttggttcgctcttgcatgaattcggccttttagaaagcccgttaccagccgaagaagcaccttggccaccgcccgaaggcgcgtttttaggttaccgtttgagtcgcccggaaccgatgtgggccgaattattggctcttgcagcgtctgcccagggacgtgtgtatcgcgcggaagaccctcatggtgcgctccgcggcctcaaagaagtccgtggactccttgccaaagacttagctgttgttgcattgcgcgaaggtcttgatttacctccgactgatgatccaatgcttcttgcgtacctcttggacccgtcaaacacgacgcccgaaggcgtagcccgtcgttacggcggcgagtggaccgaagatgcaggcgagcgcgcgttattggccgaacgtttgcacgccaatttattaggacgtttgcaaggcgaggaacgtctcctctggctttacgaagaagtggagaaaccattgagtcgcgtgctcgcgcatatggaagctaccggtgtcaaattagacgtggcgtatttggaggcactcagccttgaagttgctgccgaaatgcgccgcttggaggaagaagtattccgtttagcaggccactcctttaaccttaattctcgcgatcagttagaacgtgtgttgttcgatgaacttggtctccctcctatcggcaagacagagaagaccggtaaacgtagcacttcagcggcggttttagaagctcttcgcgaagtccatcccattgtggacaagatcttgcagtaccgcgaactcgcgaaattgaaaggcacctatattgaccctcttccggcattagtccacccgaaaacgggacgcctccatacccgcttcaaccaaacagccacggcgaccggtcgtttgtcctcctctgatccaaaccttcagaatattccagtacgtaccccattgggccagaagatccgccgcgcgtttgtagctgaggagggttggcgtttagtggccctcgattatagccaaattgaattacgtgtccttgcccatctttctggcgatgagaacctcatccgcgtgtttcaggaaggcaaagacattcacactcaaacggcaagctggatgtttggattatcagctgaagcgatcgatcctttgatgcgtcgtgcagcgaagaccatcaatttcggtgttctctacggtatgagtgcccatcgtttgtcgcaggaattaggcattccctatgaagaagctgcggcgttcattcagcgctactttcaaagctatcccaaagttaaagcatggatcgagaagactctcgaagaaggccgcacacgtggttacgtagagaccttatttggacgtcgccgctatgttcccgatttaaacgctcgcgtgaaatctgtccgtgaagccgccgaacgcatggcgttcaacatgcctgtacagggcacggcagctgacctcatgaaacttgcaatggtgcgcctttttccacaattgcgtgaagttggtgcccgcatgctcttgcaggtccacgatgaactcttgttagaagcgccaaaagagcgtgcggaagaggtggcagccctcgcgaaagaggttatggaaggcgtgtggcccttagcggtgcctcttgaagtcgaagttggtattggcgaggattggttggctgccaaaggataatga

SEQ ID NO: 844 - protein, 841 aa, synthetic construct
  REGION 1..841: note = Variant of DNA polymerase I from Thermus sp. strain 2.9
MHHHHHHGGSGMLPLFEPKGRVLLVDGHHLAYRNFFALKGLTTSRGEPVQGVYGFAKSLLKALKEDGDVVIVVFDAKAPSFRHEAYEAYKAGRAPTPEDFPRQLALMKELVDLLGLERLEVPGFEADDVLATLAKKAEREGYEVQILTADRDLFQLLSPRISVLHPEGHRITPEWLWEKYGLRPEQWVDFRALAGDPSDNIPGVKGIGVKTALKLLKEWGSLENLLKNLDQVKPESVREKILAHLEDLKLSRELSRVRTDLPLEVDFRGRREPDWEGLKAFLERLEFGSLLHEFGLLESPLPAEEAPWPPPEGAFLGYRLSRPEPMWAELLALAASAQGRVYRAEDPHGALRGLKEVRGLLAKDLAVVALREGLDLPPTDDPMLLAYLLDPSNTTPEGVARRYGGEWTEDAGERALLAERLHANLLGRLQGEERLLWLYEEVEKPLSRVLAHMEATGVKLDVAYLEALSLEVAAEMRRLEEEVFRLAGHSFNLNSRDQLERVLFDELGLPPIGKTEKTGKRSTSAAVLEALREVHPIVDKILQYRELAKLKGTYIDPLPALVHPKTGRLHTRFNQTATATGRLSSSDPNLQNIPVRTPLGQKIRRAFVAEEGWRLVALDYSQIELRVLAHLSGDENLIRVFQEGKDIHTQTASWMFGLSAEAIDPLMRRAAKTINFGVLYGMSAHRLSQELGIPYEEAAAFIQRYFQSYPKVKAWIEKTLEEGRTRGYVETLFGRRRYVPDLNARVKSVREAAERMAFNMPVQGTAADLMKLAMVRLFPQLREVGARMLLQVHDELLLEAPKERAEEVAALAKEVMEGVWPLAVPLEVEVGIGEDWLAAKG

SEQ ID NO: 845 - DNA, 2529 bp, synthetic construct
  misc_feature 1..2529: note = Variant of DNA polymerase I from Thermus sp. strain 2.9
  source 1..2529: mol_type = other DNA
atgcaccatcatcatcatcatggcggtagcggcatgttaccgttgttcgaacctaaaggtcgcgtgcttctggttgatggccatcatctcgcgtatcgtaacttctttgccctgaaaggattaaccaccagccgtggcgagccggtacagggtgtctacggctttgcaaagtcgctcctgaaagctctgaaagaagacggtgatgtggtgattgttgtctttgatgcgaaagcgccaagttttcgccacgaagcgtacgaagcttacaaagccgggcgtgctccaacgccggaagactttcctcgccaattggcgcttatgaaggaattagtggatttgcttggcctcgaacgcttggaagttcccggtttcgaggcagacgacgtattagcgactctcgcaaagaaagccgaacgtgagggctatgaagtccagatcttgacagcagatcgcgatcttttccagcttttatctccgcgcatctcggtgttacacccggaagggcatcgtatcaccccggaatggctctgggagaaatatggtttgcgtcccgaacaatgggtggattttcgcgccttagcaggcgatccgagcgacaatattccgggagttaaaggtatcggcgagaagacggcgctcaagctccttaaagaatgggggtcgttggagaacttgcttaagaatttagatcaggtcaaaccagagtcagtgcgtgagaagattcttgcacacctcgaagacctcaaattaagccgcgaattgtcccgtgtacgcaccgatttgccgctcgaagttgatttccgtggccgccgcgaacctgactgggagggtcttaaagcgtttttagagcgtcttgaatttggttcgctcttgcatgaattcggccttttagaaagcccgttaccagccgaagaagcaccttggccaccgcccgaaggcgcgtttttaggttaccgtttgagtcgcccggaaccgatgtgggccgaattattggctcttgcagcgtctgcccagggacgtgtgtatcgcgcggaagaccctcatggtgcgctccgcggcctcaaagaagtccgtggactccttgccaaagacttagctgttgttgcattgcgcgaaggtcttgatttacctccgactgatgatccaatgcttcttgcgtacctcttggacccgtcaaacacgacgcccgaaggcgtagcccgtcgttacggcggcgagtggaccgaagatgcaggcgagcgcgcgttattggccgaacgtttgcacgccaatttattaggacgtttgcaaggcgaggaacgtctcctctggctttacgaagaagtggagaaaccattgagtcgcgtgctcgcgcatatggaagctaccggtgtcaaattagacgtggcgtatttggaggcactcagccttgaagttgctgccgaaatgcgccgcttggaggaagaagtattccgtttagcaggccactcctttaaccttaattctcgcgatcagttagaacgtgtgttgttcgatgaacttggtctccctcctatcggcaagacagagcataccggtaaacgtagcacttcagcggcggttttagaagctcttcgcgaagtccatcccattgtggacaagatcttgcagtaccgcgaactcgcgaaattgaaaggcacctatattgaccctcttccggcattagtccacccgaaaacgggacgcctccatacccgcttcaaccaaacagccacggcgaccggtcgtttgtcctcctctgatccaaaccttcagaatattccagtacgtaccccattgggccagaagatccgccgcgcgtttgtagctgaggagggttggcgtttagtggccctcgattatagccaaattgaattacgtgtccttgcccatctttctggcgatgagaacctcatccgcgtgtttcaggaaggcaaagacattcacactcaaacggcaagctggatgtttggattatcagctgaagcgatcgatcctttgatgcgtcgtgcagcgaagaccatcaatttcggtgttctctacggtatgagtgcccatcgtttgtcgcaggaattaggcattccctatgaagaagctgcggcgttcattcagcgctactttcaaagctatcccaaagttaaagcatggatcgagaagactctcgaagaaggccgcacacgtggttacgtagagaccttatttggacgtcgccgctatgttcccgatttaaacgctcgcgtgaaatctgtccgtgaagccgccgaacgcatggcgttcaacatgcctgtacagggcacggcagctgacctcatgaaacttgcaatggtgcgcctttttccacaattgcgtgaagttggtgcccgcatgctcttgcaggtccacgatgaactcttgttagaagcgccaaaagagcgtgcggaagaggtggcagccctcgcgaaagaggttatggaaggcgtgtggcccttagcggtgcctcttgaagtcgaagttggtattggcgaggattggttggctgccaaaggataatga

SEQ ID NO: 846 - protein, 841 aa, synthetic construct
  REGION 1..841: note = Variant of DNA polymerase I from Thermus sp. strain 2.9
MHHHHHHGGSGMLPLFEPKGRVLLVDGHHLAYRNFFALKGLTTSRGEPVQGVYGFAKSLLKALKEDGDVVIVVFDAKAPSFRHEAYEAYKAGRAPTPEDFPRQLALMKELVDLLGLERLEVPGFEADDVLATLAKKAEREGYEVQILTADRDLFQLLSPRISVLHPEGHRITPEWLWEKYGLRPEQWVDFRALAGDPSDNIPGVKGIGEKTALKLLKEWGSLENLLKNLDQVKPESVREKILAHLEDLKLSRELSRVRTDLPLEVDFRGRREPDWEGLKAFLERLEFGSLLHEFGLLESPLPAEEAPWPPPEGAFLGYRLSRPEPMWAELLALAASAQGRVYRAEDPHGALRGLKEVRGLLAKDLAVVALREGLDLPPTDDPMLLAYLLDPSNTTPEGVARRYGGEWTEDAGERALLAERLHANLLGRLQGEERLLWLYEEVEKPLSRVLAHMEATGVKLDVAYLEALSLEVAAEMRRLEEEVFRLAGHSFNLNSRDQLERVLFDELGLPPIGKTEHTGKRSTSAAVLEALREVHPIVDKILQYRELAKLKGTYIDPLPALVHPKTGRLHTRFNQTATATGRLSSSDPNLQNIPVRTPLGQKIRRAFVAEEGWRLVALDYSQIELRVLAHLSGDENLIRVFQEGKDIHTQTASWMFGLSAEAIDPLMRRAAKTINFGVLYGMSAHRLSQELGIPYEEAAAFIQRYFQSYPKVKAWIEKTLEEGRTRGYVETLFGRRRYVPDLNARVKSVREAAERMAFNMPVQGTAADLMKLAMVRLFPQLREVGARMLLQVHDELLLEAPKERAEEVAALAKEVMEGVWPLAVPLEVEVGIGEDWLAAKG

SEQ ID NO: 847 - DNA, 2529 bp, synthetic construct
  misc_feature 1..2529: note = Variant of DNA polymerase I from Thermus sp. strain 2.9
  source 1..2529: mol_type = other DNA
atgcaccatcatcatcatcatggcggtagcggcatgttaccgttgttcgaacctaaaggtcgcgtgcttctggttgatggccatcatctcgcgtatcgtaacttctttgccctgaaaggattaaccaccagccgtggcgagccggtacagggtgtctacggctttgcaaagtcgctcctgaaagctctgaaagaagacggtgatgtggtgattgttgtctttgatgcgaaagcgccaagttttcgccacgaagcgtacgaagcttacaaagccgggcgtgctccaacgccggaagactttcctcgccaattggcgcttatgaaggaattagtggatttgcttggcctcgaacgcttggaagttcccggtttcgaggcagacgacgtattagcgactctcgcaaagaaagccgaacgtgagggctatgaagtccagatcttgacagcagatcgcgatcttttccagcttttatctccgcgcatctcggtgttacacccggaagggcatctgatcaccccggaatggctctgggagaaatatggtttgcgtcccgaacaatgggtggattttcgcgccttagtcggcgatccgagcgacaatattccgggagttaaaggtatcggcgagaagacggcgctcaagctccttaaagaatgggggtcgttggagaacttgcttaagaatttagatcaggtcaaaccagagtcagtgcgtgagaagattcttgcacacctcgaagacctcaaattaagccgcgaattgtcccgtgtacgcaccgatttgccgctcgaagttgatttccgtggccgccgcgaacctgactgggagggtcttaaagcgtttttagagcgtcttgaatttggttcgctcttgcatgaattcggccttttagaaagcccgttaccagccgaagaagcaccttggccaccgcccgaaggcgcgtttttaggttaccgtttgagtcgcccggaaccgatgtgggccgaattattggctcttgcagcgtctgcccagggacgtgtgtatcgcgcggaagaccctcatggtgcgctccgcggcctcaaagaagtccgtggactccttgccaaagacttagctgttgttgcattgcgcgaaggtcttgatttacctccgactgatgatccaatgcttcttgcgtacctcttggacccgtcaaacacgacgcccgaaggcgtagcccgtcgttacggcggcgagtggaccgaagatgcaggcgagcgcgcgttattggccgaacgtttgcacgcaaatttattaggacgtttgcaaggcgaggaacgtctcctctggctttacgaagaagtggagaaaccattgagtcgcgtgctcgcgcatatggaagctaccggtgtcaaattagacgtggcgtatttggaggcactcagccttgaagttgctgccgaaatgcgccgcttggaggaagaagtattccgtttagcaggccactcctttaaccttaattctcgcgatcagttagaacgtgtgttgttcgatgaacttggtctccctcctatcggcaagacagagaagaccggtaaacgtagcacttcagcggcggttttagaagctcttcgcgaagtccatcccattgtggacaagatcttgcagtaccgcgaactcgcgaaattgaaaggcacctatattgaccgtcttccggcattagtccacccgaaaacgggacgcctccatacccgcttcaaccaaacagccacggcgaccggtcgtttgtcctcctctgatccaaaccttcagaatattccagtacgtaccccattgggccagaagatccgccgcgcgtttgtagctgaggagggttggcgtttagtggccctcgattatagccaaattgaattacgtgtccttgcccatctttctggcgatgagaacctcatccgcgtgtttcaggaaggcaaagacattcacactcaaacggcaagctggatgtttggattatcagctgaagcgatcgatcctttgatgcgtcgtgcagcgaagaccatcaatttcggtgttctctacggtatgagtgcccatcgtttgtcgcaggaattaggcattccctatgaagaagctgcggcgttcattcagcgctactttcaaagctatcccaaagttaaagcatggatcgagaagactctcgaagaaggccgcacacgtggttacgtagagaccttatttggacgtcgccgctatgttcccgatttaaacgctcgcgtgaaatctgtccgtgaagccgccgaacgcatggcgttcaacatgcctgtacagggcacggcagctgacctcatgaaacttgcaatggtgcgcctttttccacaattgcgtgaagttggtgcccgcatgctcttgcaggtccacgatgaactcttgttagaagcgccaaaagagcgtgcggaagaggtggcagccctcgcgaaagaggttatggaaggcgtgtggcccttagcggtgcctcttgaagtcgaagttggtattggcgaggattggttggctgccaaaggataatga

SEQ ID NO: 848 - protein, 841 aa, synthetic construct
  REGION 1..841: note = Variant of DNA polymerase I from Thermus sp. strain 2.9
MHHHHHHGGSGMLPLFEPKGRVLLVDGHHLAYRNFFALKGLTTSRGEPVQGVYGFAKSLLKALKEDGDVVIVVFDAKAPSFRHEAYEAYKAGRAPTPEDFPRQLALMKELVDLLGLERLEVPGFEADDVLATLAKKAEREGYEVQILTADRDLFQLLSPRISVLHPEGHLITPEWLWEKYGLRPEQWVDFRALVGDPSDNIPGVKGIGEKTALKLLKEWGSLENLLKNLDQVKPESVREKILAHLEDLKLSRELSRVRTDLPLEVDFRGRREPDWEGLKAFLERLEFGSLLHEFGLLESPLPAEEAPWPPPEGAFLGYRLSRPEPMWAELLALAASAQGRVYRAEDPHGALRGLKEVRGLLAKDLAVVALREGLDLPPTDDPMLLAYLLDPSNTTPEGVARRYGGEWTEDAGERALLAERLHANLLGRLQGEERLLWLYEEVEKPLSRVLAHMEATGVKLDVAYLEALSLEVAAEMRRLEEEVFRLAGHSFNLNSRDQLERVLFDELGLPPIGKTEKTGKRSTSAAVLEALREVHPIVDKILQYRELAKLKGTYIDRLPALVHPKTGRLHTRFNQTATATGRLSSSDPNLQNIPVRTPLGQKIRRAFVAEEGWRLVALDYSQIELRVLAHLSGDENLIRVFQEGKDIHTQTASWMFGLSAEAIDPLMRRAAKTINFGVLYGMSAHRLSQELGIPYEEAAAFIQRYFQSYPKVKAWIEKTLEEGRTRGYVETLFGRRRYVPDLNARVKSVREAAERMAFNMPVQGTAADLMKLAMVRLFPQLREVGARMLLQVHDELLLEAPKERAEEVAALAKEVMEGVWPLAVPLEVEVGIGEDWLAAKG

SEQ ID NO: 849 - DNA, 2529 bp, synthetic construct
  misc_feature 1..2529: note = Variant of DNA polymerase I from Thermus sp. strain 2.9
  source 1..2529: mol_type = other DNA
atgcaccatcatcatcatcatggcggtagcggcatgttaccgttgttcgaacctaaaggtcgcgtgcttctggttgatggccatcatctcgcgtatcgtaacttctttgccctgaaaggattaaccaccagccgtggcgagccggtacagggtgtctacggctttgcaaagtcgctcctgaaagctctgaaagaagacggtgatgtggtgattgttgtctttgatgcgaaagcgccaagttttcgccacgaagcgtacgaagcttacaaagccgggcgtgctccaacgccggaagactttcctcgccaattggcgcttatgaaggaattagtggatttgcttggcctcgaacgcttggaagttcccggtttcgaggcagacgacgtattagcgactctcgcaaagaaagccgaacgtgagggctatgaagtccagatcttgacagcagatcgcgatcttttccagcttttatctccgcgcatctcggtgttacacccggaagggcatctgatcaccccggaatggctctgggagaaatatggtttgcgtcccgaacaatgggtggattttcgcgccttagcaggcgatccgagcgacaatattccgggagttaaaggtatcggcgagaagacggcgctcaagctccttaaagaatgggggtcgttggagaacttgcttaagaatttagatcaggtcaaaccagagtcagtgcgtgagaagattcttgcacacctcgaagacctcaaattaagccgcgaattgtcccgtgtacgcaccgatttgccgctcgaagttgatttccgtggccgccgcgaacctgactgggagggtcttaaagcgtttttagagcgtcttgaatttggttcgctcttgcatgaattcggccttttagaaagcccgttaccagccgaagaagcaccttggccaccgcccgaaggcgcgtttttaggttaccgtttgagtcgcccggaaccgatgtgggccgaattattggctcttgcagcgtctgcccagggacgtgtgtatcgcgcggaagaccctcatggtgcgctccgcggcctcaaagaagtccgtggactccttgccaaagacttagctgttgttgcattgcgcgaaggtcttgatttacctccgactgatgatccaatgcttcttgcgtacctcttggacccgtcaaacacgacgcccgaaggcgtagcccgtcgttacggcggcgagtggaccgaagatgcaggcgagcgcgcgttattggccgaacgtttgcacgcaaatttattaggacgtttgcaaggcgaggaacgtctcctctggctttacgaagaagtggagaaaccattgagtcgcgtgctcgctcatatggaagctaccggtgtcaaattagacgtggcgtatttggaggcactcagccttgaagttgctgccgaaatgcgccgcttggaggaagaagtattccgtttagcaggccactcctttaaccttaattctcgcgatcagttagaacgtgtgttgttcgatgaacttggtctccctcctatcggcaagacagagaagaccggtaaacgtagcacttcagcggcggttttagaagctcttcgcgaagtccatcccattgtggacaagatcttgcagtaccgcgaactcgcgaaattgaaaggcacctatattgaccctcttccggcattagtccacccgaaaacgggacgcctccatacccgcttcaaccaaacagccacggcgaccggtcgtttgtcctcctctgatccaaaccttcagaatattccagtacgtaccccattgggccagaagatccgccgcgcgtttgtagctgaggagggttggcgtttagtggccctcgattatagccaaattgaattacgtgtccttgcccatctttctggcgatgagaacctcatccgcgtgtttcaggaaggcaaagacattcacactcaaacggcaagctggatgtttggagtgccggcggaagcgatcgatcctttgatgcgtcgtgcagcgaagaccatcaatttcggtgttctctacggtatgagtgcccatcgtttgtcgcaggaattaggcattccctatgaagaagctgcggcgttcattcagcgctactttcaaagctatcccaaagttaaagcatggatcgagaagactctcgaagaaggccgcacacgtggttacgtagagaccttatttggacgtcgccgctatgttcccgatttaaacgctcgcgtgaaatctgtccgtgaagccgccgaacgcatggcgttcaacatgcctgtacagggcacggcagctgacctcatgaaacttgcaatggtgcgcctttttccacaattgcgtgaagttggtgcccgcatgctcttgcaggtccacgatgaactcttgttagaagcgccaaaagagcgtgcggaagaggtggcagccctcgcgaaagaggttatggaaggcgtgtggcccttagcggtgcctcttgaagtcgaagttggtattggcgaggattggttggctgccaaaggataatga

SEQ ID NO: 850 - protein, 841 aa, synthetic construct
  REGION 1..841: note = Variant of DNA polymerase I from Thermus sp. strain 2.9
MHHHHHHGGSGMLPLFEPKGRVLLVDGHHLAYRNFFALKGLTTSRGEPVQGVYGFAKSLLKALKEDGDVVIVVFDAKAPSFRHEAYEAYKAGRAPTPEDFPRQLALMKELVDLLGLERLEVPGFEADDVLATLAKKAEREGYEVQILTADRDLFQLLSPRISVLHPEGHLITPEWLWEKYGLRPEQWVDFRALAGDPSDNIPGVKGIGEKTALKLLKEWGSLENLLKNLDQVKPESVREKILAHLEDLKLSRELSRVRTDLPLEVDFRGRREPDWEGLKAFLERLEFGSLLHEFGLLESPLPAEEAPWPPPEGAFLGYRLSRPEPMWAELLALAASAQGRVYRAEDPHGALRGLKEVRGLLAKDLAVVALREGLDLPPTDDPMLLAYLLDPSNTTPEGVARRYGGEWTEDAGERALLAERLHANLLGRLQGEERLLWLYEEVEKPLSRVLAHMEATGVKLDVAYLEALSLEVAAEMRRLEEEVFRLAGHSFNLNSRDQLERVLFDELGLPPIGKTEKTGKRSTSAAVLEALREVHPIVDKILQYRELAKLKGTYIDPLPALVHPKTGRLHTRFNQTATATGRLSSSDPNLQNIPVRTPLGQKIRRAFVAEEGWRLVALDYSQIELRVLAHLSGDENLIRVFQEGKDIHTQTASWMFGVPAEAIDPLMRRAAKTINFGVLYGMSAHRLSQELGIPYEEAAAFIQRYFQSYPKVKAWIEKTLEEGRTRGYVETLFGRRRYVPDLNARVKSVREAAERMAFNMPVQGTAADLMKLAMVRLFPQLREVGARMLLQVHDELLLEAPKERAEEVAALAKEVMEGVWPLAVPLEVEVGIGEDWLAAKG

SEQ ID NO: 851 - DNA, 2529 bp, synthetic construct
  misc_feature 1..2529: note = Variant of DNA polymerase I from Thermus sp. strain 2.9
  source 1..2529: mol_type = other DNA
atgcaccatcatcatcatcatggcggtagcggcatgttaccgttgttcgaacctaaaggtcgcgtgcttctggttgatggccatcatctcgcgtatcgtaacttctttgccctgaaaggattaaccaccagccgtggcgagccggtacagggtgtctacggctttgcaaagtcgctcctgaaagctctgaaagaagacggtgatgtggtgattgttgtctttgatgcgaaagcgccaagttttcgccacgaagcgtacgaagcttacaaagccgggcgtgctccaacgccggaagactttcctcgccaattggcgcttatgaaggaattagtggatttgcttggcctcgaacgcttggaagttcccggtttcgaggcagacgacgtattagcgactctcgcaaagaaagccgaacgtgagggctatgaagtccagatcttgacagcagatcgcgatcttttccagcttttatctccgcgcatctcggtgttacacccggaagggcatcgtatcaccccggaatggctctgggagaaatatggtttgcgtcccgaacaatgggtggattttcgcgccttagcaggcgatccgagcgacaatattccgggagttaaaggtatcggcgagaagacggcgctcaagctccttaaagaatgggggtcgttggagaacttgcttaagaatttagatcaggtcaaaccagagtcagtgcgtgagaagattcttgcacacctcgaagacctcaaattaagccgcgaattgtcccgtgtacgcaccgatttgccgctcgaagttgatttccgtggccgccgcgaacctgactgggagggtcttaaagcgtttttagagcgtcttgaatttggttcgctcttgcatgaattcggccttttagaaagcccgttaccagccgaagaagcaccttggccaccgcccgaaggcgcgtttttaggttaccgtttgagtcgcccggaaccgatgtgggccgaattattggctcttgcagcgtctgcccagggacgtgtgtatcgcgcggaagaccctcatggtgcgctccgcggcctcaaagaagtccgtggactccttgccaaagacttagctgttgttgcattgcgcgaaggtcttgatttacctccgactgatgatccaatgcttcttgcgtacctcttggacccgtcaaacacgacgcccgaaggcgtagcccgtcgttacggcggcgagtggaccgaagatgcaggcgagcgcgcgttattggccgaacgtttgcaccagaatttattaggacgtttgcaaggcgaggaacgtctcctctggctttacgaagaagtggagaaaccattgagtcgcgtgctcgctcatatggaagctaccggtgtcaaattagacgtggcgtatttggaggcactcagccttgaagttgctgccgaaatgcgccgcttggaggaagaagtattccgtttagcaggccactcctttaaccttaattctcgcgatcagttagaacgtgtgttgttcgatgaacttggtctccctcctatcggcaagacagagaagaccggtaaacgtagcacttcagcggcggttttagaagctcttcgcgaagtccatcccattgtggacaagatcttgcagtaccgcgaactcgcgaaattgaaaggcacctatattgaccctcttccggcattagtccacccgaaaacgggacgcctccatacccgcttcaaccaaacagccacggcgaccggtcgtttgtcctcctctgatccaaaccttcagaatattccagtacgtaccccattgggccagaagatccgccgcgcgtttgtagctgaggagggttggcgtttagtggccctcgattatagccaaattgaattacgtgtccttgcccatctttctggcgatgagaacctcatccgcgtgtttcaggaaggcaaagacattcacactcaaacggcaagctggatgtttggattatcagctgaagcgatcgatcctttgatgcgtcgtgcagcgaagaccatcaatttcggtgttctctacggtatgagtgcccaccgtttgtcgcaggaattaggcattccctatgaagaagctgcggcgttcattcagcgctactttcaaagctatcccaaagttaaagcatggatcgagaagactctcgaagaaggccgcacacgtggttacgtagagaccttatttggacgtcgccgctatgttcccgatttaaccgctcgcgtgaaatctgtccgtgaagccgccgaacgcatggcgttcaacatgcctgtacagggcacggcagctgacctcatgaaacttgcaatggtgcgcctttttccacaattgcgtgaagttggtgcccgcatgctcttgcaggtccacgatgaactcttgttagaagcgccaaaagagcgtgcggaagaggtggcagccctcgcgaaagaggttatggaaggcgtgtggcccttagcggtgcctcttgaagtcgaagttggtattggcgaggattggttggctgccaaaggataatga

SEQ ID NO: 852 - protein, 841 aa, synthetic construct
  REGION 1..841: note = Variant of DNA polymerase I from Thermus sp. strain 2.9
MHHHHHHGGSGMLPLFEPKGRVLLVDGHHLAYRNFFALKGLTTSRGEPVQGVYGFAKSLLKALKEDGDVVIVVFDAKAPSFRHEAYEAYKAGRAPTPEDFPRQLALMKELVDLLGLERLEVPGFEADDVLATLAKKAEREGYEVQILTADRDLFQLLSPRISVLHPEGHRITPEWLWEKYGLRPEQWVDFRALAGDPSDNIPGVKGIGEKTALKLLKEWGSLENLLKNLDQVKPESVREKILAHLEDLKLSRELSRVRTDLPLEVDFRGRREPDWEGLKAFLERLEFGSLLHEFGLLESPLPAEEAPWPPPEGAFLGYRLSRPEPMWAELLALAASAQGRVYRAEDPHGALRGLKEVRGLLAKDLAVVALREGLDLPPTDDPMLLAYLLDPSNTTPEGVARRYGGEWTEDAGERALLAERLHQNLLGRLQGEERLLWLYEEVEKPLSRVLAHMEATGVKLDVAYLEALSLEVAAEMRRLEEEVFRLAGHSFNLNSRDQLERVLFDELGLPPIGKTEKTGKRSTSAAVLEALREVHPIVDKILQYRELAKLKGTYIDPLPALVHPKTGRLHTRFNQTATATGRLSSSDPNLQNIPVRTPLGQKIRRAFVAEEGWRLVALDYSQIELRVLAHLSGDENLIRVFQEGKDIHTQTASWMFGLSAEAIDPLMRRAAKTINFGVLYGMSAHRLSQELGIPYEEAAAFIQRYFQSYPKVKAWIEKTLEEGRTRGYVETLFGRRRYVPDLTARVKSVREAAERMAFNMPVQGTAADLMKLAMVRLFPQLREVGARMLLQVHDELLLEAPKERAEEVAALAKEVMEGVWPLAVPLEVEVGIGEDWLAAKG

SEQ ID NO: 853 - DNA, 2529 bp, synthetic construct
  misc_feature 1..2529: note = Variant of DNA polymerase I from Thermus sp. strain 2.9
  source 1..2529: mol_type = other DNA
atgcaccatcatcatcatcatggcggtagcggcatgttaccgttgttcgaacctaaaggtcgcgtgcttctggttgatggccatcatctcgcgtatcgtaacttctttgccctgaaaggattaaccaccagccgtggcgagccggtacagggtgtctacggctttgcaaagtcgctcctgaaagctctgaaagaagacggtgatgtggtgattgttgtctttgatgcgaaagcgccaagttttcgccacgaagcgtacgaagcttacaaagccgggcgtgctccaacgccggaagactttcctcgccaattggcgcttatgaaggaattagtggatttgcttggcctcgaacgcttggaagttcccggtttcgaggcagacgacgtattagcgactctcgcaaagaaagccgaacgtgagggctatgaagtccagatcttgacagcagatcgcgatcttttccagcttttatctccgcgcatctcggtgttacacccggaagggcatctgatcaccccggaatggctctgggagaaatatggtttgcgtcccgaacaatgggtggattttcgcgccttagtcggcgatccgagcgacaatattccgggagttaaaggtatcggcgagaagacggcgctcaagctccttaaagaatgggggtcgttggagaacttgcttaagaatttagatcaggtcaaaccagagtcagtgcgtgagaagattcttgcacacctcgaagacctcaaattaagccgcgaattgtcccgtgtacgcaccgatttgccgctcgaagttgatttccgtggccgccgcgaacctgactgggagggtcttaaagcgtttttagagcgtcttgaatttggttcgctcttgcatgaattcggccttttagaaagcccgttaccagccgaagaagcaccttggccaccgcccgaaggcgcgtttttaggttaccgtttgagtcgcccggaaccgatgtgggccgaattattggctcttgcagcgtctgcccagggacgtgtgtatcgcgcggaagaccctcatggtgcgctccgcggcctcaaagaagtccgtggactccttgccaaagacttagctgttgttgcattgcgcgaaggtcttgatttacctccgactgatgatccaatgcttcttgcgtacctcttggacccgtcaaacacgacgcccgaaggcgtagcccgtcgttacggcggcgagtggaccgaagatgcaggcgagcgcgcgttattggccgaacgtttgcacgcaaatttattaggacgtttgcaaggcgaggaacgtctcctctggctttacgaagaagtggagaaaccattgagtcgcgtgctccaccatatggaagctaccggtgtcaaattagacgtggcgtatttggaggcactcagccttgaagttgctgccgaactgcgccgcttggaggaagaagtattccgtttagcaggccactcctttaaccttaattctcgcgatcagttagaacgtgtgttgttcgatgaacttggtctccctcctatcggcaagacagagaagaccggtaaacgtagcacttcagcggcggttttagaagctcttcgcgaagtccatcccattgtggacaagatcttgcagtaccgcgaactcgcgaaattgaaaggcacctatattgaccgtcttccggcattagtccacccgaaaacgggacgcctccatacccgcttcaaccaaacagccacggcgaccggtcgtttgtcctcctctgatccaaaccttcagaatattccagtacgtaccccattgggccagaagatccgccgcgcgtttgtagctgaggagggttggcgtttagtggccctcgattatagccaaattgaattacgtgtccttgcccatctttctggcgatgagaacctcatccgcgtgtttcaggaaggcaaagacattcacactcaaacggcaagctggatgtttggagtgccgtcggaagcgatcgatcctttgatgcgtcgtgcagcgaagaccatcaatttcggtgttctctacggtatgagtgcccatcgtttgtcgcaggaattaggcattccctatgaagaagctgcggcgttcattcagcgctactttcaaagctatcccaaagttaaagcatggatcgagaagactctcgaagaaggccgcacacgtggttacgtagagaccttatttggacgtcgccgctatgttcccgatttaaccgctcgcgtgaaatctgtccgtgaagccgccgaacgcatggcgttcaacatgcctgtacagggcacggcagctgacctcatgaaacttgcaatggtgcgcctttttccacaattgcgtgaagttggtgcccgcatgctcttgcaggtccacgatgaactcttgttagaagcgccaaaagagcgtgcggaagaggtggcagccctcgcgaaagaggttatggaaggcgtgtggcccttagcggtgcctcttgaagtcgaagttggtattggcgaggattggttggctgccaaaggataatga

SEQ ID NO: 854 - protein, 841 aa, synthetic construct
  REGION 1..841: note = Variant of DNA polymerase I from Thermus sp. strain 2.9
MHHHHHHGGSGMLPLFEPKGRVLLVDGHHLAYRNFFALKGLTTSRGEPVQGVYGFAKSLLKALKEDGDVVIVVFDAKAPSFRHEAYEAYKAGRAPTPEDFPRQLALMKELVDLLGLERLEVPGFEADDVLATLAKKAEREGYEVQILTADRDLFQLLSPRISVLHPEGHLITPEWLWEKYGLRPEQWVDFRALVGDPSDNIPGVKGIGEKTALKLLKEWGSLENLLKNLDQVKPESVREKILAHLEDLKLSRELSRVRTDLPLEVDFRGRREPDWEGLKAFLERLEFGSLLHEFGLLESPLPAEEAPWPPPEGAFLGYRLSRPEPMWAELLALAASAQGRVYRAEDPHGALRGLKEVRGLLAKDLAVVALREGLDLPPTDDPMLLAYLLDPSNTTPEGVARRYGGEWTEDAGERALLAERLHANLLGRLQGEERLLWLYEEVEKPLSRVLHHMEATGVKLDVAYLEALSLEVAAELRRLEEEVFRLAGHSFNLNSRDQLERVLFDELGLPPIGKTEKTGKRSTSAAVLEALREVHPIVDKILQYRELAKLKGTYIDRLPALVHPKTGRLHTRFNQTATATGRLSSSDPNLQNIPVRTPLGQKIRRAFVAEEGWRLVALDYSQIELRVLAHLSGDENLIRVFQEGKDIHTQTASWMFGVPSEAIDPLMRRAAKTINFGVLYGMSAHRLSQELGIPYEEAAAFIQRYFQSYPKVKAWIEKTLEEGRTRGYVETLFGRRRYVPDLTARVKSVREAAERMAFNMPVQGTAADLMKLAMVRLFPQLREVGARMLLQVHDELLLEAPKERAEEVAALAKEVMEGVWPLAVPLEVEVGIGEDWLAAKG

SEQ ID NO: 855 - DNA, 2529 bp, synthetic construct
  misc_feature 1..2529: note = Variant of DNA polymerase I from Thermus sp. strain 2.9
  source 1..2529: mol_type = other DNA
atgcaccatcatcatcatcatggcggtagcggcatgttaccgttgttcgaacctaaaggtcgcgtgcttctggttgatggccatcatctcgcgtatcgtaacttctttgccctgaaaggattaaccaccagccgtggcgagccggtacagggtgtctacggctttgcaaagtcgctcctgaaagctctgaaagaagacggtgatgtggtgattgttgtctttgatgcgaaagcgccaagttttcgccacgaagcgtacgaagcttacaaagccgggcgtgctccaacgccggaagactttcctcgccaattggcgcttatgaaggaattagtggatttgcttggcctcgaacgcttggaagttcccggtttcgaggcagacgacgtattagcgactctcgcaaagaaagccgaacgtgagggctatgaagtccagatcttgacagcagatcgcgatcttttccagcttttatctccgcgcatctcggtgttacacccggaagggcatctgatcaccccggaatggctctgggagaaatatggtttgcgtcccgaacaatgggtggattttcgcgccttagcaggcgatccgagcgacaatattccgggagttaaaggtatcggcgagaagacggcgctcaagctccttaaagaatgggggtcgttggagaacttgcttaagaatttagatcaggtcaaaccagagtcagtgcgtgagaagattcttgcacacctcgaagacctcaaattaagccgcgaattgtcccgtgtacgcaccgatttgccgctcgaagttgatttccgtggccgccgcgaacctgactgggagggtcttaaagcgtttttagagcgtcttgaatttggttcgctcttgcatgaattcggccttttagaaagcccgttaccagccgaagaagcaccttggccaccgcccgaaggcgcgtttttaggttaccgtttgagtcgcccggaaccgatgtgggccgaattattggctcttgcagcgtctgcccagggacgtgtgtatcgcgcggaagaccctcatggtgcgctccgcggcctcaaagaagtccgtggactccttgccaaagacttagctgttgttgcattgcgcgaaggtcttgatttacctccgactgatgatccaatgcttcttgcgtacctcttggacccgtcaaacacgacgcccgaaggcgtagcccgtcgttacggcggcgagtggaccgaagatgcaggcgagcgcgcgttattggccgaacgtttgcacgcaaatttattaggacgtttgcaaggcgaggaacgtctcctctggctttacgaagaagtggagaaaccattgagtcgcgtgctcgctcatatggaagctaccggtgtcaaattagacgtggcgtatttggaggcactcagccttgaagttgctgccgaaatgcgccgcttggaggaagaagtattccgtttagcaggccactcctttaaccttaattctcgcgatcagttagaacgtgtgttgttcgatgaacttggtctccctcctatcggcaagacagagaagaccggtaaacgtagcacttcagcggcggttttagaagctcttcgcgaagtccatcccattgtggacaagatcttgcagtaccgcgaactcgcgaaattgaaaggcacctatattgaccgtcttccggcattagtccacccgaaaacgggacgcctccatacccgcttcaaccaaacagccacggcgaccggtcgtttgtcctcctctgatccaaaccttcagaatattccagtacgtaccccattgggccagaagatccgccgcgcgtttgtagctgaggagggttggcgtttagtggccctcgattatagccaaattgaattacgtgtccttgcccatctttctggcgatgagaacctcatccgcgtgtttcaggaaggcaaagacattcacactcaaacggcaagctggatgtttggattatcagctgaagcgatcgatcctttgatgcgtcgtgcagcgaagaccatcaatttcggtgttctctacggtatgagtgcccatcgtttgtcgcaggaattaggcattccctatgaagaagctgcggcgttcattcagcgctactttcaaagctatcccaaagttaaagcatggatcgagaagactctcgaagaaggccgcacacgtggttacgtagagaccttatttggacgtcgccgctatgttcccgatttaaacgctcgcgtgaaatctgtccgtgaagccgccgaacgcatggcgttcaacatgcctgtacagggcacggcagctgacctcatgaaacttgcaatggtgcgcctttttccacaattgcgtgaagttggtgcccgcatgctcttgcaggtccacgatgaactcttgttagaagcgccaaaagagcgtgcggaagaggtggcagccctcgcgaaagaggttatggaaggcgtgtggcccttagcggtgcctcttgaagtcgaagttggtattggcgaggattggttggctgccaaaggataatga

SEQ ID NO: 856 - protein, 841 aa, synthetic construct
  REGION 1..841: note = Variant of DNA polymerase I from Thermus sp. strain 2.9
MHHHHHHGGSGMLPLFEPKGRVLLVDGHHLAYRNFFALKGLTTSRGEPVQGVYGFAKSLLKALKEDGDVVIVVFDAKAPSFRHEAYEAYKAGRAPTPEDFPRQLALMKELVDLLGLERLEVPGFEADDVLATLAKKAEREGYEVQILTADRDLFQLLSPRISVLHPEGHLITPEWLWEKYGLRPEQWVDFRALAGDPSDNIPGVKGIGEKTALKLLKEWGSLENLLKNLDQVKPESVREKILAHLEDLKLSRELSRVRTDLPLEVDFRGRREPDWEGLKAFLERLEFGSLLHEFGLLESPLPAEEAPWPPPEGAFLGYRLSRPEPMWAELLALAASAQGRVYRAEDPHGALRGLKEVRGLLAKDLAVVALREGLDLPPTDDPMLLAYLLDPSNTTPEGVARRYGGEWTEDAGERALLAERLHANLLGRLQGEERLLWLYEEVEKPLSRVLAHMEATGVKLDVAYLEALSLEVAAEMRRLEEEVFRLAGHSFNLNSRDQLERVLFDELGLPPIGKTEKTGKRSTSAAVLEALREVHPIVDKILQYRELAKLKGTYIDRLPALVHPKTGRLHTRFNQTATATGRLSSSDPNLQNIPVRTPLGQKIRRAFVAEEGWRLVALDYSQIELRVLAHLSGDENLIRVFQEGKDIHTQTASWMFGLSAEAIDPLMRRAAKTINFGVLYGMSAHRLSQELGIPYEEAAAFIQRYFQSYPKVKAWIEKTLEEGRTRGYVETLFGRRRYVPDLNARVKSVREAAERMAFNMPVQGTAADLMKLAMVRLFPQLREVGARMLLQVHDELLLEAPKERAEEVAALAKEVMEGVWPLAVPLEVEVGIGEDWLAAKG

SEQ ID NO: 857 - DNA, 2529 bp, synthetic construct
  misc_feature 1..2529: note = Variant of DNA polymerase I from Thermus sp. strain 2.9
  source 1..2529: mol_type = other DNA
atgcaccatcatcatcatcatggcggtagcggcatgttaccgttgttcgaacctaaaggtcgcgtgcttctggttgatggccatcatctcgcgtatcgtaacttctttgccctgaaaggattaaccaccagccgtggcgagccggtacagggtgtctacggctttgcaaagtcgctcctgaaagctctgaaagaagacggtgatgtggtgattgttgtctttgatgcgaaagcgccaagttttcgccacgaagcgtacgaagcttacaaagccgggcgtgctccaacgccggaagactttcctcgccaattggcgcttatgaaggaattagtggatttgcttggcctcgaacgcttggaagttcccggtttcgaggcagacgacgtattagcgactctcgcaaagaaagccgaacgtgagggctatgaagtccagatcttgacagcagatcgcgatcttttccagcttttatctccgcgcatctcggtgttacacccggaagggcatctgatcaccccggaatggctctgggagaaatatggtttgcgtcccgaacaatgggtggattttcgcgccttagcaggcgatccgagcgacaatattccgggagttaaaggtatcggcgagaagacggcgctcaagctccttaaagaatgggggtcgttggagaacttgcttaagaatttagatcaggtcaaaccagagtcagtgcgtgagaagattcttgcacacctcgaagacctcaaattaagccgcgaattgtcccgtgtacgcaccgatttgccgctcgaagttgatttccgtggccgccgcgaacctgactgggagggtcttaaagcgtttttagagcgtcttgaatttggttcgctcttgcatgaattcggccttttagaaagcccgttaccagccgaagaagcaccttggccaccgcccgaaggcgcgtttttaggttaccgtttgagtcgcccggaaccgatgtgggccgaattattggctcttgcagcgtctgcccagggacgtgtgtatcgcgcggaagaccctcatggtgcgctccgcggcctcaaagaagtccgtggactccttgccaaagacttagctgttgttgcattgcgcgaaggtcttgatttacctccgactgatgatccaatgcttcttgcgtacctcttggacccgtcaaacacgacgcccgaaggcgtagcccgtcgttacggcggcgagtggaccgaagatgcaggcgagcgcgcgttattggccgaacgtttgcaccagaatttattaggacgtttgcaaggcgaggaacgtctcctctggctttacgaagaagtggagaaaccattgagtcgcgtgctcgcgcatatggaagctaccggtgtcaaattagacgtggcgtatttggaggcactcagccttgaagttgctgccgaaatgcgccgcttggaggaagaagtattccgtttagcaggccactcctttaaccttaattctcgcgatcagttagaacgtgtgttgttcgatgaacttggtctccctcctatcggcaagacagagaagaccggtaaacgtagcacttcagcggcggttttagaagctcttcgcgaagtccatcccattgtggacaagatcttgcagtaccgcgaactcgcgaaattgaaaggcacctatattgaccgtcttccggcattagtccacccgaaaacgggacgcctccatacccgcttcaaccaaacagccacggcgaccggtcgtttgtcctcctctgatccaaaccttcagaatattccagtacgtaccccattgggccagaagatccgccgcgcgtttgtagctgaggagggttggcgtttagtggccctcgattatagccaaattgaattacgtgtccttgcccatctttctggcgatgagaacctcatccgcgtgtttcaggaaggcaaagacattcacactcaaacggcaagctggatgtttggattatcagctgaagcgatcgatcctttgatgcgtcgtgcagcgaagaccatcaatttcggtgttctctacggtatgagtgccgctcgtttgtcgcaggaattaggcattccctatgaagaagctgcggcgttcattcagcgctactttcaaagctatcccaaagttaaagcatggatcgagaagactctcgaagaaggccgcacacgtggttacgtagagaccttatttggacgtcgccgctatgttcccgatttaaacgctcgcgtgaaatctgtccgtgaagccgccgaacgcatggcgttcaacatgcctgtacagggcacggcagctgacctcatgaaacttgcaatggtgcgcctttttccacaattgcgtgaagttggtgcccgcatgctcttgcaggtccacgatgaactcttgttagaagcgccaaaagagcgtgcggaagaggtggcagccctcgcgaaagaggttatggaaggcgtgtggcccttagcggtgcctcttgaagtcgaagttggtattggcgaggattggttggctgccaaaggataatga

SEQ ID NO: 858 - protein, 841 aa, synthetic construct
  REGION 1..841: note = Variant of DNA polymerase I from Thermus sp. strain 2.9
MHHHHHHGGSGMLPLFEPKGRVLLVDGHHLAYRNFFALKGLTTSRGEPVQGVYGFAKSLLKALKEDGDVVIVVFDAKAPSFRHEAYEAYKAGRAPTPEDFPRQLALMKELVDLLGLERLEVPGFEADDVLATLAKKAEREGYEVQILTADRDLFQLLSPRISVLHPEGHLITPEWLWEKYGLRPEQWVDFRALAGDPSDNIPGVKGIGEKTALKLLKEWGSLENLLKNLDQVKPESVREKILAHLEDLKLSRELSRVRTDLPLEVDFRGRREPDWEGLKAFLERLEFGSLLHEFGLLESPLPAEEAPWPPPEGAFLGYRLSRPEPMWAELLALAASAQGRVYRAEDPHGALRGLKEVRGLLAKDLAVVALREGLDLPPTDDPMLLAYLLDPSNTTPEGVARRYGGEWTEDAGERALLAERLHQNLLGRLQGEERLLWLYEEVEKPLSRVLAHMEATGVKLDVAYLEALSLEVAAEMRRLEEEVFRLAGHSFNLNSRDQLERVLFDELGLPPIGKTEKTGKRSTSAAVLEALREVHPIVDKILQYRELAKLKGTYIDRLPALVHPKTGRLHTRFNQTATATGRLSSSDPNLQNIPVRTPLGQKIRRAFVAEEGWRLVALDYSQIELRVLAHLSGDENLIRVFQEGKDIHTQTASWMFGLSAEAIDPLMRRAAKTINFGVLYGMSAARLSQELGIPYEEAAAFIQRYFQSYPKVKAWIEKTLEEGRTRGYVETLFGRRRYVPDLNARVKSVREAAERMAFNMPVQGTAADLMKLAMVRLFPQLREVGARMLLQVHDELLLEAPKERAEEVAALAKEVMEGVWPLAVPLEVEVGIGEDWLAAKG

SEQ ID NO: 859 - DNA, 2529 bp, synthetic construct
  misc_feature 1..2529: note = Variant of DNA polymerase I from Thermus sp. strain 2.9
  source 1..2529: mol_type = other DNA
atgcaccatcatcatcatcatggcggtagcggcatgttaccgttgttcgaacctaaaggtcgcgtgcttctggttgatggccatcatctcgcgtatcgtaacttctttgccctgaaaggattaaccaccagccgtggcgagccggtacagggtgtctacggctttgcaaagtcgctcctgaaagctctgaaagaagacggtgatgtggtgattgttgtctttgatgcgaaagcgccaagttttcgccacgaagcgtacgaagcttacaaagccgggcgtgctccaacgccggaagactttcctcgccaattggcgcttatgaaggaattagtggatttgcttggcctcgaacgcttggaagttcccggtttcgaggcagacgacgtattagcgactctcgcaaagaaagccgaacgtgagggctatgaagtccagatcttgacagcagatcgcgatcttttccagcttttatctccgcgcatctcggtgttacacccggaagggcatcgtatcaccccggaatggctctgggagaaatatggtttgcgtcccgaacaatgggtggattttcgcgccttagtcggcgatccgagcgacaatattccgggagttaaaggtatcggcgagaagacggcgctcaagctccttaaagaatgggggtcgttggagaacttgcttaagaatttagatcaggtcaaaccagagtcagtgcgtgagaagattcttgcacacctcgaagacctcaaattaagccgcgaattgtcccgtgtacgcaccgatttgccgctcgaagttgatttccgtggccgccgcgaacctgactgggagggtcttaaagcgtttttagagcgtcttgaatttggttcgctcttgcatgaattcggccttttagaaagcccgttaccagccgaagaagcaccttggccaccgcccgaaggcgcgtttttaggttaccgtttgagtcgcccggaaccgatgtgggccgaattattggctcttgcagcgtctgcccagggacgtgtgtatcgcgcggaagaccctcatggtgcgctccgcggcctcaaagaagtccgtggactccttgccaaagacttagctgttgttgcattgcgcgaaggtcttgatttacctccgactgatgatccaatgcttcttgcgtacctcttggacccgtcaaacacgacgcccgaaggcgtagcccgtcgttacggcggcgagtggaccgaagatgcaggcgagcgcgcgttattggccgaacgtttgcacgcaaatttattaggacgtttgcaaggcgaggaacgtctcctctggctttacgaagaagtggagaaaccattgagtcgcgtgctcgctcatatggaagctaccggtgtcaaattagacgtggcgtatttggaggcactcagccttgaagttgctgccgaaatgcgccgcttggaggaagaagtattccgtttagcaggccactcctttaaccttaattctcgcgatcagttagaacgtgtgttgttcgatgaacttggtctccctcctatcggcaagacagagaagaccggtaaacgtagcacttcagcggcggttttagaagctcttcgcgaagtccatcccattgtggacaagatcttgcagtaccgcgaactcgcgaaattgaaaggcacctatattgaccctcttccggcattagtccacccgaaaacgggacgcctccatacccgcttcaaccaaacagccacggcgaccggtcgtttgtcctcctctgatccaaaccttcagaatattccagtacgtaccccattgggccagaagatccgccgcgcgtttgtagctgaggagggttggcgtttagtggccctcgattatagccaaattgaattacgtgtccttgcccatctttctggcgatgagaacctcatccgcgtgtttcaggaaggcaaagacattcacactcaaacggcaagctggatgtttggagtgtcgtcggaagcgatcgatcctttgatgcgtcgtgcagcgaagaccatcaatttcggtgttctctacggtatgagtgcccaccgtttgtcgcaggaattaggcattccctatgaagaagctgcggcgttcattcagcgctactttcaaagctatcccaaagttaaagcatggatcgagaagactctcgaagaaggccgcacacgtggttacgtagagaccttatttggacgtcgccgctatgttcccgatttaaacgctcgcgtgaaatctgtccgtgaagccgccgaacgcatggcgttcaacatgcctgtacagggcacggcagctgacctcatgaaacttgcaatggtgcgcctttttccacaattgcgtgaagttggtgcccgcatgctcttgcaggtccacgatgaactcttgttagaagcgccaaaagagcgtgcggaagaggtggcagccctcgcgaaagaggttatggaaggcgtgtggcccttagcggtgcctcttgaagtcgaagttggtattggcgaggattggttggctgccaaaggataatga

SEQ ID NO: 860 - protein, 841 aa, synthetic construct
  REGION 1..841: note = Variant of DNA polymerase I from Thermus sp. strain 2.9
MHHHHHHGGSGMLPLFEPKGRVLLVDGHHLAYRNFFALKGLTTSRGEPVQGVYGFAKSLLKALKEDGDVVIVVFDAKAPSFRHEAYEAYKAGRAPTPEDFPRQLALMKELVDLLGLERLEVPGFEADDVLATLAKKAEREGYEVQILTADRDLFQLLSPRISVLHPEGHRITPEWLWEKYGLRPEQWVDFRALVGDPSDNIPGVKGIGEKTALKLLKEWGSLENLLKNLDQVKPESVREKILAHLEDLKLSRELSRVRTDLPLEVDFRGRREPDWEGLKAFLERLEFGSLLHEFGLLESPLPAEEAPWPPPEGAFLGYRLSRPEPMWAELLALAASAQGRVYRAEDPHGALRGLKEVRGLLAKDLAVVALREGLDLPPTDDPMLLAYLLDPSNTTPEGVARRYGGEWTEDAGERALLAERLHANLLGRLQGEERLLWLYEEVEKPLSRVLAHMEATGVKLDVAYLEALSLEVAAEMRRLEEEVFRLAGHSFNLNSRDQLERVLFDELGLPPIGKTEKTGKRSTSAAVLEALREVHPIVDKILQYRELAKLKGTYIDPLPALVHPKTGRLHTRFNQTATATGRLSSSDPNLQNIPVRTPLGQKIRRAFVAEEGWRLVALDYSQIELRVLAHLSGDENLIRVFQEGKDIHTQTASWMFGVSSEAIDPLMRRAAKTINFGVLYGMSAHRLSQELGIPYEEAAAFIQRYFQSYPKVKAWIEKTLEEGRTRGYVETLFGRRRYVPDLNARVKSVREAAERMAFNMPVQGTAADLMKLAMVRLFPQLREVGARMLLQVHDELLLEAPKERAEEVAALAKEVMEGVWPLAVPLEVEVGIGEDWLAAKG

SEQ ID NO: 861 - DNA, 2529 bp, synthetic construct
  misc_feature 1..2529: note = Variant of DNA polymerase I from Thermus sp. strain 2.9
  source 1..2529: mol_type = other DNA
atgcaccatcatcatcatcatggcggtagcggcatgttaccgttgttcgaacctaaaggtcgcgtgcttctggttgatggccatcatctcgcgtatcgtaacttctttgccctgaaaggattaaccaccagccgtggcgagccggtacagggtgtctacggctttgcaaagtcgctcctgaaagctctgaaagaagacggtgatgtggtgattgttgtctttgatgcgaaagcgccaagttttcgccacgaagcgtacgaagcttacaaagccgggcgtgctccaacgccggaagactttcctcgccaattggcgcttatgaaggaattagtggatttgcttggcctcgaacgcttggaagttcccggtttcgaggcagacgacgtattagcgactctcgcaaagaaagccgaacgtgagggctatgaagtccagatcttgacagcagatcgcgatcttttccagcttttatctccgcgcatctcggtgttacacccggaagggcatcgtatcaccccggaatggctctgggagaaatatggtttgcgtcccgaacaatgggtggattttcgcgccttagcaggcgatccgagcgacaatattccgggagttaaaggtatcggcgagaagacggcgctcaagctccttaaagaatgggggtcgttggagaacttgcttaagaatttagatcaggtcaaaccagagtcagtgcgtgagaagattcttgcacacctcgaagacctcaaattaagccgcgaattgtcccgtgtacgcaccgatttgccgctctctgttgatttccgtggccgccgcgaacctgactgggagggtcttaaagcgtttttagagcgtcttgaatttggttcgctcttgcatgaattcggccttttagaaagcccgttaccagccgaagaagcaccttggccaccgcccgaaggcgcgtttttaggttaccgtttgagtcgcccggaaccgatgtgggccgaattattggctcttgcagcgtctgcccagggacgtgtgtatcgcgcggaagaccctcatggtgcgctccgcggcctcaaagaagtccgtggactccttgccaaagacttagctgttgttgcattgcgcgaaggtcttgatttacctccgactgatgatccaatgcttcttgcgtacctcttggacccgtcaaacacgacgcccgaaggcgtagcccgtcgttacggcggcgagtggaccgaagatgcaggcgagcgcgcgttattggccgaacgtttgcacgccaatttattaggacgtttgcaaggcgaggaacgtctcctctggctttacgaagaagtggagaaaccattgagtcgcgtgctcgcgcatatggaagctaccggtgtcaaattagacgtggcgtatttggaggcactcagccttgaagttgctgccgaaatgcgccgcttggaggaagaagtattccgtttagcaggccactcctttaaccttaattctcgcgatcagttagaacgtgtgttgttcgatgaacttggtctccctcctatcggcaagacagagaagaccggtaaacgtagcacttcagcggcggttttagaagctcttcgcgaagtccatcccattgtggacaagatcttgcagtaccgcgaactcgcgaaattgaaaggcacctatattgaccctcttccggcattagtccacccgaaaacgggacgcctccatacccgcttcaaccaaacagccacggcgaccggtcgtttgtcctcctctgatccaaaccttcagaatattccagtacgtaccccattgggccagaagatccgccgcgcgtttgtagctgaggagggttggcgtttagtggccctcgattatagccaaattgaattacgtgtccttgcccatctttctggcgatgagaacctcatccgcgtgtttcaggaaggcaaagacattcacactcaaacggcaagctggatgtttggattatcagctgaagcgatcgatcctttgatgcgtcgtgcagcgaagaccatcaatttcggtgttctctacggtatgagtgcccatcgtttgtcgcaggaattaggcattccctatgaagaagctgcggcgttcattcagcgctactttcaaagctatcccaaagttaaagcatggatcgagaagactctcgaagaaggccgcacacgtggttacgtagagaccttatttggacgtcgccgctatgttcccgatttaaacgctcgcgtgaaatctgtccgtgaagccgccgaacgcatggcgttcaacatgcctgtacagggcacggcagctgacctcatgaaacttgcaatggtgcgcctttttccacaattgcgtgaagttggtgcccgcatgctcttgcaggtccacgatgaactcttgttagaagcgccaaaagagcgtgcggaagaggtggcagccctcgcgaaagaggttatggaaggcgtgtggcccttagcggtgcctcttgaagtcgaagttggtattggcgaggattggttggctgccaaaggataatga

SEQ ID NO: 862 - protein, 841 aa, synthetic construct
  REGION 1..841: note = Variant of DNA polymerase I from Thermus sp. strain 2.9
MHHHHHHGGSGMLPLFEPKGRVLLVDGHHLAYRNFFALKGLTTSRGEPVQGVYGFAKSLLKALKEDGDVVIVVFDAKAPSFRHEAYEAYKAGRAPTPEDFPRQLALMKELVDLLGLERLEVPGFEADDVLATLAKKAEREGYEVQILTADRDLFQLLSPRISVLHPEGHRITPEWLWEKYGLRPEQWVDFRALAGDPSDNIPGVKGIGEKTALKLLKEWGSLENLLKNLDQVKPESVREKILAHLEDLKLSRELSRVRTDLPLSVDFRGRREPDWEGLKAFLERLEFGSLLHEFGLLESPLPAEEAPWPPPEGAFLGYRLSRPEPMWAELLALAASAQGRVYRAEDPHGALRGLKEVRGLLAKDLAVVALREGLDLPPTDDPMLLAYLLDPSNTTPEGVARRYGGEWTEDAGERALLAERLHANLLGRLQGEERLLWLYEEVEKPLSRVLAHMEATGVKLDVAYLEALSLEVAAEMRRLEEEVFRLAGHSFNLNSRDQLERVLFDELGLPPIGKTEKTGKRSTSAAVLEALREVHPIVDKILQYRELAKLKGTYIDPLPALVHPKTGRLHTRFNQTATATGRLSSSDPNLQNIPVRTPLGQKIRRAFVAEEGWRLVALDYSQIELRVLAHLSGDENLIRVFQEGKDIHTQTASWMFGLSAEAIDPLMRRAAKTINFGVLYGMSAHRLSQELGIPYEEAAAFIQRYFQSYPKVKAWIEKTLEEGRTRGYVETLFGRRRYVPDLNARVKSVREAAERMAFNMPVQGTAADLMKLAMVRLFPQLREVGARMLLQVHDELLLEAPKERAEEVAALAKEVMEGVWPLAVPLEVEVGIGEDWLAAKG

SEQ ID NO: 863 - DNA, 2529 bp, synthetic construct
  misc_feature 1..2529: note = Variant of DNA polymerase I from Thermus sp. strain 2.9
  source 1..2529: mol_type = other DNA
atgcaccatcatcatcatcatggcggtagcggcatgttaccgttgttcgaacctaaaggtcgcgtgcttctggttgatggccatcatctcgcgtatcgtaacttctttgccctgaaaggattaaccaccagccgtggcgagccggtacagggtgtctacggctttgcaaagtcgctcctgaaagctctgaaagaagacggtgatgtggtgattgttgtctttgatgcgaaagcgccaagttttcgccacgaagcgtacgaagcttacaaagccgggcgtgctccaacgccggaagactttcctcgccaattggcgcttatgaaggaattagtggatttgcttggcctcgaacgcttggaagttcccggtttcgaggcagacgacgtattagcgactctcgcaaagaaagccgaacgtgagggctatgaagtccagatcttgacagcagatcgcgatcttttccagcttttatctccgcgcatctcggtgttacacccggaagggcatcgtatcaccccggaatggctctgggagaaatatggtttgcgtcccgaacaatgggtggattttcgcgccttagccggcgatccgagcgacaatattccgggagttaaaggtatcggcgagaagacggcgctcaagctccttaaagaatgggggtcgttggagaacttgcttaagaatttagatcaggtcaaaccagagtcagtgcgtgagaagattcttgcacacctcgaagacctcaaattaagccgcgaattgtcccgtgtacgcaccgatttgccgctcgaagttgatttccgtggccgccgcgaacctgactgggagggtcttaaagcgtttttagagcgtcttgaatttggttcgctcttgcatgaattcggccttttagaaagcccgttaccagccgaagaagcaccttggccaccgcccgaaggcgcgtttttaggttaccgtttgagtcgcccggaaccgatgtgggccgaattattggctcttgcagcgtctgcccagggacgtgtgtatcgcgcggaagaccctcatggtgcgctccgcggcctcaaagaagtccgtggactccttgccaaagacttagctgttgttgcattgcgcgaaggtcttgatttacctccgactgatgatccaatgcttcttgcgtacctcttggacccgtcaaacacgacgcccgaaggcgtagcccgtcgttacggcggcgagtggaccgaagatgcaggcgagcgcgcgttattggccgaacgtttgcaccagaatttattaggacgtttgcaaggcgaggaacgtctcctctggctttacgaagaagtggagaaaccattgagtcgcgtgctcgctcatatggaagctaccggtgtcaaattagacgtggcgtatttggaggcactcagccttgaagttgctgccgaactgcgccgcttggaggaagaagtattccgtttagcaggccactcctttaaccttaattctcgcgatcagttagaacgtgtgttgttcgatgaacttggtctccctcctatcggcaagacagagaagaccggtaaacgtagcacttcagcggcggttttagaagctcttcgcgaagtccatcccattgtggacaagatcttgcagtaccgcgaactcgcgaaattgaaaggcacctatattgaccgtcttccggcattagtccacccgaaaacgggacgcctccatacccgcttcaaccaaacagccacggcgaccggtcgtttgtcctcctctgatccaaaccttcagaatattccagtacgtaccccattgggccagaagatccgccgcgcgtttgtagctgaggagggttggcgtttagtggccctcgattatagccaaattgaattacgtgtccttgcccatctttctggcgatgagaacctcatccgcgtgtttcaggaaggcaaagacattcacactcaaacggcaagctggatgtttggagtgccgtcggaagcgatcgatcctttgatgcgtcgtgcagcgaagaccatcaatttcggtgttctctacggtatgagtgcccaccgtttgtcgcaggaattaggcattccctatgaagaagctgcggcgttcattcagcgctactttcaaagctatcccaaagttaaagcatggatcgagaagactctcgaagaaggccgcacacgtggttacgtagagaccttatttggacgtcgccgctatgttcccgatttaaacgctcgcgtgaaatctgtccgtgaagccgccgaacgcatggcgttcaacatgcctgtacagggcacggcagctgacctcatgaaacttgcaatggtgcgcctttttccacaattgcgtgaagttggtgcccgcatgctcttgcaggtccacgatgaactcttgttagaagcgccaaaagagcgtgcggaagaggtggcagccctcgcgaaagaggttatggaaggcgtgtggcccttagcggtgcctcttgaagtcgaagttggtattggcgaggattggttggctgccaaaggataatga

SEQ ID NO: 864 - protein, 841 aa, synthetic construct
  REGION 1..841: note = Variant of DNA polymerase I from Thermus sp. strain 2.9
MHHHHHHGGSGMLPLFEPKGRVLLVDGHHLAYRNFFALKGLTTSRGEPVQGVYGFAKSLLKALKEDGDVVIVVFDAKAPSFRHEAYEAYKAGRAPTPEDFPRQLALMKELVDLLGLERLEVPGFEADDVLATLAKKAEREGYEVQILTADRDLFQLLSPRISVLHPEGHRITPEWLWEKYGLRPEQWVDFRALAGDPSDNIPGVKGIGEKTALKLLKEWGSLENLLKNLDQVKPESVREKILAHLEDLKLSRELSRVRTDLPLEVDFRGRREPDWEGLKAFLERLEFGSLLHEFGLLESPLPAEEAPWPPPEGAFLGYRLSRPEPMWAELLALAASAQGRVYRAEDPHGALRGLKEVRGLLAKDLAVVALREGLDLPPTDDPMLLAYLLDPSNTTPEGVARRYGGEWTEDAGERALLAERLHQNLLGRLQGEERLLWLYEEVEKPLSRVLAHMEATGVKLDVAYLEALSLEVAAELRRLEEEVFRLAGHSFNLNSRDQLERVLFDELGLPPIGKTEKTGKRSTSAAVLEALREVHPIVDKILQYRELAKLKGTYIDRLPALVHPKTGRLHTRFNQTATATGRLSSSDPNLQNIPVRTPLGQKIRRAFVAEEGWRLVALDYSQIELRVLAHLSGDENLIRVFQEGKDIHTQTASWMFGVPSEAIDPLMRRAAKTINFGVLYGMSAHRLSQELGIPYEEAAAFIQRYFQSYPKVKAWIEKTLEEGRTRGYVETLFGRRRYVPDLNARVKSVREAAERMAFNMPVQGTAADLMKLAMVRLFPQLREVGARMLLQVHDELLLEAPKERAEEVAALAKEVMEGVWPLAVPLEVEVGIGEDWLAAKG

SEQ ID NO: 865 - DNA, 2529 bp, synthetic construct
  misc_feature 1..2529: note = Variant of DNA polymerase I from Thermus sp. strain 2.9
  source 1..2529: mol_type = other DNA
atgcaccatcatcatcatcatggcggtagcggcatgttaccgttgttcgaacctaaaggtcgcgtgcttctggttgatggccatcatctcgcgtatcgtaacttctttgccctgaaaggattaaccaccagccgtggcgagccggtacagggtgtctacggctttgcaaagtcgctcctgaaagctctgaaagaagacggtgatgtggtgattgttgtctttgatgcgaaagcgccaagttttcgccacgaagcgtacgaagcatacaaagccgggcgtgctccaacgccggaagactttcctcgccaattggcgcttatgaaggaattagtggatttgcttggcctcgaacgcttggaagttcccggtttcgaggcagacgacgtattagcgactctcgcaaagaaagccgaacgtgagggctatgaagtccagatcttgacagcagatcgcgatcttttccagcttttatctccgcgcatctcggtgttacacccggaagggcatctgatcaccccggaatggctctgggagaaatatggtttgcgtcccgaacaatgggtggattttcgcgccttagccggcgatccgagcgacaatattccgggagttaaaggtatcggcgagaagacggcgctcaagctccttaaagaatgggggtcgttggagaacttgcttaagaatttagatcaggtcaaaccagagtcagtgcgtgagaagattcttgcacacctcgaagacctcaaattaagccgcgaattgtcccgtgtacgcaccgatttgccgctcgaagttgatttccgtggccgccgcgaacctgactgggagggtcttaaagcgtttttagagcgtcttgaatttggttcgctcttgcatgaattcggccttttagaaagcccgttaccagccgaagaagcaccttggccaccgcccgaaggcgcgtttttaggttaccgtttgagtcgcccggaaccgatgtgggccgaattattggctcttgcagcgtctgcccagggacgtgtgtatcgcgcggaagaccctcatggtgcgctccgcggcctcaaagaagtccgtggactccttgccaaagacttagctgttgttgcattgcgcgaaggtcttgatttacctccgactgatgatccaatgcttcttgcgtacctcttggacccgtcaaacacgacgcccgaaggcgtagcccgtcgttacggcggcgagtggaccgaagatgcaggcgagcgcgcgttattggccgaacgtttgcacgcaaatttattaggacgtttgcaaggcgaggaacgtctcctctggctttacgaagaagtggagaaaccattgagtcgcgtgctcgctcatatggaagctaccggtgtcaaattagacgtggcgtatttggaggcactcagccttgaagttgctgccgaactgcgccgcttggaggaagaagtattccgtttagcaggccactcctttaaccttaattctcgcgatcagttagaacgtgtgttgttcgatgaacttggtctccctcctatcggcaagacagagaagaccggtaaacgtagcacttcagcggcggttttagaagctcttcgcgaagtccatcccattgtggacaagatcttgcagtaccgcgaactcgcgaaattgaaaggcacctatattgaccgtcttccggcattagtccacccgaaaacgggacgcctccatacccgcttcaaccaaacagccacggcgaccggtcgtttgtcctcctctgatccaaaccttcagaatattccagtacgtaccccattgggccagaagatccgccgcgcgtttgtagctgaggagggttggcgtttagtggccctcgattatagccaaattgaattacgtgtccttgcccatctttctggcgatgagaacctcatccgcgtgtttcaggaaggcaaagacattcacactcaaacggcaagctggatgtttggagtgtcggcggaagcgatcgatcctttgatgcgtcgtgcagcgaagaccatcaatttcggtgttctctacggtatgagtgccgctcgtttgtcgcaggaattaggcattccctatgaagaagctgcggcgttcattcagcgctactttcaaagctatcccaaagttaaagcatggatcgagaagactctcgaagaaggccgcacacgtggttacgtagagaccttatttggacgtcgccgctatgttcccgatttaaacgctcgcgtgaaatctgtccgtgaagccgccgaacgcatggcgttcaacatgcctgtacagggcacggcagctgacctcatgaaacttgcaatggtgcgcctttttccacaattgcgtgaagttggtgcccgcatgctcttgcaggtccacgatgaactcttgttagaagcgccaaaagagcgtgcggaagaggtggcagccctcgcgaaagaggttatggaaggcgtgtggcccttagcggtgcctcttgaagtcgaagttggtattggcgaggattggttggctgccaaaggataatga

SEQ ID NO: 866 - protein, 841 aa, synthetic construct
  REGION 1..841: note = Variant of DNA polymerase I from Thermus sp. strain 2.9
MHHHHHHGGSGMLPLFEPKGRVLLVDGHHLAYRNFFALKGLTTSRGEPVQGVYGFAKSLLKALKEDGDVVIVVFDAKAPSFRHEAYEAYKAGRAPTPEDFPRQLALMKELVDLLGLERLEVPGFEADDVLATLAKKAEREGYEVQILTADRDLFQLLSPRISVLHPEGHLITPEWLWEKYGLRPEQWVDFRALAGDPSDNIPGVKGIGEKTALKLLKEWGSLENLLKNLDQVKPESVREKILAHLEDLKLSRELSRVRTDLPLEVDFRGRREPDWEGLKAFLERLEFGSLLHEFGLLESPLPAEEAPWPPPEGAFLGYRLSRPEPMWAELLALAASAQGRVYRAEDPHGALRGLKEVRGLLAKDLAVVALREGLDLPPTDDPMLLAYLLDPSNTTPEGVARRYGGEWTEDAGERALLAERLHANLLGRLQGEERLLWLYEEVEKPLSRVLAHMEATGVKLDVAYLEALSLEVAAELRRLEEEVFRLAGHSFNLNSRDQLERVLFDELGLPPIGKTEKTGKRSTSAAVLEALREVHPIVDKILQYRELAKLKGTYIDRLPALVHPKTGRLHTRFNQTATATGRLSSSDPNLQNIPVRTPLGQKIRRAFVAEEGWRLVALDYSQIELRVLAHLSGDENLIRVFQEGKDIHTQTASWMFGVSAEAIDPLMRRAAKTINFGVLYGMSAARLSQELGIPYEEAAAFIQRYFQSYPKVKAWIEKTLEEGRTRGYVETLFGRRRYVPDLNARVKSVREAAERMAFNMPVQGTAADLMKLAMVRLFPQLREVGARMLLQVHDELLLEAPKERAEEVAALAKEVMEGVWPLAVPLEVEVGIGEDWLAAKG

SEQ ID NO: 867 - DNA, 2529 bp, synthetic construct
  misc_feature 1..2529: note = Variant of DNA polymerase I from Thermus sp. strain 2.9
  source 1..2529: mol_type = other DNA
atgcaccatcatcatcatcatggcggtagcggcatgttaccgttgttcgaacctaaaggtcgcgtgcttctggttgatggccatcatctcgcgtatcgtaacttctttgccctgaaaggattaaccaccagccgtggcgagccggtacagggtgtctacggctttgcaaagtcgctcctgaaagctctgaaagaagacggtgatgtggtgattgttgtctttgatgcgaaagcgccaagttttcgccacgaagcgtacgaagcttacaaagccgggcgtgctccaacgccggaagactttcctcgccaattggcgcttatgaaggaattagtggatttgcttggcctcgaacgcttggaagttcccggtttcgaggcagacgacgtattagcgactctcgcaaagaaagccgaacgtgagggctatgaagtccagatcttgacagcagatcgcgatcttttccagcttttatctccgcgcatctcggtgttacacccggaagggcatcgtatcaccccggaatggctctgggagaaatatggtttgcgtcccgaacaatgggtggattttcgcgccttagcaggcgatccgagcgacaatattccgggagttaaaggtatcggcgagaagacggcgctcaagctccttaaagaatgggggtcgttggagaacttgcttaagaatttagatcaggtcaaaccagagtcagtgcgtgagaagattcttgcacacctcgaagacctcaaattaagccgcgaattgtcccgtgtacgcaccgatttgccgctcgaagttgatttccgtggccgccgcgaacctgactgggagggtcttaaagcgtttttagagcgtcttgaatttggttcgctcttgcatgaattcggccttttagaaagcccgttaccagccgaagaagcaccttggccaccgcccgaaggcgcgtttttaggttaccgtttgagtcgcccggaaccgatgtgggccgaattattggctcttgcagcgtctgcccagggacgtgtgtatcgcgcggaagaccctcatggtgcgctccgcggcctcaaagaagtccgtggactccttgccaaagacttagctgttgttgcattgcgcgaaggtcttgatttacctccgactgatgatccaatgcttcttgcgtacctcttggacccgtcaaacacgacgcccgaaggcgtagcccgtcgttacggcggcgagtggaccgaagatgcaggcgagcgcgcgttattggccgaacgtttgcacgccaatttattaggacgtttgcaaggcgaggaacgtctcctctggctttacgaagaagtggagaaaccattgagtcgcgtgctcgcgcatatggaagctaccggtgtcaaattagacgtggcgtatttggaggcactcagccttgaagttgctgccgaaatgcgccgcttggaggaagaagtattccgtttagcaggccactcctttaaccttaattctcgcgatcagttagaacgtgtgttgttcgatgaacttggtctccctcctatcggcaagacagagaagaccggtaaacgtagcacttcagtggcggttttagaagctcttcgcgaagtccatcccattgtggacaagatcttgcagtaccgcgaactcgcgaaattgaaaggcacctatattgaccgtcttccggcattagtccacccgaaaacgggacgcctccatacccgcttcaaccaaacagccacggcgaccggtcgtttgtcctcctctgatccaaaccttcagaatattccagtacgtaccccattgggccagaagatccgccgcgcgtttgtagctgaggagggttggcgtttagtggccctcgattatagccaaattgaattacgtgtccttgcccatctttctggcgatgagaacctcatccgcgtgtttcaggaaggcaaagacattcacactcaaacggcaagctggatgtttggactgccgtcggaagcgatcgatcctttgatgcgtcgtgcagcgaagaccatcaatttcggtgttctctacggtatgagtgcccaccgtttgtcgcaggaattaggcattccctatgaagaagctgcggcgttcattcagcgctactttcaaagctatcccaaagttaaagcatggatcgagaagactctcgaagaaggccgcacacgtggttacgtagagaccttatttggacgtcgccgctatgttcccgatttaaccgctcgcgtgaaatctgtccgtgaagccgccgaacgcatggcgttcaacatgcctgtacagggcacggcagctgacctcatgaaacttgcaatggtgcgcctttttccacaattgcgtgaagttggtgcccgcatgctcttgcaggtccacgatgaactcttgttagaagcgccaaaagagcgtgcggaagaggtggcagccctcgcgaaagaggttatggaaggcgtgtggcccttagcggtgcctcttgaagtcgaagttggtattggcgaggattggttggctgccaaaggataatga

SEQ ID NO: 868 - protein, 841 aa, synthetic construct
  REGION 1..841: note = Variant of DNA polymerase I from Thermus sp. strain 2.9
MHHHHHHGGSGMLPLFEPKGRVLLVDGHHLAYRNFFALKGLTTSRGEPVQGVYGFAKSLLKALKEDGDVVIVVFDAKAPSFRHEAYEAYKAGRAPTPEDFPRQLALMKELVDLLGLERLEVPGFEADDVLATLAKKAEREGYEVQILTADRDLFQLLSPRISVLHPEGHRITPEWLWEKYGLRPEQWVDFRALAGDPSDNIPGVKGIGEKTALKLLKEWGSLENLLKNLDQVKPESVREKILAHLEDLKLSRELSRVRTDLPLEVDFRGRREPDWEGLKAFLERLEFGSLLHEFGLLESPLPAEEAPWPPPEGAFLGYRLSRPEPMWAELLALAASAQGRVYRAEDPHGALRGLKEVRGLLAKDLAVVALREGLDLPPTDDPMLLAYLLDPSNTTPEGVARRYGGEWTEDAGERALLAERLHANLLGRLQGEERLLWLYEEVEKPLSRVLAHMEATGVKLDVAYLEALSLEVAAEMRRLEEEVFRLAGHSFNLNSRDQLERVLFDELGLPPIGKTEKTGKRSTSVAVLEALREVHPIVDKILQYRELAKLKGTYIDRLPALVHPKTGRLHTRFNQTATATGRLSSSDPNLQNIPVRTPLGQKIRRAFVAEEGWRLVALDYSQIELRVLAHLSGDENLIRVFQEGKDIHTQTASWMFGLPSEAIDPLMRRAAKTINFGVLYGMSAHRLSQELGIPYEEAAAFIQRYFQSYPKVKAWIEKTLEEGRTRGYVETLFGRRRYVPDLTARVKSVREAAERMAFNMPVQGTAADLMKLAMVRLFPQLREVGARMLLQVHDELLLEAPKERAEEVAALAKEVMEGVWPLAVPLEVEVGIGEDWLAAKG

SEQ ID NO: 869 - DNA, 2529 bp, synthetic construct
  misc_feature 1..2529: note = Variant of DNA polymerase I from Thermus sp. strain 2.9
  source 1..2529: mol_type = other DNA
atgcaccatcatcatcatcatggcggtagcggcatgttaccgttgttcgaacctaaaggtcgcgtgcttctggttgatggccatcatctcgcgtatcgtaacttctttgccctgaaaggattaaccaccagccgtggcgagccggtacagggtgtctacggctttgcaaagtcgctcctgaaagctctgaaagaagacggtgatgtggtgattgttgtctttgatgcgaaagcgccaagttttcgccacgaagcgtacgaagcttacaaagccgggcgtgctccaacgccggaagactttcctcgccaattggcgcttatgaaggaattagtggatttgcttggcctcgaacgcttggaagttcccggtttcgaggcagacgacgtattagcgactctcgcaaagaaagccgaacgtgagggctatgaagtccagatcttgacagcagatcgcgatcttttccagcttttatctccgcgcatctcggtgttacacccggaagggcatctgatcaccccggaatggctctgggagaaatatggtttgcgtcccgaacaatgggtggattttcgcgccttagcaggcgatccgagcgacaatattccgggagttaaaggtatcggcgagaagacggcgctcaagctccttaaagaatgggggtcgttggagaacttgcttaagaatttagatcaggtcaaaccagagtcagtgcgtgagaagattcttgcacacctcgaagacctcaaattaagccgcgaattgtcccgtgtacgcaccgatttgccgctcgaagttgatttccgtggccgccgcgaacctgactgggagggtcttaaagcgtttttagagcgtcttgaatttggttcgctcttgcatgaattcggccttttagaaagcccgttaccagccgaagaagcaccttggccaccgcccgaaggcgcgtttttaggttaccgtttgagtcgcccggaaccgatgtgggccgaattattggctcttgcagcgtctgcccagggacgtgtgtatcgcgcggaagaccctcatggtgcgctccgcggcctcaaagaagtccgtggactccttgccaaagacttagctgttgttgcattgcgcgaaggtcttgatttacctccgactgatgatccaatgcttcttgcgtacctcttggacccgtcaaacacgacgcccgaaggcgtagcccgtcgttacggcggcgagtggaccgaagatgcaggcgagcgcgcgttattggccgaacgtttgcacgccaatttattaggacgtttgcaaggcgaggaacgtctcctctggctttacgaagaagtggagaaaccattgagtcgcgtgctcgcgcatatggaagctaccggtgtcaaattagacgtggcgtatttggaggcactcagccttgaagttgctgccgaaatgcgccgcttggaggaagaagtattccgtttagcaggccactcctttaaccttaattctcgcgatcagttagaacgtgtgttgttcgatgaacttggtctccctcctatcggcaagacagagaagaccggtaaacgtagcacttcagcggcggttttagaagctcttcgcgaagtccatcccattgtggacaagatcttgcagtaccgcgaactcgcgaaattgaaaggcacctatattgaccctcttccggcattagtccacccgaaaacgggacgcctccatacccgcttcaaccaaacagccacggcgaccggtcgtttgtcctcctctgatccaaaccttcagaatattccagtacgtaccccattgggccagaagatccgccgcgcgtttgtagctgaggagggttggcgtttagtggccctcgattatagccaaattgaattacgtgtccttgcccatctttctggcgatgagaacctcatccgcgtgtttcaggaaggcaaagacattcacactcaaacggcaagctggatgtttggactgtcgtcggaagcgatcgatcctttgatgcgtcgtgcagcgaagaccatcaatttcggtgttctctacggtatgagtgcccatcgtttgtcgcaggaattaggcattccctatgaagaagctgcggcgttcattcagcgctactttcaaagctatcccaaagttaaagcatggatcgagaagactctcgaagaaggccgcacacgtggttacgtagagaccttatttggacgtcgccgctatgttcccgatttaaacgctcgcgtgaaatctgtccgtgaagccgccgaacgcatggcgttcaacatgcctgtacagggcacggcagctgacctcatgaaacttgcaatggtgcgcctttttccacaattgcgtgaagttggtgcccgcatgctcttgcaggtccacgatgaactcttgttagaagcgccaaaagagcgtgcggaagaggtggcagccctcgcgaaagaggttatggaaggcgtgtggcccttagcggtgcctcttgaagtcgaagttggtattggcgaggattggttggctgccaaaggataatga

SEQ ID NO: 870 - protein, 841 aa, synthetic construct
  REGION 1..841: note = Variant of DNA polymerase I from Thermus sp. strain 2.9
MHHHHHHGGSGMLPLFEPKGRVLLVDGHHLAYRNFFALKGLTTSRGEPVQGVYGFAKSLLKALKEDGDVVIVVFDAKAPSFRHEAYEAYKAGRAPTPEDFPRQLALMKELVDLLGLERLEVPGFEADDVLATLAKKAEREGYEVQILTADRDLFQLLSPRISVLHPEGHLITPEWLWEKYGLRPEQWVDFRALAGDPSDNIPGVKGIGEKTALKLLKEWGSLENLLKNLDQVKPESVREKILAHLEDLKLSRELSRVRTDLPLEVDFRGRREPDWEGLKAFLERLEFGSLLHEFGLLESPLPAEEAPWPPPEGAFLGYRLSRPEPMWAELLALAASAQGRVYRAEDPHGALRGLKEVRGLLAKDLAVVALREGLDLPPTDDPMLLAYLLDPSNTTPEGVARRYGGEWTEDAGERALLAERLHANLLGRLQGEERLLWLYEEVEKPLSRVLAHMEATGVKLDVAYLEALSLEVAAEMRRLEEEVFRLAGHSFNLNSRDQLERVLFDELGLPPIGKTEKTGKRSTSAAVLEALREVHPIVDKILQYRELAKLKGTYIDPLPALVHPKTGRLHTRFNQTATATGRLSSSDPNLQNIPVRTPLGQKIRRAFVAEEGWRLVALDYSQIELRVLAHLSGDENLIRVFQEGKDIHTQTASWMFGLSSEAIDPLMRRAAKTINFGVLYGMSAHRLSQELGIPYEEAAAFIQRYFQSYPKVKAWIEKTLEEGRTRGYVETLFGRRRYVPDLNARVKSVREAAERMAFNMPVQGTAADLMKLAMVRLFPQLREVGARMLLQVHDELLLEAPKERAEEVAALAKEVMEGVWPLAVPLEVEVGIGEDWLAAKG

SEQ ID NO: 871 - DNA, 2529 bp, synthetic construct
  misc_feature 1..2529: note = Variant of DNA polymerase I from Thermus sp. strain 2.9
  source 1..2529: mol_type = other DNA
atgcaccatcatcatcatcatggcggtagcggcatgttaccgttgttcgaacctaaaggtcgcgtgcttctggttgatggccatcatctcgcgtatcgtaacttctttgccctgaaaggattaaccaccagccgtggcgagccggtacagggtgtctacggctttgcaaagtcgctcctgaaagctctgaaagaagacggtgatgtggtgattgttgtctttgatgcgaaagcgccaagttttcgccacgaagcgtacgaagcttacaaagccgggcgtgctccaacgccggaagactttcctcgccaattggcgcttatgaaggaattagtggatttgcttggcctcgaacgcttggaagttcccggtttcgaggcagacgacgtattagcgactctcgcaaagaaagccgaacgtgagggctatgaagtccagatcttgacagcagatcgcgatcttttccagcttttatctccgcgcatctcggtgttacacccggaagggcatcgtatcaccccggaatggctctgggagaaatatggtttgcgtcccgaacaatgggtggattttcgcgccttagccggcgatccgagcgacaatattccgggagttaaaggtatcggcgagaagacggcgctcaagctccttaaagaatgggggtcgttggagaacttgcttaagaatttagatcaggtcaaaccagagtcagtgcgtgagaagattcttgcacacctcgaagacctcaaattaagccgcgaattgtcccgtgtacgcaccgatttgccgctcgaagttgatttccgtggccgccgcgaacctgactgggagggtcttaaagcgtttttagagcgtcttgaatttggttcgctcttgcatgaattcggccttttagaaagcccgttaccagccgaagaagcaccttggccaccgcccgaaggcgcgtttttaggttaccgtttgagtcgcccggaaccgatgtgggccgaattattggctcttgcagcgtctgcccagggacgtgtgtatcgcgcggaagaccctcatggtgcgctccgcggcctcaaagaagtccgtggactccttgccaaagacttagctgttgttgcattgcgcgaaggtcttgatttacctccgactgatgatccaatgcttcttgcgtacctcttggacccgtcaaacacgacgcccgaaggcgtagcccgtcgttacggcggcgagtggaccgaagatgcaggcgagcgcgcgttattggccgaacgtttgcaccagaatttattaggacgtttgcaaggcgaggaacgtctcctctggctttacgaagaagtggagaaaccattgagtcgcgtgctcgcgcatatggaagctaccggtgtcaaattagacgtggcgtatttggaggcactcagccttgaagttgctgccgaactgcgccgcttggaggaagaagtattccgtttagcaggccactcctttaaccttaattctcgcgatcagttagaacgtgtgttgttcgatgaacttggtctccctcctatcggcaagacagagaagaccggtaaacgtagcacttcagcggcggttttagaagctcttcgcgaagtccatcccattgtggacaagatcttgcagtaccgcgaactcgcgaaattgaaaggcacctatattgaccctcttccggcattagtccacccgaaaacgggacgcctccatacccgcttcaaccaaacagccacggcgaccggtcgtttgtcctcctctgatccaaaccttcagaatattccagtacgtaccccattgggccagaagatccgccgcgcgtttgtagctgaggagggttggcgtttagtggccctcgattatagccaaattgaattacgtgtccttgcccatctttctggcgatgagaacctcatccgcgtgtttcaggaaggcaaagacattcacactcaaacggcaagctggatgtttggagtgtcggcggaagcgatcgatcctttgatgcgtcgtgcagcgaagaccatcaatttcggtgttctctacggtatgagtgcccaccgtttgtcgcaggaattaggcattccctatgaagaagctgcggcgttcattcagcgctactttcaaagctatcccaaagttaaagcatggatcgagaagactctcgaagaaggccgcacacgtggttacgtagagaccttatttggacgtcgccgctatgttcccgatttaaccgctcgcgtgaaatctgtccgtgaagccgccgaacgcatggcgttcaacatgcctgtacagggcacggcagctgacctcatgaaacttgcaatggtgcgcctttttccacaattgcgtgaagttggtgcccgcatgctcttgcaggtccacgatgaactcttgttagaagcgccaaaagagcgtgcggaagaggtggcagccctcgcgaaagaggttatggaaggcgtgtggcccttagcggtgcctcttgaagtcgaagttggtattggcgaggattggttggctgccaaaggataatga

SEQ ID NO: 872 - protein, 841 aa, synthetic construct
  REGION 1..841: note = Variant of DNA polymerase I from Thermus sp. strain 2.9
MHHHHHHGGSGMLPLFEPKGRVLLVDGHHLAYRNFFALKGLTTSRGEPVQGVYGFAKSLLKALKEDGDVVIVVFDAKAPSFRHEAYEAYKAGRAPTPEDFPRQLALMKELVDLLGLERLEVPGFEADDVLATLAKKAEREGYEVQILTADRDLFQLLSPRISVLHPEGHRITPEWLWEKYGLRPEQWVDFRALAGDPSDNIPGVKGIGEKTALKLLKEWGSLENLLKNLDQVKPESVREKILAHLEDLKLSRELSRVRTDLPLEVDFRGRREPDWEGLKAFLERLEFGSLLHEFGLLESPLPAEEAPWPPPEGAFLGYRLSRPEPMWAELLALAASAQGRVYRAEDPHGALRGLKEVRGLLAKDLAVVALREGLDLPPTDDPMLLAYLLDPSNTTPEGVARRYGGEWTEDAGERALLAERLHQNLLGRLQGEERLLWLYEEVEKPLSRVLAHMEATGVKLDVAYLEALSLEVAAELRRLEEEVFRLAGHSFNLNSRDQLERVLFDELGLPPIGKTEKTGKRSTSAAVLEALREVHPIVDKILQYRELAKLKGTYIDPLPALVHPKTGRLHTRFNQTATATGRLSSSDPNLQNIPVRTPLGQKIRRAFVAEEGWRLVALDYSQIELRVLAHLSGDENLIRVFQEGKDIHTQTASWMFGVSAEAIDPLMRRAAKTINFGVLYGMSAHRLSQELGIPYEEAAAFIQRYFQSYPKVKAWIEKTLEEGRTRGYVETLFGRRRYVPDLTARVKSVREAAERMAFNMPVQGTAADLMKLAMVRLFPQLREVGARMLLQVHDELLLEAPKERAEEVAALAKEVMEGVWPLAVPLEVEVGIGEDWLAAKG

SEQ ID NO: 873 - DNA, 2529 bp, synthetic construct
  misc_feature 1..2529: note = Variant of DNA polymerase I from Thermus sp. strain 2.9
  source 1..2529: mol_type = other DNA
atgcaccatcatcatcatcatggcggtagcggcatgttaccgttgttcgaacctaaaggtcgcgtgcttctggttgatggccatcatctcgcgtatcgtaacttctttgccctgaaaggattaaccaccagccgtggcgagccggtacagggtgtctacggctttgcaaagtcgctcctgaaagctctgaaagaagacggtgatgtggtgattgttgtctttgatgcgaaagcgccaagttttcgccacgaagcgtacgaagcttacaaagccgggcgtgctccaacgccggaagactttcctcgccaattggcgcttatgaaggaattagtggatttgcttggcctcgaacgcttggaagttcccggtttcgaggcagacgacgtattagcgactctcgcaaagaaagccgaacgtgagggctatgaagtccagatcttgacagcagatcgcgatcttttccagcttttatctccgcgcatctcggtgttacacccggaagggcatctgatcaccccggaatggctctgggagaaatatggtttgcgtcccgaacaatgggtggattttcgcgccttagccggcgatccgagcgacaatattccgggagttaaaggtatcggcgagaagacggcgctcaagctccttaaagaatgggggtcgttggagaacttgcttaagaatttagatcaggtcaaaccagagtcagtgcgtgagaagattcttgcacacctcgaagacctcaaattaagccgcgaattgtcccgtgtacgcaccgatttgccgctcgaagttgatttccgtggccgccgcgaacctgactgggagggtcttaaagcgtttttagagcgtcttgaatttggttcgctcttgcatgaattcggccttttagaaagcccgttaccagccgaagaagcaccttggccaccgcccgaaggcgcgtttttaggttaccgtttgagtcgcccggaaccgatgtgggccgaattattggctcttgcagcgtctgcccagggacgtgtgtatcgcgcggaagaccctcatggtgcgctccgcggcctcaaagaagtccgtggactccttgccaaagacttagctgttgttgcattgcgcgaaggtcttgatttacctccgactgatgatccaatgcttcttgcgtacctcttggacccgtcaaacacgacgcccgaaggcgtagcccgtcgttacggcggcgagtggaccgaagatgcaggcgagcgcgcgttattggccgaacgtttgcacgcaaatttattaggacgtttgcaaggcgaggaacgtctcctctggctttacgaagaagtggagaaaccattgagtcgcgtgctcgcgcatatggaagctaccggtgtcaaattagacgtggcgtatttggaggcactcagccttgaagttgctgccgaactgcgccgcttggaggaagaagtattccgtttagcaggccactcctttaaccttaattctcgcgatcagttagaacgtgtgttgttcgatgaacttggtctccctcctatcggcaagacagagaagaccggtaaacgtagcacttcagcggcggttttagaagctcttcgcgaagtccatcccattgtggacaagatcttgcagtaccgcgaactcgcgaaattgaaaggcacctatattgaccgtcttccggcattagtccacccgaaaacgggacgcctccatacccgcttcaaccaaacagccacggcgaccggtcgtttgtcctcctctgatccaaaccttcagaatattccagtacgtaccccattgggccagaagatccgccgcgcgtttgtagctgaggagggttggcgtttagtggccctcgattatagccaaattgaattacgtgtccttgcccatctttctggcgatgagaacctcatccgcgtgtttcaggaaggcaaagacattcacactcaaacggcaagctggatgtttggagtgccggcggaagcgatcgatcctttgatgcgtcgtgcagcgaagaccatcaatttcggtgttctctacggtatgagtgcccatcgtttgtcgcaggaattaggcattccctatgaagaagctgcggcgttcattcagcgctactttcaaagctatcccaaagttaaagcatggatcgagaagactctcgaagaaggccgcacacgtggttacgtagagaccttatttggacgtcgccgctatgttcccgatttaaacgctcgcgtgaaatctgtccgtgaagccgccgaacgcatggcgttcaacatgcctgtacagggcacggcagctgacctcatgaaacttgcaatggtgcgcctttttccacaattgcgtgaagttggtgcccgcatgctcttgcaggtccacgatgaactcttgttagaagcgccaaaagagcgtgcggaagaggtggcagccctcgcgaaagaggttatggaaggcgtgtggcccttagcggtgcctcttgaagtcgaagttggtattggcgaggattggttggctgccaaaggataatga

SEQ ID NO: 874 - protein, 841 aa, synthetic construct
  REGION 1..841: note = Variant of DNA polymerase I from Thermus sp. strain 2.9
MHHHHHHGGSGMLPLFEPKGRVLLVDGHHLAYRNFFALKGLTTSRGEPVQGVYGFAKSLLKALKEDGDVVIVVFDAKAPSFRHEAYEAYKAGRAPTPEDFPRQLALMKELVDLLGLERLEVPGFEADDVLATLAKKAEREGYEVQILTADRDLFQLLSPRISVLHPEGHLITPEWLWEKYGLRPEQWVDFRALAGDPSDNIPGVKGIGEKTALKLLKEWGSLENLLKNLDQVKPESVREKILAHLEDLKLSRELSRVRTDLPLEVDFRGRREPDWEGLKAFLERLEFGSLLHEFGLLESPLPAEEAPWPPPEGAFLGYRLSRPEPMWAELLALAASAQGRVYRAEDPHGALRGLKEVRGLLAKDLAVVALREGLDLPPTDDPMLLAYLLDPSNTTPEGVARRYGGEWTEDAGERALLAERLHANLLGRLQGEERLLWLYEEVEKPLSRVLAHMEATGVKLDVAYLEALSLEVAAELRRLEEEVFRLAGHSFNLNSRDQLERVLFDELGLPPIGKTEKTGKRSTSAAVLEALREVHPIVDKILQYRELAKLKGTYIDRLPALVHPKTGRLHTRFNQTATATGRLSSSDPNLQNIPVRTPLGQKIRRAFVAEEGWRLVALDYSQIELRVLAHLSGDENLIRVFQEGKDIHTQTASWMFGVPAEAIDPLMRRAAKTINFGVLYGMSAHRLSQELGIPYEEAAAFIQRYFQSYPKVKAWIEKTLEEGRTRGYVETLFGRRRYVPDLNARVKSVREAAERMAFNMPVQGTAADLMKLAMVRLFPQLREVGARMLLQVHDELLLEAPKERAEEVAALAKEVMEGVWPLAVPLEVEVGIGEDWLAAKG

SEQ ID NO: 875 - DNA, 2529 bp, synthetic construct
  misc_feature 1..2529: note = Variant of DNA polymerase I from Thermus sp. strain 2.9
  source 1..2529: mol_type = other DNA
atgcaccatcatcatcatcatggcggtagcggcatgttaccgttgttcgaacctaaaggtcgcgtgcttctggttgatggccatcatctcgcgtatcgtaacttctttgccctgaaaggattaaccaccagccgtggcgagccggtacagggtgtctacggctttgcaaagtcgctcctgaaagctctgaaagaagacggtgatgtggtgattgttgtctttgatgcgaaagcgccaagttttcgccacgaagcgtacgaagcttacaaagccgggcgtgctccaacgccggaagactttcctcgccaattggcgcttatgaaggaattagtggatttgcttggcctcgaacgcttggaagttcccggtttcgaggcagacgacgtattagcgactctcgcaaagaaagccgaacgtgagggctatgaagtccagatcttgacagcagatcgcgatcttttccagcttttatctccgcgcatctcggtgttacacccggaagggcatcgtatcaccccggaatggctctgggagaaatatggtttgcgtcccgaacaatgggtggattttcgcgccttagcaggcgatccgagcgacaatattccgggagttaaaggtatcggcgagaagacggcgctcaagctccttaaagaatgggggtcgttggagaacttgcttaagaatttagatcaggtcaaaccagagtcagtgcgtgagaagattcttgcacacctcgaagacctcaaattaagccgcgaattgtcccgtgtacgcaccgatttgccgctcgaagttgatttccgtggccgccgcgaacctgactgggagggtcttaaagcgtttttagagcgtcttgaatttggttcgctcttgcatgaattcggccttttagaaagcccgttaccagccgaagaagcaccttggccaccgcccgaaggcgcgtttttaggttaccgtttgagtcgcccggaaccgatgtgggccgaattattggctcttgcagcgtctgcccagggacgtgtgtatcgcgcggaagaccctcatggtgcgctccgcggcctcaaagaagtccgtggactccttgccaaagacttagctgttgttgcattgcgcgaaggtcttgatttacctccgactgatgatccaatgcttcttgcgtacctcttggacccgtcaaacacgacgcccgaaggcgtagcccgtcgttacggcggcgagtggaccgaagatgcaggcgagcgcgcgttattggccgaacgtttgcacgccaatttattaggacgtttgcaaggcgaggaacgtctcctctggctttacgaagaagtggagaaaccattgagtcgcgtgctcgcgcatatggaagctaccggtgtcaaattagacgtggcgtatttggaggcactcagccttgaagttgctgccgaaatgcgccgcttggaggaagaagtattccgtttagcaggccactcctttaaccttaattctcgcgatcagttagaacgtgtgttgttcgatgaacttggtctccctctgatcggcaagacagagaagaccggtaaacgtagcacttcagcggcggttttagaagctcttcgcgaagtccatcccattgtggacaagatcttgcagtaccgcgaactcgcgaaattgaaaggcacctatattgaccctcttccggcattagtccacccgaaaacgggacgcctccatacccgcttcaaccaaacagccacggcgaccggtcgtttgtcctcctctgatccaaaccttcagaatattccagtacgtaccccattgggccagaagatccgccgcgcgtttgtagctgaggagggttggcgtttagtggccctcgattatagccaaattgaattacgtgtccttgcccatctttctggcgatgagaacctcatccgcgtgtttcaggaaggcaaagacattcacactcaaacggcaagctggatgtttggattatcagctgaagcgatcgatcctttgatgcgtcgtgcagcgaagaccatcaatttcggtgttctctacggtatgagtgcccatcgtttgtcgcaggaattaggcattccctatgaagaagctgcggcgttcattcagcgctactttcaaagctatcccaaagttaaagcatggatcgagaagactctcgaagaaggccgcacacgtggttacgtagagaccttatttggacgtcgccgctatgttcccgatttaaacgctcgcgtgaaatctgtccgtgaagccgccgaacgcatggcgttcaacatgcctgtacagggcacggcagctgacctcatgaaacttgcaatggtgcgcctttttccacaattgcgtgaagttggtgcccgcatgctcttgcaggtccacgatgaactcttgttagaagcgccaaaagagcgtgcggaagaggtggcagccctcgcgaaagaggttatggaaggcgtgtggcccttagcggtgcctcttgaagtcgaagttggtattggcgaggattggttggctgccaaaggataatga

SEQ ID NO: 876 - protein, 841 aa, synthetic construct
  REGION 1..841: note = Variant of DNA polymerase I from Thermus sp. strain 2.9
MHHHHHHGGSGMLPLFEPKGRVLLVDGHHLAYRNFFALKGLTTSRGEPVQGVYGFAKSLLKALKEDGDVVIVVFDAKAPSFRHEAYEAYKAGRAPTPEDFPRQLALMKELVDLLGLERLEVPGFEADDVLATLAKKAEREGYEVQILTADRDLFQLLSPRISVLHPEGHRITPEWLWEKYGLRPEQWVDFRALAGDPSDNIPGVKGIGEKTALKLLKEWGSLENLLKNLDQVKPESVREKILAHLEDLKLSRELSRVRTDLPLEVDFRGRREPDWEGLKAFLERLEFGSLLHEFGLLESPLPAEEAPWPPPEGAFLGYRLSRPEPMWAELLALAASAQGRVYRAEDPHGALRGLKEVRGLLAKDLAVVALREGLDLPPTDDPMLLAYLLDPSNTTPEGVARRYGGEWTEDAGERALLAERLHANLLGRLQGEERLLWLYEEVEKPLSRVLAHMEATGVKLDVAYLEALSLEVAAEMRRLEEEVFRLAGHSFNLNSRDQLERVLFDELGLPLIGKTEKTGKRSTSAAVLEALREVHPIVDKILQYRELAKLKGTYIDPLPALVHPKTGRLHTRFNQTATATGRLSSSDPNLQNIPVRTPLGQKIRRAFVAEEGWRLVALDYSQIELRVLAHLSGDENLIRVFQEGKDIHTQTASWMFGLSAEAIDPLMRRAAKTINFGVLYGMSAHRLSQELGIPYEEAAAFIQRYFQSYPKVKAWIEKTLEEGRTRGYVETLFGRRRYVPDLNARVKSVREAAERMAFNMPVQGTAADLMKLAMVRLFPQLREVGARMLLQVHDELLLEAPKERAEEVAALAKEVMEGVWPLAVPLEVEVGIGEDWLAAKG

SEQ ID NO: 877 - DNA, 2529 bp, synthetic construct
  misc_feature 1..2529: note = Variant of DNA polymerase I from Thermus sp. strain 2.9
  source 1..2529: mol_type = other DNA
atgcaccatcatcatcatcatggcggtagcggcatgttaccgttgttcgaacctaaaggtcgcgtgcttctggttgatggccatcatctcgcgtatcgtaacttctttgccctgaaaggattaaccaccagccgtggcgagccggtacagggtgtctacggctttgcaaagtcgctcctgaaagctctgaaagaagacggtgatgtggtgattgttgtctttgatgcgaaagcgccaagttttcgccacgaagcgtacgaagcttacaaagccgggcgtgctccaacgccggaagactttcctcgccaattggcgcttatgaaggaattagtggatttgcttggcctcgaacgcttggaagttcccggtttcgaggcagacgacgtattagcgactctcgcaaagaaagccgaacgtgagggctatgaagtccagatcttgacagcagatcgcgatcttttccagcttttatctccgcgcatctcggtgttacacccggaagggcatctgatcaccccggaatggctctgggagaaatatggtttgcgtcccgaacaatgggtggattttcgcgccttagcaggcgatccgagcgacaatattccgggagttaaaggtatcggcgagaagacggcgctcaagctccttaaagaatgggggtcgttggagaacttgcttaagaatttagatcaggtcaaaccagagtcagtgcgtgagaagattcttgcacacctcgaagacctcaaattaagccgcgaattgtcccgtgtacgcaccgatttgccgctcgaagttgatttccgtggccgccgcgaacctgactgggagggtcttaaagcgtttttagagcgtcttgaatttggttcgctcttgcatgaattcggccttttagaaagcccgttaccagccgaagaagcaccttggccaccgcccgaaggcgcgtttttaggttaccgtttgagtcgcccggaaccgatgtgggccgaattattggctcttgcagcgtctgcccagggacgtgtgtatcgcgcggaagaccctcatggtgcgctccgcggcctcaaagaagtccgtggactccttgccaaagacttagctgttgttgcattgcgcgaaggtcttgatttacctccgactgatgatccaatgcttcttgcgtacctcttggacccgtcaaacacgacgcccgaaggcgtagcccgtcgttacggcggcgagtggaccgaagatgcaggcgagcgcgcgttattggccgaacgtttgcaccagaatttattaggacgtttgcaaggcgaggaacgtctcctctggctttacgaagaagtggagaaaccattgagtcgcgtgctcgctcatatggaagctaccggtgtcaaattagacgtggcgtatttggaggcactcagccttgaagttgctgccgaactgcgccgcttggaggaagaagtattccgtttagcaggccactcctttaaccttaattctcgcgatcagttagaacgtgtgttgttcgatgaacttggtctccctcctatcggcaagacagagaagaccggtaaacgtagcacttcagcggcggttttagaagctcttcgcgaagtccatcccattgtggacaagatcttgcagtaccgcgaactcgcgaaattgaaaggcacctatattgaccctcttccggcattagtccacccgaaaacgggacgcctccatacccgcttcaaccaaacagccacggcgaccggtcgtttgtcctcctctgatccaaaccttcagaatattccagtacgtaccccattgggccagaagatccgccgcgcgtttgtagctgaggagggttggcgtttagtggccctcgattatagccaaattgaattacgtgtccttgcccatctttctggcgatgagaacctcatccgcgtgtttcaggaaggcaaagacattcacactcaaacggcaagctggatgtttggattatcagctgaagcgatcgatcctttgatgcgtcgtgcagcgaagaccatcaatttcggtgttctctacggtatgagtgccgctcgtttgtcgcaggaattaggcattccctatgaagaagctgcggcgttcattcagcgctactttcaaagctatcccaaagttaaagcatggatcgagaagactctcgaagaaggccgcacacgtggttacgtagagaccttatttggacgtcgccgctatgttcccgatttaaccgctcgcgtgaaatctgtccgtgaagccgccgaacgcatggcgttcaacatgcctgtacagggcacggcagctgacctcatgaaacttgcaatggtgcgcctttttccacaattgcgtgaagttggtgcccgcatgctcttgcaggtccacgatgaactcttgttagaagcgccaaaagagcgtgcggaagaggtggcagccctcgcgaaagaggttatggaaggcgtgtggcccttagcggtgcctcttgaagtcgaagttggtattggcgaggattggttggctgccaaaggataatga

SEQ ID NO: 878 - protein, 841 aa, synthetic construct
  REGION 1..841: note = Variant of DNA polymerase I from Thermus sp. strain 2.9
MHHHHHHGGSGMLPLFEPKGRVLLVDGHHLAYRNFFALKGLTTSRGEPVQGVYGFAKSLLKALKEDGDVVIVVFDAKAPSFRHEAYEAYKAGRAPTPEDFPRQLALMKELVDLLGLERLEVPGFEADDVLATLAKKAEREGYEVQILTADRDLFQLLSPRISVLHPEGHLITPEWLWEKYGLRPEQWVDFRALAGDPSDNIPGVKGIGEKTALKLLKEWGSLENLLKNLDQVKPESVREKILAHLEDLKLSRELSRVRTDLPLEVDFRGRREPDWEGLKAFLERLEFGSLLHEFGLLESPLPAEEAPWPPPEGAFLGYRLSRPEPMWAELLALAASAQGRVYRAEDPHGALRGLKEVRGLLAKDLAVVALREGLDLPPTDDPMLLAYLLDPSNTTPEGVARRYGGEWTEDAGERALLAERLHQNLLGRLQGEERLLWLYEEVEKPLSRVLAHMEATGVKLDVAYLEALSLEVAAELRRLEEEVFRLAGHSFNLNSRDQLERVLFDELGLPPIGKTEKTGKRSTSAAVLEALREVHPIVDKILQYRELAKLKGTYIDPLPALVHPKTGRLHTRFNQTATATGRLSSSDPNLQNIPVRTPLGQKIRRAFVAEEGWRLVALDYSQIELRVLAHLSGDENLIRVFQEGKDIHTQTASWMFGLSAEAIDPLMRRAAKTINFGVLYGMSAARLSQELGIPYEEAAAFIQRYFQSYPKVKAWIEKTLEEGRTRGYVETLFGRRRYVPDLTARVKSVREAAERMAFNMPVQGTAADLMKLAMVRLFPQLREVGARMLLQVHDELLLEAPKERAEEVAALAKEVMEGVWPLAVPLEVEVGIGEDWLAAKG

SEQ ID NO: 879 - DNA, 2529 bp, synthetic construct
  misc_feature 1..2529: note = Variant of DNA polymerase I from Thermus sp. strain 2.9
  source 1..2529: mol_type = other DNA
atgcaccatcatcatcatcatggcggtagcggcatgttaccgttgttcgaacctaaaggtcgcgtgcttctggttgatggccatcatctcgcgtatcgtaacttctttgccctgaaaggattaaccaccagccgtggcgagccggtacagggtgtctacggctttgcaaagtcgctcctgaaagctctgaaagaagacggtgatgtggtgattgttgtctttgatgcgaaagcgccaagttttcgccacgaagcgtacgaagcttacaaagccgggcgtgctccaacgccggaagactttcctcgccaattggcgcttatgaaggaattagtggatttgcttggcctcgaacgcttggaagttcccggtttcgaggcagacgacgtattagcgactctcgcaaagaaagccgaacgtgagggctatgaagtccagatcttgacagcagatcgcgatcttttccagcttttatctccgcgcatctcggtgttacacccggaagggcatctgatcaccccggaatggctctgggagaaatatggtttgcgtcccgaacaatgggtggattttcgcgccttagtcggcgatccgagcgacaatattccgggagttaaaggtatcggcgagaagacggcgctcaagctccttaaagaatgggggtcgttggagaacttgcttaagaatttagatcaggtcaaaccagagtcagtgcgtgagaagattcttgcacacctcgaagacctcaaattaagccgcgaattgtcccgtgtacgcaccgatttgccgctcgaagttgatttccgtggccgccgcgaacctgactgggagggtcttaaagcgtttttagagcgtcttgaatttggttcgctcttgcatgaattcggccttttagaaagcccgttaccagccgaagaagcaccttggccaccgcccgaaggcgcgtttttaggttaccgtttgagtcgcccggaaccgatgtgggccgaattattggctcttgcagcgtctgcccagggacgtgtgtatcgcgcggaagaccctcatggtgcgctccgcggcctcaaagaagtccgtggactccttgccaaagacttagctgttgttgcattgcgcgaaggtcttgatttacctccgactgatgatccaatgcttcttgcgtacctcttggacccgtcaaacacgacgcccgaaggcgtagcccgtcgttacggcggcgagtggaccgaagatgcaggcgagcgcgcgttattggccgaacgtttgcaccagaatttattaggacgtttgcaaggcgaggaacgtctcctctggctttacgaagaagtggagaaaccattgagtcgcgtgctcgcgcatatggaagctaccggtgtcaaattagacgtggcgtatttggaggcactcagccttgaagttgctgccgaaatgcgccgcttggaggaagaagtattccgtttagcaggccactcctttaaccttaattctcgcgatcagttagaacgtgtgttgttcgatgaacttggtctccctcctatcggcaagacagagaagaccggtaaacgtagcacttcagcggcggttttagaagctcttcgcgaagtccatcccattgtggacaagatcttgcagtaccgcgaactcgcgaaattgaaaggcacctatattgaccgtcttccggcattagtccacccgaaaacgggacgcctccatacccgcttcaaccaaacagccacggcgaccggtcgtttgtcctcctctgatccaaaccttcagaatattccagtacgtaccccattgggccagaagatccgccgcgcgtttgtagctgaggagggttggcgtttagtggccctcgattatagccaaattgaattacgtgtccttgcccatctttctggcgatgagaacctcatccgcgtgtttcaggaaggcaaagacattcacactcaaacggcaagctggatgtttggagtgtcgtcggaagcgatcgatcctttgatgcgtcgtgcagcgaagaccatcaatttcggtgttctctacggtatgagtgccgctcgtttgtcgcaggaattaggcattccctatgaagaagctgcggcgttcattcagcgctactttcaaagctatcccaaagttaaagcatggatcgagaagactctcgaagaaggccgcacacgtggttacgtagagaccttatttggacgtcgccgctatgttcccgatttaaacgctcgcgtgaaatctgtccgtgaagccgccgaacgcatggcgttcaacatgcctgtacagggcacggcagctgacctcatgaaacttgcaatggtgcgcctttttccacaattgcgtgaagttggtgcccgcatgctcttgcaggtccacgatgaactcttgttagaagcgccaaaagagcgtgcggaagaggtggcagccctcgcgaaagaggttatggaaggcgtgtggcccttagcggtgcctcttgaagtcgaagttggtattggcgaggattggttggctgccaaaggataatga

SEQ ID NO: 880 - protein, 841 aa, synthetic construct
  REGION 1..841: note = Variant of DNA polymerase I from Thermus sp. strain 2.9
MHHHHHHGGSGMLPLFEPKGRVLLVDGHHLAYRNFFALKGLTTSRGEPVQGVYGFAKSLLKALKEDGDVVIVVFDAKAPSFRHEAYEAYKAGRAPTPEDFPRQLALMKELVDLLGLERLEVPGFEADDVLATLAKKAEREGYEVQILTADRDLFQLLSPRISVLHPEGHLITPEWLWEKYGLRPEQWVDFRALVGDPSDNIPGVKGIGEKTALKLLKEWGSLENLLKNLDQVKPESVREKILAHLEDLKLSRELSRVRTDLPLEVDFRGRREPDWEGLKAFLERLEFGSLLHEFGLLESPLPAEEAPWPPPEGAFLGYRLSRPEPMWAELLALAASAQGRVYRAEDPHGALRGLKEVRGLLAKDLAVVALREGLDLPPTDDPMLLAYLLDPSNTTPEGVARRYGGEWTEDAGERALLAERLHQNLLGRLQGEERLLWLYEEVEKPLSRVLAHMEATGVKLDVAYLEALSLEVAAEMRRLEEEVFRLAGHSFNLNSRDQLERVLFDELGLPPIGKTEKTGKRSTSAAVLEALREVHPIVDKILQYRELAKLKGTYIDRLPALVHPKTGRLHTRFNQTATATGRLSSSDPNLQNIPVRTPLGQKIRRAFVAEEGWRLVALDYSQIELRVLAHLSGDENLIRVFQEGKDIHTQTASWMFGVSSEAIDPLMRRAAKTINFGVLYGMSAARLSQELGIPYEEAAAFIQRYFQSYPKVKAWIEKTLEEGRTRGYVETLFGRRRYVPDLNARVKSVREAAERMAFNMPVQGTAADLMKLAMVRLFPQLREVGARMLLQVHDELLLEAPKERAEEVAALAKEVMEGVWPLAVPLEVEVGIGEDWLAAKG

SEQ ID NO: 881 - DNA, 2529 bp, synthetic construct
  misc_feature 1..2529: note = Variant of DNA polymerase I from Thermus sp. strain 2.9
  source 1..2529: mol_type = other DNA
atgcaccatcatcatcatcatggcggtagcggcatgttaccgttgttcgaacctaaaggtcgcgtgcttctggttgatggccatcatctcgcgtatcgtaacttctttgccctgaaaggattaaccaccagccgtggcgagccggtacagggtgtctacggctttgcaaagtcgctcctgaaagctctgaaagaagacggtgatgtggtgattgttgtctttgatgcgaaagcgccaagttttcgccacgaagcgtacgaagcttacaaagccgggcgtgctccaacgccggaagactttcctcgccaattggcgcttatgaaggaattagtggatttgcttggcctcgaacgcttggaagttcccggtttcgaggcagacgacgtattagcgactctcgcaaagaaagccgaacgtgagggctatgaagtccagatcttgacagcagatcgcgatcttttccagcttttatctccgcgcatctcggtgttacacccggaagggcatcgtatcaccccggaatggctctgggagaaatatggtttgcgtcccgaacaatgggtggattttcgcgccttagcaggcgatccgagcgacaatattccgggagttaaaggtatcggcgagaagacggcgctcaagctccttaaagaatgggggtcgttggagaacttgcttaagaatttagatcaggtcaaaccagagtcagtgcgtgagaagattcttgcacacctcgaagacctcaaattaagccgcgaattgtcccgtgtacgcaccgatttgccgctcgaagttgatttccgtggccgccgcgaacctgactgggagggtcttaaagcgtttttagagcgtcttgaatttggttcgctcttgcatgaattcggccttttagaaagcccgttaccagccgaagaagcaccttggccaccgcccgaaggcgcgtttttaggttaccgtttgagtcgcccggaaccgatgtgggccgaattattggctcttgcagcgtctgcccagggacgtgtgtatcgcgcggaagaccctcatggtgcgctccgcggcctcaaagaagtccgtggactccttgccaaagacttagctgttgttgcattgcgcgaaggtcttgatttacctccgactgatgatccaatgcttcttgcgtacctcttggacccgtcaaacacgacgcccgaaggcgtagcccgtcgttacggcggcgagtggaccgaagatgcaggcgagcgcgcgttattggccgaacgtttgcacgcaaatttattaggacgtttgcaaggcgaggaacgtctcctctggctttacgaagaagtggagaaaccattgagtcgcgtgctcgctcatatggaagctaccggtgtcaaattagacgtggcgtatttggaggcactcagccttgaagttgctgccgaaatgcgccgcttggaggaagaagtattccgtttagcaggccactcctttaaccttaattctcgcgatcagttagaacgtgtgttgttcgatgaacttggtctccctcctatcggcaagacagagaagaccggtaaacgtagcacttcagcggcggttttagaagctcttcgcgaagtccatcccattgtggacaagatcttgcagtaccgcgaactcgcgaaattgaaaggcacctatattgaccctcttccggcattagtccacccgaaaacgggacgcctccatacccgcttcaaccaaacagccacggcgaccggtcgtttgtcctcctctgatccaaaccttcagaatattccagtacgtaccccattgggccagaagatccgccgcgcgtttgtagctgaggagggttggcgtttagtggccctcgattatagccaaattgaattacgtgtccttgcccatctttctggcgatgagaacctcatccgcgtgtttcaggaaggcaaagacattcacactcaaacggcaagctggatgtttggagtgccggcggaagcgatcgatcctttgatgcgtcgtgcagcgaagaccatcaatttcggtgttctctacggtatgagtgccgctcgtttgtcgcaggaattaggcattccctatgaagaagctgcggcgttcattcagcgctactttcaaagctatcccaaagttaaagcatggatcgagaagactctcgaagaaggccgcacacgtggttacgtagagaccttatttggacgtcgccgctatgttcccgatttaaacgctcgcgtgaaatctgtccgtgaagccgccgaacgcatggcgttcaacatgcctgtacagggcacggcagctgacctcatgaaacttgcaatggtgcgcctttttccacaattgcgtgaagttggtgcccgcatgctcttgcaggtccacgatgaactcttgttagaagcgccaaaagagcgtgcggaagaggtggcagccctcgcgaaagaggttatggaaggcgtgtggcccttagcggtgcctcttgaagtcgaagttggtattggcgaggattggttggctgccaaaggataatga

SEQ ID NO: 882 - protein, 841 aa, synthetic construct
  REGION 1..841: note = Variant of DNA polymerase I from Thermus sp. strain 2.9
MHHHHHHGGSGMLPLFEPKGRVLLVDGHHLAYRNFFALKGLTTSRGEPVQGVYGFAKSLLKALKEDGDVVIVVFDAKAPSFRHEAYEAYKAGRAPTPEDFPRQLALMKELVDLLGLERLEVPGFEADDVLATLAKKAEREGYEVQILTADRDLFQLLSPRISVLHPEGHRITPEWLWEKYGLRPEQWVDFRALAGDPSDNIPGVKGIGEKTALKLLKEWGSLENLLKNLDQVKPESVREKILAHLEDLKLSRELSRVRTDLPLEVDFRGRREPDWEGLKAFLERLEFGSLLHEFGLLESPLPAEEAPWPPPEGAFLGYRLSRPEPMWAELLALAASAQGRVYRAEDPHGALRGLKEVRGLLAKDLAVVALREGLDLPPTDDPMLLAYLLDPSNTTPEGVARRYGGEWTEDAGERALLAERLHANLLGRLQGEERLLWLYEEVEKPLSRVLAHMEATGVKLDVAYLEALSLEVAAEMRRLEEEVFRLAGHSFNLNSRDQLERVLFDELGLPPIGKTEKTGKRSTSAAVLEALREVHPIVDKILQYRELAKLKGTYIDPLPALVHPKTGRLHTRFNQTATATGRLSSSDPNLQNIPVRTPLGQKIRRAFVAEEGWRLVALDYSQIELRVLAHLSGDENLIRVFQEGKDIHTQTASWMFGVPAEAIDPLMRRAAKTINFGVLYGMSAARLSQELGIPYEEAAAFIQRYFQSYPKVKAWIEKTLEEGRTRGYVETLFGRRRYVPDLNARVKSVREAAERMAFNMPVQGTAADLMKLAMVRLFPQLREVGARMLLQVHDELLLEAPKERAEEVAALAKEVMEGVWPLAVPLEVEVGIGEDWLAAKG

SEQ ID NO: 883 - DNA, 2529 bp, synthetic construct
  misc_feature 1..2529: note = Variant of DNA polymerase I from Thermus sp. strain 2.9
  source 1..2529: mol_type = other DNA
atgcaccatcatcatcatcatggcggtagcggcatgttaccgttgttcgaacctaaaggtcgcgtgcttctggttgatggccatcatctcgcgtatcgtaacttctttgccctgaaaggattaaccaccagccgtggcgagccggtacagggtgtctacggctttgcaaagtcgctcctgaaagctctgaaagaagacggtgatgtggtgattgttgtctttgatgcgaaagcgccaagttttcgccacgaagcgtacgaagcttacaaagccgggcgtgctccaacgccggaagactttcctcgccaattggcgcttatgaaggaattagtggatttgcttggcctcgaacgcttggaagttcccggtttcgaggcagacgacgtattagcgactctcgcaaagaaagccgaacgtgagggctatgaagtccagatcttgacagcagatcgcgatcttttccagcttttatctccgcgcatctcggtgttacacccggaagggcatctgatcaccccggaatggctctgggagaaatatggtttgcgtcccgaacaatgggtggattttcgcgccttagcaggcgatccgagcgacaatattccgggagttaaaggtatcggcgagaagacggcgctcaagctccttaaagaatgggggtcgttggagaacttgcttaagaatttagatcaggtcaaaccagagtcagtgcgtgagaagattcttgcacacctcgaagacctcaaattaagccgcgaattgtcccgtgtacgcaccgatttgccgctcgaagttgatttccgtggccgccgcgaacctgactgggagggtcttaaagcgtttttagagcgtcttgaatttggttcgctcttgcatgaattcggccttttagaaagcccgttaccagccgaagaagcaccttggccaccgcccgaaggcgcgtttttaggttaccgtttgagtcgcccggaaccgatgtgggccgaattattggctcttgcagcgtctgcccagggacgtgtgtatcgcgcggaagaccctcatggtgcgctccgcggcctcaaagaagtccgtggactccttgccaaagacttagctgttgttgcattgcgcgaaggtcttgatttacctccgactgatgatccaatgcttcttgcgtacctcttggacccgtcaaacacgacgcccgaaggcgtagcccgtcgttacggcggcgagtggaccgaagatgcaggcgagcgcgcgttattggccgaacgtttgcaccagaatttattaggacgtttgcaaggcgaggaacgtctcctctggctttacgaagaagtggagaaaccattgagtcgcgtgctcgcgcatatggaagctaccggtgtcaaattagacgtggcgtatttggaggcactcagccttgaagttgctgccgaactgcgccgcttggaggaagaagtattccgtttagcaggccactcctttaaccttaattctcgcgatcagttagaacgtgtgttgttcgatgaacttggtctccctcctatcggcaagacagagaagaccggtaaacgtagcacttcagcggcggttttagaagctcttcgcgaagtccatcccattgtggacaagatcttgcagtaccgcgaactcgcgaaattgaaaggcacctatattgaccctcttccggcattagtccacccgaaaacgggacgcctccatacccgcttcaaccaaacagccacggcgaccggtcgtttgtcctcctctgatccaaaccttcagaatattccagtacgtaccccattgggccagaagatccgccgcgcgtttgtagctgaggagggttggcgtttagtggccctcgattatagccaaattgaattacgtgtccttgcccatctttctggcgatgagaacctcatccgcgtgtttcaggaaggcaaagacattcacactcaaacggcaagctggatgtttggagtgccgtcggaagcgatcgatcctttgatgcgtcgtgcagcgaagaccatcaatttcggtgttctctacggtatgagtgccgctcgtttgtcgcaggaattaggcattccctatgaagaagctgcggcgttcattcagcgctactttcaaagctatcccaaagttaaagcatggatcgagaagactctcgaagaaggccgcacacgtggttacgtagagaccttatttggacgtcgccgctatgttcccgatttaaccgctcgcgtgaaatctgtccgtgaagccgccgaacgcatggcgttcaacatgcctgtacagggcacggcagctgacctcatgaaacttgcaatggtgcgcctttttccacaattgcgtgaagttggtgcccgcatgctcttgcaggtccacgatgaactcttgttagaagcgccaaaagagcgtgcggaagaggtggcagccctcgcgaaagaggttatggaaggcgtgtggcccttagcggtgcctcttgaagtcgaagttggtattggcgaggattggttggctgccaaaggataatga

SEQ ID NO: 884 - protein, 841 aa, synthetic construct
  REGION 1..841: note = Variant of DNA polymerase I from Thermus sp. strain 2.9
MHHHHHHGGSGMLPLFEPKGRVLLVDGHHLAYRNFFALKGLTTSRGEPVQGVYGFAKSLLKALKEDGDVVIVVFDAKAPSFRHEAYEAYKAGRAPTPEDFPRQLALMKELVDLLGLERLEVPGFEADDVLATLAKKAEREGYEVQILTADRDLFQLLSPRISVLHPEGHLITPEWLWEKYGLRPEQWVDFRALAGDPSDNIPGVKGIGEKTALKLLKEWGSLENLLKNLDQVKPESVREKILAHLEDLKLSRELSRVRTDLPLEVDFRGRREPDWEGLKAFLERLEFGSLLHEFGLLESPLPAEEAPWPPPEGAFLGYRLSRPEPMWAELLALAASAQGRVYRAEDPHGALRGLKEVRGLLAKDLAVVALREGLDLPPTDDPMLLAYLLDPSNTTPEGVARRYGGEWTEDAGERALLAERLHQNLLGRLQGEERLLWLYEEVEKPLSRVLAHMEATGVKLDVAYLEALSLEVAAELRRLEEEVFRLAGHSFNLNSRDQLERVLFDELGLPPIGKTEKTGKRSTSAAVLEALREVHPIVDKILQYRELAKLKGTYIDPLPALVHPKTGRLHTRFNQTATATGRLSSSDPNLQNIPVRTPLGQKIRRAFVAEEGWRLVALDYSQIELRVLAHLSGDENLIRVFQEGKDIHTQTASWMFGVPSEAIDPLMRRAAKTINFGVLYGMSAARLSQELGIPYEEAAAFIQRYFQSYPKVKAWIEKTLEEGRTRGYVETLFGRRRYVPDLTARVKSVREAAERMAFNMPVQGTAADLMKLAMVRLFPQLREVGARMLLQVHDELLLEAPKERAEEVAALAKEVMEGVWPLAVPLEVEVGIGEDWLAAKG

SEQ ID NO: 885 - DNA, 2529 bp, synthetic construct
  misc_feature 1..2529: note = Variant of DNA polymerase I from Thermus sp. strain 2.9
  source 1..2529: mol_type = other DNA
atgcaccatcatcatcatcatggcggtagcggcatgttaccgttgttcgaacctaaaggtcgcgtgcttctggttgatggccatcatctcgcgtatcgtaacttctttgccctgaaaggattaaccaccagccgtggcgagccggtacagggtgtctacggctttgcaaagtcgctcctgaaagctctgaaagaagacggtgatgtggtgattgttgtctttgatgcgaaagcgccaagttttcgccacgaagcgtacgaagcttacaaagccgggcgtgctccaacgccggaagactttcctcgccaattggcgcttatgaaggaattagtggatttgcttggcctcgaacgcttggaagttcccggtttcgaggcagacgacgtattagcgactctcgcaaagaaagccgaacgtgagggctatgaagtccagatcttgacagcagatcgcgatcttttccagcttttatctccgcgcatctcggtgttacacccggaagggcatcgtatcaccccggaatggctctgggagaaatatggtttgcgtcccgaacaatgggtggattttcgcgccttagcaggcgatccgagcgacaatattccgggagttaaaggtatcggcgagaagacggcgctcaagctccttaaagaatgggggtcgttggagaacttgcttaagaatttagatcaggtcaaaccagagtcagtgcgtgagaagattcttgcacacctcgaagacctcaaattaagccgcgaattgtcccgtgtacgcaccgatttgccgctcgaagttgatttccgtggccgccgcgaacctgactgggagggtcttaaagcgtttttagagcgtcttgaatttggttcgctcttgcatgaattcggccttttagaaagcccgttaccagccgaagaagcaccttggccaccgcccgaaggcgcgtttttaggttaccgtttgagtcgcccggaaccgatgtgggccgaattattggctcttgcagcgtctgcccagggacgtgtgtatcgcgcggaagaccctcatggtgcgctccgcggcctcaaagaagtccgtggactccttgccaaagacttagctgttgttgcattgcgcgaaggtcttgatttacctccgactgatgatccaatgcttcttgcgtacctcttggacccgtcaaacacgacgcccgaaggcgtagcccgtcgttacggcggcgagtggaccgaagatgcaggcgagcgcgcgttattggccgaacgtttgcaccagaatttattaggacgtttgcaaggcgaggaacgtctcctctggctttacgaagaagtggagaaaccattgagtcgcgtgctcgctcatatggaagctaccggtgtcaaattagacgtggcgtatttggaggcactcagccttgaagttgctgccgaactgcgccgcttggaggaagaagtattccgtttagcaggccactcctttaaccttaattctcgcgatcagttagaacgtgtgttgttcgatgaacttggtctccctcctatcggcaagacagagaagaccggtaaacgtagcacttcagcggcggttttagaagctcttcgcgaagtccatcccattgtggacaagatcttgcagtaccgcgaactcgcgaaattgaaaggcacctatattgaccgtcttccggcattagtccacccgaaaacgggacgcctccatacccgcttcaaccaaacagccacggcgaccggtcgtttgtcctcctctgatccaaaccttcagaatattccagtacgtaccccattgggccagaagatccgccgcgcgtttgtagctgaggagggttggcgtttagtggccctcgattatagccaaattgaattacgtgtccttgcccatctttctggcgatgagaacctcatccgcgtgtttcaggaaggcaaagacattcacactcaaacggcaagctggatgtttggactgccgtcggaagcgatcgatcctttgatgcgtcgtgcagcgaagaccatcaatttcggtgttctctacggtatgagtgcccatcgtttgtcgcaggaattaggcattccctatgaagaagctgcggcgttcattcagcgctactttcaaagctatcccaaagttaaagcatggatcgagaagactctcgaagaaggccgcacacgtggttacgtagagaccttatttggacgtcgccgctatgttcccgatttaaccgctcgcgtgaaatctgtccgtgaagccgccgaacgcatggcgttcaacatgcctgtacagggcacggcagctgacctcatgaaacttgcaatggtgcgcctttttccacaattgcgtgaagttggtgcccgcatgctcttgcaggtccacgatgaactcttgttagaagcgccaaaagagcgtgcggaagaggtggcagccctcgcgaaagaggttatggaaggcgtgtggcccttagcggtgcctcttgaagtcgaagttggtattggcgaggattggttggctgccaaaggataatga

SEQ ID NO: 886 - protein, 841 aa, synthetic construct
  REGION 1..841: note = Variant of DNA polymerase I from Thermus sp. strain 2.9
MHHHHHHGGSGMLPLFEPKGRVLLVDGHHLAYRNFFALKGLTTSRGEPVQGVYGFAKSLLKALKEDGDVVIVVFDAKAPSFRHEAYEAYKAGRAPTPEDFPRQLALMKELVDLLGLERLEVPGFEADDVLATLAKKAEREGYEVQILTADRDLFQLLSPRISVLHPEGHRITPEWLWEKYGLRPEQWVDFRALAGDPSDNIPGVKGIGEKTALKLLKEWGSLENLLKNLDQVKPESVREKILAHLEDLKLSRELSRVRTDLPLEVDFRGRREPDWEGLKAFLERLEFGSLLHEFGLLESPLPAEEAPWPPPEGAFLGYRLSRPEPMWAELLALAASAQGRVYRAEDPHGALRGLKEVRGLLAKDLAVVALREGLDLPPTDDPMLLAYLLDPSNTTPEGVARRYGGEWTEDAGERALLAERLHQNLLGRLQGEERLLWLYEEVEKPLSRVLAHMEATGVKLDVAYLEALSLEVAAELRRLEEEVFRLAGHSFNLNSRDQLERVLFDELGLPPIGKTEKTGKRSTSAAVLEALREVHPIVDKILQYRELAKLKGTYIDRLPALVHPKTGRLHTRFNQTATATGRLSSSDPNLQNIPVRTPLGQKIRRAFVAEEGWRLVALDYSQIELRVLAHLSGDENLIRVFQEGKDIHTQTASWMFGLPSEAIDPLMRRAAKTINFGVLYGMSAHRLSQELGIPYEEAAAFIQRYFQSYPKVKAWIEKTLEEGRTRGYVETLFGRRRYVPDLTARVKSVREAAERMAFNMPVQGTAADLMKLAMVRLFPQLREVGARMLLQVHDELLLEAPKERAEEVAALAKEVMEGVWPLAVPLEVEVGIGEDWLAAKG

SEQ ID NO: 887 - DNA, 2529 bp, synthetic construct
  misc_feature 1..2529: note = Variant of DNA polymerase I from Thermus sp. strain 2.9
  source 1..2529: mol_type = other DNA
atgcaccatcatcatcatcatggcggtagcggcatgttaccgttgttcgaacctaaaggtcgcgtgcttctggttgatggccatcatctcgcgtatcgtaacttctttgccctgaaaggattaaccaccagccgtggcgagccggtacagggtgtctacggctttgcaaagtcgctcctgaaagctctgaaagaagacggtgatgtggtgattgttgtctttgatgcgaaagcgccaagttttcgccacgaagcgtacgaagcttacaaagccgggcgtgctccaacgccggaagactttcctcgccaattggcgcttatgaaggaattagtggatttgcttggcctcgaacgcttggaagttcccggtttcgaggcagacgacgtattagcgactctcgcaaagaaagccgaacgtgagggctatgaagtccagatcttgacagcagatcgcgatcttttccagcttttatctccgcgcatctcggtgttacacccggaagggcatcgtatcaccccggaatggctctgggagaaatatggtttgcgtcccgaacaatgggtggattttcgcgccttagccggcgatccgagcgacaatattccgggagttaaaggtatcggcgagaagacggcgctcaagctccttaaagaatgggggtcgttggagaacttgcttaagaatttagatcaggtcaaaccagagtcagtgcgtgagaagattcttgcacacctcgaagacctcaaattaagccgcgaattgtcccgtgtacgcaccgatttgccgctcgaagttgatttccgtggccgccgcgaacctgactgggagggtcttaaagcgtttttagagcgtcttgaatttggttcgctcttgcatgaattcggccttttagaaagcccgttaccagccgaagaagcaccttggccaccgcccgaaggcgcgtttttaggttaccgtttgagtcgcccggaaccgatgtgggccgaattattggctcttgcagcgtctgcccagggacgtgtgtatcgcgcggaagaccctcatggtgcgctccgcggcctcaaagaagtccgtggactccttgccaaagacttagctgttgttgcattgcgcgaaggtcttgatttacctccgactgatgatccaatgcttcttgcgtacctcttggacccgtcaaacacgacgcccgaaggcgtagcccgtcgttacggcggcgagtggaccgaagatgcaggcgagcgcgcgttattggccgaacgtttgcaccagaatttattaggacgtttgcaaggcgaggaacgtctcctctggctttacgaagaagtggagaaaccattgagtcgcgtgctccaccatatggaagctaccggtgtcaaattagacgtggcgtatttggaggcactcagccttgaagttgctgccgaaatgcgccgcttggaggaagaagtattccgtttagcaggccactcctttaaccttaattctcgcgatcagttagaacgtgtgttgttcgatgaacttggtctccctcctatcggcaagacagagaagaccggtaaacgtagcacttcagcggcggttttagaagctcttcgcgaagtccatcccattgtggacaagatcttgcagtaccgcgaactcgcgaaattgaaaggcacctatattgaccgtcttccggcattagtccacccgaaaacgggacgcctccatacccgcttcaaccaaacagccacggcgaccggtcgtttgtcctcctctgatccaaaccttcagaatattccagtacgtaccccattgggccagaagatccgccgcgcgtttgtagctgaggagggttggcgtttagtggccctcgattatagccaaattgaattacgtgtccttgcccatctttctggcgatgagaacctcatccgcgtgtttcaggaaggcaaagacattcacactcaaacggcaagctggatgtttggagtgtcggcggaagcgatcgatcctttgatgcgtcgtgcagcgaagaccatcaatttcggtgttctctacggtatgagtgccgctcgtttgtcgcaggaattaggcattccctatgaagaagctgcggcgttcattcagcgctactttcaaagctatcccaaagttaaagcatggatcgagaagactctcgaagaaggccgcacacgtggttacgtagagaccttatttggacgtcgccgctatgttcccgatttaaacgctcgcgtgaaatctgtccgtgaagccgccgaacgcatggcgttcaacatgcctgtacagggcacggcagctgacctcatgaaacttgcaatggtgcgcctttttccacaattgcgtgaagttggtgcccgcatgctcttgcaggtccacgatgaactcttgttagaagcgccaaaagagcgtgcggaagaggtggcagccctcgcgaaagaggttatggaaggcgtgtggcccttagcggtgcctcttgaagtcgaagttggtattggcgaggattggttggctgccaaaggataatga

SEQ ID NO: 888 - protein, 841 aa, synthetic construct
  REGION 1..841: note = Variant of DNA polymerase I from Thermus sp. strain 2.9
MHHHHHHGGSGMLPLFEPKGRVLLVDGHHLAYRNFFALKGLTTSRGEPVQGVYGFAKSLLKALKEDGDVVIVVFDAKAPSFRHEAYEAYKAGRAPTPEDFPRQLALMKELVDLLGLERLEVPGFEADDVLATLAKKAEREGYEVQILTADRDLFQLLSPRISVLHPEGHRITPEWLWEKYGLRPEQWVDFRALAGDPSDNIPGVKGIGEKTALKLLKEWGSLENLLKNLDQVKPESVREKILAHLEDLKLSRELSRVRTDLPLEVDFRGRREPDWEGLKAFLERLEFGSLLHEFGLLESPLPAEEAPWPPPEGAFLGYRLSRPEPMWAELLALAASAQGRVYRAEDPHGALRGLKEVRGLLAKDLAVVALREGLDLPPTDDPMLLAYLLDPSNTTPEGVARRYGGEWTEDAGERALLAERLHQNLLGRLQGEERLLWLYEEVEKPLSRVLHHMEATGVKLDVAYLEALSLEVAAEMRRLEEEVFRLAGHSFNLNSRDQLERVLFDELGLPPIGKTEKTGKRSTSAAVLEALREVHPIVDKILQYRELAKLKGTYIDRLPALVHPKTGRLHTRFNQTATATGRLSSSDPNLQNIPVRTPLGQKIRRAFVAEEGWRLVALDYSQIELRVLAHLSGDENLIRVFQEGKDIHTQTASWMFGVSAEAIDPLMRRAAKTINFGVLYGMSAARLSQELGIPYEEAAAFIQRYFQSYPKVKAWIEKTLEEGRTRGYVETLFGRRRYVPDLNARVKSVREAAERMAFNMPVQGTAADLMKLAMVRLFPQLREVGARMLLQVHDELLLEAPKERAEEVAALAKEVMEGVWPLAVPLEVEVGIGEDWLAAKG

SEQ ID NO: 889 - DNA, 2529 bp, synthetic construct
  misc_feature 1..2529: note = Variant of DNA polymerase I from Thermus sp. strain 2.9
  source 1..2529: mol_type = other DNA
atgcaccatcatcatcatcatggcggtagcggcatgttaccgttgttcgaacctaaaggtcgcgtgcttctggttgatggccatcatctcgcgtatcgtaacttctttgccctgaaaggattaaccaccagccgtggcgagccggtacagggtgtctacggctttgcaaagtcgctcctgaaagctctgaaagaagacggtgatgtggtgattgttgtctttgatgcgaaagcgccaagttttcgccacgaagcgtacgaagcttacaaagccgggcgtgctccaacgccggaagactttcctcgccaattggcgcttatgaaggaattagtggatttgcttggcctcgaacgcttggaagttcccggtttcgaggcagacgacgtattagcgactctcgcaaagaaagccgaacgtgagggctatgaagtccagatcttgacagcagatcgcgatcttttccagcttttatctccgcgcatctcggtgttacacccggaagggcatcgtatcaccccggaatggctctgggagaaatatggtttgcgtcccgaacaatgggtggattttcgcgccttagcaggcgatccgagcgacaatattccgggagttaaaggtatcggcgagaagacggcgctcaagctccttaaagaatgggggtcgttggagaacttgcttaagaatttagatcaggtcaaaccagagtcagtgcgtgagaagattcttgcacacctcgaagacctcaaattaagccgcgaattgtcccgtgtacgcaccgatttgccgctcgaagttgatttccgtggccgccgcgaacctgactgggagggtcttaaagcgtttttagagcgtcttgaatttggttcgctcttgcatgaattcggccttttagaaagcccgttaccagccgaagaagcaccttggccaccgcccgaaggcgcgtttttaggttaccgtttgagtcgcccggaaccgatgtgggccgaattattggctcttgcagcgtctgcccagggacgtgtgtatcgcgcggaagaccctcatggtgcgctccgcggcctcaaagaagtccgtggactccttgccaaagacttagctgttgttgcattgcgcgaaggtcttgatttacctccgactgatgatccaatgcttcttgcgtacctcttggacccgtcaaacacgacgcccgaaggcgtagcccgtcgttacggcggcgagtggaccgaagatgcaggcgagcgcgcgttattggccgaacgtttgcaccagaatttattaggacgtttgcaaggcgaggaacgtctcctctggctttacgaagaagtggagaaaccattgagtcgcgtgctccaccatatggaagctaccggtgtcaaattagacgtggcgtatttggaggcactcagccttgaagttgctgccgaaatgcgccgcttggaggaagaagtattccgtttagcaggccactcctttaaccttaattctcgcgatcagttagaacgtgtgttgttcgatgaacttggtctccctcctatcggcaagacagagaagaccggtaaacgtagcacttcagcggcggttttagaagctcttcgcgaagtccatcccattgtggacaagatcttgcagtaccgcgaactcgcgaaattgaaaggcacctatattgaccgtcttccggcattagtccacccgaaaacgggacgcctccatacccgcttcaaccaaacagccacggcgaccggtcgtttgtcctcctctgatccaaaccttcagaatattccagtacgtaccccattgggccagaagatccgccgcgcgtttgtagctgaggagggttggcgtttagtggccctcgattatagccaaattgaattacgtgtccttgcccatctttctggcgatgagaacctcatccgcgtgtttcaggaaggcaaagacattcacactcaaacggcaagctggatgtttggagtgtcggcggaagcgatcgatcctttgatgcgtcgtgcagcgaagaccatcaatttcggtgttctctacggtatgagtgcccaccgtttgtcgcaggaattaggcattccctatgaagaagctgcggcgttcattcagcgctactttcaaagctatcccaaagttaaagcatggatcgagaagactctcgaagaaggccgcacacgtggttacgtagagaccttatttggacgtcgccgctatgttcccgatttaaacgctcgcgtgaaatctgtccgtgaagccgccgaacgcatggcgttcaacatgcctgtacagggcacggcagctgacctcatgaaacttgcaatggtgcgcctttttccacaattgcgtgaagttggtgcccgcatgctcttgcaggtccacgatgaactcttgttagaagcgccaaaagagcgtgcggaagaggtggcagccctcgcgaaagaggttatggaaggcgtgtggcccttagcggtgcctcttgaagtcgaagttggtattggcgaggattggttggctgccaaaggataatga

SEQ ID NO: 890 - protein, 841 aa, synthetic construct
  REGION 1..841: note = Variant of DNA polymerase I from Thermus sp. strain 2.9
MHHHHHHGGSGMLPLFEPKGRVLLVDGHHLAYRNFFALKGLTTSRGEPVQGVYGFAKSLLKALKEDGDVVIVVFDAKAPSFRHEAYEAYKAGRAPTPEDFPRQLALMKELVDLLGLERLEVPGFEADDVLATLAKKAEREGYEVQILTADRDLFQLLSPRISVLHPEGHRITPEWLWEKYGLRPEQWVDFRALAGDPSDNIPGVKGIGEKTALKLLKEWGSLENLLKNLDQVKPESVREKILAHLEDLKLSRELSRVRTDLPLEVDFRGRREPDWEGLKAFLERLEFGSLLHEFGLLESPLPAEEAPWPPPEGAFLGYRLSRPEPMWAELLALAASAQGRVYRAEDPHGALRGLKEVRGLLAKDLAVVALREGLDLPPTDDPMLLAYLLDPSNTTPEGVARRYGGEWTEDAGERALLAERLHQNLLGRLQGEERLLWLYEEVEKPLSRVLHHMEATGVKLDVAYLEALSLEVAAEMRRLEEEVFRLAGHSFNLNSRDQLERVLFDELGLPPIGKTEKTGKRSTSAAVLEALREVHPIVDKILQYRELAKLKGTYIDRLPALVHPKTGRLHTRFNQTATATGRLSSSDPNLQNIPVRTPLGQKIRRAFVAEEGWRLVALDYSQIELRVLAHLSGDENLIRVFQEGKDIHTQTASWMFGVSAEAIDPLMRRAAKTINFGVLYGMSAHRLSQELGIPYEEAAAFIQRYFQSYPKVKAWIEKTLEEGRTRGYVETLFGRRRYVPDLNARVKSVREAAERMAFNMPVQGTAADLMKLAMVRLFPQLREVGARMLLQVHDELLLEAPKERAEEVAALAKEVMEGVWPLAVPLEVEVGIGEDWLAAKG

SEQ ID NO: 891 - DNA, 2529 bp, synthetic construct
  misc_feature 1..2529: note = Variant of DNA polymerase I from Thermus sp. strain 2.9
  source 1..2529: mol_type = other DNA
atgcaccatcatcatcatcatggcggtagcggcatgttaccgttgttcgaacctaaaggtcgcgtgcttctggttgatggccatcatctcgcgtatcgtaacttctttgccctgaaaggattaaccaccagccgtggcgagccggtacagggtgtctacggctttgcaaagtcgctcctgaaagctctgaaagaagacggtgatgtggtgattgttgtctttgatgcgaaagcgccaagttttcgccacgaagcgtacgaagcttacaaagccgggcgtgctccaacgccggaagactttcctcgccaattggcgcttatgaaggaattagtggatttgcttggcctcgaacgcttggaagttgctggtttcgaggcagacgacgtattagcgactctcgcaaagaaagccgaacgtgagggctatgaagtccagatcttgacagcagatcgcgatcttttccagcttttatctccgcgcatctcggtgttacacccggaagggcatcgtatcaccccggaatggctctgggagaaatatggtttgcgtcccgaacaatgggtggattttcgcgccttagcaggcgatccgagcgacaatattccgggagttaaaggtatcggcgagaagacggcgctcaagctccttaaagaatgggggtcgttggagaacttgcttaagaatttagatcaggtcaaaccagagtcagtgcgtgagaagattcttgcacacctcgaagacctcaaattaagccgcgaattgtcccgtgtacgcaccgatttgccgctcgaagttgatttccgtggccgccgcgaacctgactgggagggtcttaaagcgtttttagagcgtcttgaatttggttcgctcttgcatgaattcggccttttagaaagcccgttaccagccgaagaagcaccttggccaccgcccgaaggcgcgtttttaggttaccgtttgagtcgcccggaaccgatgtgggccgaattattggctcttgcagcgtctgcccagggacgtgtgtatcgcgcggaagaccctcatggtgcgctccgcggcctcaaagaagtccgtggactccttgccaaagacttagctgttgttgcattgcgcgaaggtcttgatttacctccgactgatgatccaatgcttcttgcgtacctcttggacccgtcaaacacgacgcccgaaggcgtagcccgtcgttacggcggcgagtggaccgaagatgcaggcgagcgcgcgttattggccgaacgtttgcacgccaatttattaggacgtttgcaaggcgaggaacgtctcctctggctttacgaagaagtggagaaaccattgagtcgcgtgctcgcgcatatggaagctaccggtgtcaaattagacgtggcgtatttggaggcactcagccttgaagttgctgccgaaatgcgccgcttggaggaagaagtattccgtttagcaggccactcctttaaccttaattctcgcgatcagttagaacgtgtgttgttcgatgaacttggtctccctcctatcggcaagacagagaagaccggtaaacgtagcacttcagcggcggttttagaagctcttcgcgaagtccatcccattgtggacaagatcttgcagtaccgcgaactcgcgaaattgaaaggcacctatattgaccctcttccggcattagtccacccgaaaacgggacgcctccatacccgcttcaaccaaacagccacggcgaccggtcgtttgtcctcctctgatccaaaccttcagaatattccagtacgtaccccattgggccagaagatccgccgcgcgtttgtagctgaggagggttggcgtttagtggccctcgattatagccaaattgaattacgtgtccttgcccatctttctggcgatgagaacctcatccgcgtgtttcaggaaggcaaagacattcacactcaaacggcaagctggatgtttggattatcagctgaagcgatcgatcctttgatgcgtcgtgcagcgaagaccatcaatttcggtgttctctacggtatgagtgcccatcgtttgtcgcaggaattaggcattccctatgaagaagctgcggcgttcattcagcgctactttcaaagctatcccaaagttaaagcatggatcgagaagactctcgaagaaggccgcacacgtggttacgtagagaccttatttggacgtcgccgctatgttcccgatttaaacgctcgcgtgaaatctgtccgtgaagccgccgaacgcatggcgttcaacatgcctgtacagggcacggcagctgacctcatgaaacttgcaatggtgcgcctttttccacaattgcgtgaagttggtgcccgcatgctcttgcaggtccacgatgaactcttgttagaagcgccaaaagagcgtgcggaagaggtggcagccctcgcgaaagaggttatggaaggcgtgtggcccttagcggtgcctcttgaagtcgaagttggtattggcgaggattggttggctgccaaaggataatga

SEQ ID NO: 892 - protein, 841 aa, synthetic construct
  REGION 1..841: note = Variant of DNA polymerase I from Thermus sp. strain 2.9
MHHHHHHGGSGMLPLFEPKGRVLLVDGHHLAYRNFFALKGLTTSRGEPVQGVYGFAKSLLKALKEDGDVVIVVFDAKAPSFRHEAYEAYKAGRAPTPEDFPRQLALMKELVDLLGLERLEVAGFEADDVLATLAKKAEREGYEVQILTADRDLFQLLSPRISVLHPEGHRITPEWLWEKYGLRPEQWVDFRALAGDPSDNIPGVKGIGEKTALKLLKEWGSLENLLKNLDQVKPESVREKILAHLEDLKLSRELSRVRTDLPLEVDFRGRREPDWEGLKAFLERLEFGSLLHEFGLLESPLPAEEAPWPPPEGAFLGYRLSRPEPMWAELLALAASAQGRVYRAEDPHGALRGLKEVRGLLAKDLAVVALREGLDLPPTDDPMLLAYLLDPSNTTPEGVARRYGGEWTEDAGERALLAERLHANLLGRLQGEERLLWLYEEVEKPLSRVLAHMEATGVKLDVAYLEALSLEVAAEMRRLEEEVFRLAGHSFNLNSRDQLERVLFDELGLPPIGKTEKTGKRSTSAAVLEALREVHPIVDKILQYRELAKLKGTYIDPLPALVHPKTGRLHTRFNQTATATGRLSSSDPNLQNIPVRTPLGQKIRRAFVAEEGWRLVALDYSQIELRVLAHLSGDENLIRVFQEGKDIHTQTASWMFGLSAEAIDPLMRRAAKTINFGVLYGMSAHRLSQELGIPYEEAAAFIQRYFQSYPKVKAWIEKTLEEGRTRGYVETLFGRRRYVPDLNARVKSVREAAERMAFNMPVQGTAADLMKLAMVRLFPQLREVGARMLLQVHDELLLEAPKERAEEVAALAKEVMEGVWPLAVPLEVEVGIGEDWLAAKG

SEQ ID NO: 893 - DNA, 2529 bp, synthetic construct
  misc_feature 1..2529: note = Variant of DNA polymerase I from Thermus sp. strain 2.9
  source 1..2529: mol_type = other DNA
atgcaccatcatcatcatcatggcggtagcggcatgttaccgttgttcgaacctaaaggtcgcgtgcttctggttgatggccatcatctcgcgtatcgtaacttctttgccctgaaaggattaaccaccagccgtggcgagccggtacagggtgtctacggctttgcaaagtcgctcctgaaagctctgaaagaagacggtgatgtggtgattgttgtctttgatgcgaaagcgccaagttttcgccacgaagcgtacgaagcttacaaagccgggcgtgctccaacgccggaagactttcctcgccaattggcgcttatgaaggaattagtggatttgcttggcctcgaacgcttggaagttcccggtttcgaggcagacgacgtattagcgactctcgcaaagaaagccgaacgtgagggctatgaagtccagatcttgacagcagatcgcgatcttttccagcttttatctccgcgcatctcggtgttacacccggaagggcatcgtatcaccccggaatggctctgggagaaatatggtttgcgtcccgaacaatgggtggattttcgcgccttagcaggcgatccgagcgacaatattccgggagttaaaggtatcggcgagaagacggcgctcaagctccttaaagaatgggggtcgttggagaacttgcttaagaatttagatcaggtcaaaccagagtcagtgcgtgagaagattcttgcacacctcgaagacctcaaattaagccgcgaattgtcccgtgtacgcaccgatttgccgctcgaagttgatttccgtggccgccgcgaacctgactgggagggtcttaaagcgtttttagagcgtcttgaatttggttcgctcttgcatgaattcggccttttagaaagcccgttaccagccgaagaagcaccttggccaccgcccgaaggcgcgtttttaggttaccgtttgagtcgcccggaaccgatgtgggccgaattattggctcttgcagcgtctgcccagggacgtgtgtatcgcgcggaagaccctcatggtgcgctccgcggcctcaaagaagtccgtggactccttgccaaagacttagctgttgttgcattgcgcgaaggtcttgatttacctccgactgatgatccaatgcttcttgcgtacctcttggacccgtcaaacacgacgcccgaaggcgtagcccgtcgttacggcggcgagtggaccgaagatgcaggcgagcgcgcgttattggccgaacgtttgcacgccaatttattaggacgtttgcaaggcgaggaacgtctcctctggctttacgaagaagtggagaaaccattgagtcgcgtgctcgcgcatatggaagctaccggtgtcaaattagacgtggcgtatttggaggcactcagccttgaagttgctgccgaaatgcgccgcttggaggaagaagtattccgtttagcaggccactcctttaaccttaattctcgcgatcagttagaacgtgtgttgttcgatgaacttggtctccctcctatcggcaagacagagaagaccggtaaacgtagcacttcagcggcggttttagaagctcttcgcgaagtccatcccattgtggacaagatcttgcagtaccgcgaactcgcgaaattgaaaggcacctatattgaccctcttccggcattagtccacccgaaaacgggacgcctccatacccgcttcaaccaaacagccacggcgaccggtcgtttgtcctcctctgatccaaaccttcagaatattccagtacgtaccccattgggccagaagatccgccgcgcgtttgtagctgaggagggttggcgtttagtggccctcgattatagccaaattgaattacgtgtccttgcccatctttctggcgatgagaacctcatccgcgtgtttcaggaaggcaaagacattcacactcaaacggcaagctggatgtttggattatcagctgaagcgatcgatcctttgatgcgtcgtgcagcgaagaccatcaatttcggtgttctctacggtatgagtgccgctcgtttgtcgcaggaattaggcattccctatgaagaagctgcggcgttcattcagcgctactttcaaagctatcccaaagttaaagcatggatcgagaagactctcgaagaaggccgcacacgtggttacgtagagaccttatttggacgtcgccgctatgttcccgatttaaacgctcgcgtgaaatctgtccgtgaagccgccgaacgcatggcgttcaacatgcctgtacagggcacggcagctgacctcatgaaacttgcaatggtgcgcctttttccacaattgcgtgaagttggtgcccgcatgctcttgcaggtccacgatgaactcttgttagaagcgccaaaagagcgtgcggaagaggtggcagccctcgcgaaagaggttatggaaggcgtgtggcccttagcggtgcctcttgaagtcgaagttggtattggcgaggattggttggctgccaaaggataatga

SEQ ID NO: 894 - protein, 841 aa, synthetic construct
  REGION 1..841: note = Variant of DNA polymerase I from Thermus sp. strain 2.9
MHHHHHHGGSGMLPLFEPKGRVLLVDGHHLAYRNFFALKGLTTSRGEPVQGVYGFAKSLLKALKEDGDVVIVVFDAKAPSFRHEAYEAYKAGRAPTPEDFPRQLALMKELVDLLGLERLEVPGFEADDVLATLAKKAEREGYEVQILTADRDLFQLLSPRISVLHPEGHRITPEWLWEKYGLRPEQWVDFRALAGDPSDNIPGVKGIGEKTALKLLKEWGSLENLLKNLDQVKPESVREKILAHLEDLKLSRELSRVRTDLPLEVDFRGRREPDWEGLKAFLERLEFGSLLHEFGLLESPLPAEEAPWPPPEGAFLGYRLSRPEPMWAELLALAASAQGRVYRAEDPHGALRGLKEVRGLLAKDLAVVALREGLDLPPTDDPMLLAYLLDPSNTTPEGVARRYGGEWTEDAGERALLAERLHANLLGRLQGEERLLWLYEEVEKPLSRVLAHMEATGVKLDVAYLEALSLEVAAEMRRLEEEVFRLAGHSFNLNSRDQLERVLFDELGLPPIGKTEKTGKRSTSAAVLEALREVHPIVDKILQYRELAKLKGTYIDPLPALVHPKTGRLHTRFNQTATATGRLSSSDPNLQNIPVRTPLGQKIRRAFVAEEGWRLVALDYSQIELRVLAHLSGDENLIRVFQEGKDIHTQTASWMFGLSAEAIDPLMRRAAKTINFGVLYGMSAARLSQELGIPYEEAAAFIQRYFQSYPKVKAWIEKTLEEGRTRGYVETLFGRRRYVPDLNARVKSVREAAERMAFNMPVQGTAADLMKLAMVRLFPQLREVGARMLLQVHDELLLEAPKERAEEVAALAKEVMEGVWPLAVPLEVEVGIGEDWLAAKG

SEQ ID NO: 895 - DNA, 2529 bp, synthetic construct
  misc_feature 1..2529: note = Variant of DNA polymerase I from Thermus sp. strain 2.9
  source 1..2529: mol_type = other DNA
atgcaccatcatcatcatcatggcggtagcggcatgttaccgttgttcgaacctaaaggtcgcgtgcttctggttgatggccatcatctcgcgtatcgtaacttctttgccctgaaaggattaaccaccagccgtggcgagccggtacagggtgtctacggctttgcaaagtcgctcctgaaagctctgaaagaagacggtgatgtggtgattgttgtctttgatgcgaaagcgccaagttttcgccacgaagcgtacgaagcttacaaagccgggcgtgctccaacgccggaagactttcctcgccaattggcgcttatgaaggaattagtggatttgcttggcctcgaacgcttggaagttcccggtttcgaggcagacgacgtattagcgactctcgcaaagaaagccgaacgtgagggctatgaagtccagatcttgacagcagatcgcgatcttttccagcttttatctccgcgcatctcggtgttacacccggaagggcatctgatcaccccggaatggctctgggagaaatatggtttgcgtcccgaacaatgggtggattttcgcgccttagcaggcgatccgagcgacaatattccgggagttaaaggtatcggcgagaagacggcgctcaagctccttaaagaatgggggtcgttggagaacttgcttaagaatttagatcaggtcaaaccagagtcagtgcgtgagaagattcttgcacacctcgaagacctcaaattaagccgcgaattgtcccgtgtacgcaccgatttgccgctcgaagttgatttccgtggccgccgcgaacctgactgggagggtcttaaagcgtttttagagcgtcttgaatttggttcgctcttgcatgaattcggccttttagaaagcccgttaccagccgaagaagcaccttggccaccgcccgaaggcgcgtttttaggttaccgtttgagtcgcccggaaccgatgtgggccgaattattggctcttgcagcgtctgcccagggacgtgtgtatcgcgcggaagaccctcatggtgcgctccgcggcctcaaagaagtccgtggactccttgccaaagacttagctgttgttgcattgcgcgaaggtcttgatttacctccgactgatgatccaatgcttcttgcgtacctcttggacccgtcaaacacgacgcccgaaggcgtagcccgtcgttacggcggcgagtggaccgaagatgcaggcgagcgcgcgttattggccgaacgtttgcaccagaatttattaggacgtttgcaaggcgaggaacgtctcctctggctttacgaagaagtggagaaaccattgagtcgcgtgctcgctcatatggaagctaccggtgtcaaattagacgtggcgtatttggaggcactcagccttgaagttgctgccgaactgcgccgcttggaggaagaagtattccgtttagcaggccactcctttaaccttaattctcgcgatcagttagaacgtgtgttgttcgatgaacttggtctccctcctatcggcaagacagagaagaccggtaaacgtagcacttcagcggcggttttagaagctcttcgcgaagtccatcccattgtggacaagatcttgcagtaccgcgaactcgcgaaattgaaaggcacctatattgaccctcttccggcattagtccacccgaaaacgggacgcctccatacccgcttcaaccaaacagccacggcgaccggtcgtttgtcctcctctgatccaaaccttcagaatattccagtacgtaccccattgggccagaagatccgccgcgcgtttgtagctgaggagggttggcgtttagtggccctcgattatagccaaattgaattacgtgtccttgcccatctttctggcgatgagaacctcatccgcgtgtttcaggaaggcaaagacattcacactcaaacggcaagctggatgtttggagtgccggcggaagcgatcgatcctttgatgcgtcgtgcagcgaagaccatcaatttcggtgttctctacggtatgagtgcccaccgtttgtcgcaggaattaggcattccctatgaagaagctgcggcgttcattcagcgctactttcaaagctatcccaaagttaaagcatggatcgagaagactctcgaagaaggccgcacacgtggttacgtagagaccttatttggacgtcgccgctatgttcccgatttaaacgctcgcgtgaaatctgtccgtgaagccgccgaacgcatggcgttcaacatgcctgtacagggcacggcagctgacctcatgaaacttgcaatggtgcgcctttttccacaattgcgtgaagttggtgcccgcatgctcttgcaggtccacgatgaactcttgttagaagcgccaaaagagcgtgcggaagaggtggcagccctcgcgaaagaggttatggaaggcgtgtggcccttagcggtgcctcttgaagtcgaagttggtattggcgaggattggttggctgccaaaggataatga

SEQ ID NO: 896 - protein, 841 aa, synthetic construct
  REGION 1..841: note = Variant of DNA polymerase I from Thermus sp. strain 2.9
MHHHHHHGGSGMLPLFEPKGRVLLVDGHHLAYRNFFALKGLTTSRGEPVQGVYGFAKSLLKALKEDGDVVIVVFDAKAPSFRHEAYEAYKAGRAPTPEDFPRQLALMKELVDLLGLERLEVPGFEADDVLATLAKKAEREGYEVQILTADRDLFQLLSPRISVLHPEGHLITPEWLWEKYGLRPEQWVDFRALAGDPSDNIPGVKGIGEKTALKLLKEWGSLENLLKNLDQVKPESVREKILAHLEDLKLSRELSRVRTDLPLEVDFRGRREPDWEGLKAFLERLEFGSLLHEFGLLESPLPAEEAPWPPPEGAFLGYRLSRPEPMWAELLALAASAQGRVYRAEDPHGALRGLKEVRGLLAKDLAVVALREGLDLPPTDDPMLLAYLLDPSNTTPEGVARRYGGEWTEDAGERALLAERLHQNLLGRLQGEERLLWLYEEVEKPLSRVLAHMEATGVKLDVAYLEALSLEVAAELRRLEEEVFRLAGHSFNLNSRDQLERVLFDELGLPPIGKTEKTGKRSTSAAVLEALREVHPIVDKILQYRELAKLKGTYIDPLPALVHPKTGRLHTRFNQTATATGRLSSSDPNLQNIPVRTPLGQKIRRAFVAEEGWRLVALDYSQIELRVLAHLSGDENLIRVFQEGKDIHTQTASWMFGVPAEAIDPLMRRAAKTINFGVLYGMSAHRLSQELGIPYEEAAAFIQRYFQSYPKVKAWIEKTLEEGRTRGYVETLFGRRRYVPDLNARVKSVREAAERMAFNMPVQGTAADLMKLAMVRLFPQLREVGARMLLQVHDELLLEAPKERAEEVAALAKEVMEGVWPLAVPLEVEVGIGEDWLAAKG

SEQ ID NO: 897 - DNA, 2529 bp, synthetic construct
  misc_feature 1..2529: note = Variant of DNA polymerase I from Thermus sp. strain 2.9
  source 1..2529: mol_type = other DNA
atgcaccatcatcatcatcatggcggtagcggcatgttaccgttgttcgaacctaaaggtcgcgtgcttctggttgatggccatcatctcgcgtatcgtaacttctttgccctgaaaggattaaccaccagccgtggcgagccggtacagggtgtctacggctttgcaaagtcgctcctgaaagctctgaaagaagacggtgatgtggtgattgttgtctttgatgcgaaagcgccaagttttcgccacgaagcgtacgaagcttacaaagccgggcgtgctccaacgccggaagactttcctcgccaattggcgcttatgaaggaattagtggatttgcttggcctcgaacgcttggaagttcccggtttcgaggcagacgacgtattagcgactctcgcaaagaaagccgaacgtgagggctatgaagtccagatcttgacagcagatcgcgatcttttccagcttttatctccgcgcatctcggtgttacacccggaagggcatcgtatcaccccggaatggctctgggagaaatatggtttgcgtcccgaacaatgggtggattttcgcgccttagtcggcgatccgagcgacaatattccgggagttaaaggtatcggcgagaagacggcgctcaagctccttaaagaatgggggtcgttggagaacttgcttaagaatttagatcaggtcaaaccagagtcagtgcgtgagaagattcttgcacacctcgaagacctcaaattaagccgcgaattgtcccgtgtacgcaccgatttgccgctcgaagttgatttccgtggccgccgcgaacctgactgggagggtcttaaagcgtttttagagcgtcttgaatttggttcgctcttgcatgaattcggccttttagaaagcccgttaccagccgaagaagcaccttggccaccgcccgaaggcgcgtttttaggttaccgtttgagtcgcccggaaccgatgtgggccgaattattggctcttgcagcgtctgcccagggacgtgtgtatcgcgcggaagaccctcatggtgcgctccgcggcctcaaagaagtccgtggactccttgccaaagacttagctgttgttgcattgcgcgaaggtcttgatttacctccgactgatgatccaatgcttcttgcgtacctcttggacccgtcaaacacgacgcccgaaggcgtagcccgtcgttacggcggcgagtggaccgaagatgcaggcgagcgcgcgttattggccgaacgtttgcacgcaaatttattaggacgtttgcaaggcgaggaacgtctcctctggctttacgaagaagtggagaaaccattgagtcgcgtgctccaccatatggaagctaccggtgtcaaattagacgtggcgtatttggaggcactcagccttgaagttgctgccgaactgcgccgcttggaggaagaagtattccgtttagcaggccactcctttaaccttaattctcgcgatcagttagaacgtgtgttgttcgatgaacttggtctccctcctatcggcaagacagagaagaccggtaaacgtagcacttcagcggcggttttagaagctcttcgcgaagtccatcccattgtggacaagatcttgcagtaccgcgaactcgcgaaattgaaaggcacctatattgaccgtcttccggcattagtccacccgaaaacgggacgcctccatacccgcttcaaccaaacagccacggcgaccggtcgtttgtcctcctctgatccaaaccttcagaatattccagtacgtaccccattgggccagaagatccgccgcgcgtttgtagctgaggagggttggcgtttagtggccctcgattatagccaaattgaattacgtgtccttgcccatctttctggcgatgagaacctcatccgcgtgtttcaggaaggcaaagacattcacactcaaacggcaagctggatgtttggagtgccgtcggaagcgatcgatcctttgatgcgtcgtgcagcgaagaccatcaatttcggtgttctctacggtatgagtgcccaccgtttgtcgcaggaattaggcattccctatgaagaagctgcggcgttcattcagcgctactttcaaagctatcccaaagttaaagcatggatcgagaagactctcgaagaaggccgcacacgtggttacgtagagaccttatttggacgtcgccgctatgttcccgatttaaccgctcgcgtgaaatctgtccgtgaagccgccgaacgcatggcgttcaacatgcctgtacagggcacggcagctgacctcatgaaacttgcaatggtgcgcctttttccacaattgcgtgaagttggtgcccgcatgctcttgcaggtccacgatgaactcttgttagaagcgccaaaagagcgtgcggaagaggtggcagccctcgcgaaagaggttatggaaggcgtgtggcccttagcggtgcctcttgaagtcgaagttggtattggcgaggattggttggctgccaaaggataatga

SEQ ID NO: 898 - protein, 841 aa, synthetic construct
  REGION 1..841: note = Variant of DNA polymerase I from Thermus sp. strain 2.9
MHHHHHHGGSGMLPLFEPKGRVLLVDGHHLAYRNFFALKGLTTSRGEPVQGVYGFAKSLLKALKEDGDVVIVVFDAKAPSFRHEAYEAYKAGRAPTPEDFPRQLALMKELVDLLGLERLEVPGFEADDVLATLAKKAEREGYEVQILTADRDLFQLLSPRISVLHPEGHRITPEWLWEKYGLRPEQWVDFRALVGDPSDNIPGVKGIGEKTALKLLKEWGSLENLLKNLDQVKPESVREKILAHLEDLKLSRELSRVRTDLPLEVDFRGRREPDWEGLKAFLERLEFGSLLHEFGLLESPLPAEEAPWPPPEGAFLGYRLSRPEPMWAELLALAASAQGRVYRAEDPHGALRGLKEVRGLLAKDLAVVALREGLDLPPTDDPMLLAYLLDPSNTTPEGVARRYGGEWTEDAGERALLAERLHANLLGRLQGEERLLWLYEEVEKPLSRVLHHMEATGVKLDVAYLEALSLEVAAELRRLEEEVFRLAGHSFNLNSRDQLERVLFDELGLPPIGKTEKTGKRSTSAAVLEALREVHPIVDKILQYRELAKLKGTYIDRLPALVHPKTGRLHTRFNQTATATGRLSSSDPNLQNIPVRTPLGQKIRRAFVAEEGWRLVALDYSQIELRVLAHLSGDENLIRVFQEGKDIHTQTASWMFGVPSEAIDPLMRRAAKTINFGVLYGMSAHRLSQELGIPYEEAAAFIQRYFQSYPKVKAWIEKTLEEGRTRGYVETLFGRRRYVPDLTARVKSVREAAERMAFNMPVQGTAADLMKLAMVRLFPQLREVGARMLLQVHDELLLEAPKERAEEVAALAKEVMEGVWPLAVPLEVEVGIGEDWLAAKG

SEQ ID NO: 899 - DNA, 2529 bp, synthetic construct
  misc_feature 1..2529: note = Variant of DNA polymerase I from Thermus sp. strain 2.9
  source 1..2529: mol_type = other DNA
atgcaccatcatcatcatcatggcggtagcggcatgttaccgttgttcgaacctaaaggtcgcgtgcttctggttgatggccatcatctcgcgtatcgtaacttctttgccctgaaaggattaaccaccagccgtggcgagccggtacagggtgtctacggctttgcaaagtcgctcctgaaagctctgaaagaagacggtgatgtggtgattgttgtctttgatgcgaaagcgccaagttttcgccacgaagcgtacgaagcttacaaagccgggcgtgctccaacgccggaagactttcctcgccaattggcgcttatgaaggaattagtggatttgcttggcctcgaacgcttggaagttcccggtttcgaggcagacgacgtattagcgactctcgcaaagaaagccgaacgtgagggctatgaagtccagatcttgacagcagatcgcgatcttttccagcttttatctccgcgcatctcggtgttacacccggaagggcatcgtatcaccccggaatggctctgggagaaatatggtttgcgtcccgaacaatgggtggattttcgcgccttagtcggcgatccgagcgacaatattccgggagttaaaggtatcggcgagaagacggcgctcaagctccttaaagaatgggggtcgttggagaacttgcttaagaatttagatcaggtcaaaccagagtcagtgcgtgagaagattcttgcacacctcgaagacctcaaattaagccgcgaattgtcccgtgtacgcaccgatttgccgctcgaagttgatttccgtggccgccgcgaacctgactgggagggtcttaaagcgtttttagagcgtcttgaatttggttcgctcttgcatgaattcggccttttagaaagcccgttaccagccgaagaagcaccttggccaccgcccgaaggcgcgtttttaggttaccgtttgagtcgcccggaaccgatgtgggccgaattattggctcttgcagcgtctgcccagggacgtgtgtatcgcgcggaagaccctcatggtgcgctccgcggcctcaaagaagtccgtggactccttgccaaagacttagctgttgttgcattgcgcgaaggtcttgatttacctccgactgatgatccaatgcttcttgcgtacctcttggacccgtcaaacacgacgcccgaaggcgtagcccgtcgttacggcggcgagtggaccgaagatgcaggcgagcgcgcgttattggccgaacgtttgcaccagaatttattaggacgtttgcaaggcgaggaacgtctcctctggctttacgaagaagtggagaaaccattgagtcgcgtgctccaccatatggaagctaccggtgtcaaattagacgtggcgtatttggaggcactcagccttgaagttgctgccgaaatgcgccgcttggaggaagaagtattccgtttagcaggccactcctttaaccttaattctcgcgatcagttagaacgtgtgttgttcgatgaacttggtctccctcctatcggcaagacagagaagaccggtaaacgtagcacttcagcggcggttttagaagctcttcgcgaagtccatcccattgtggacaagatcttgcagtaccgcgaactcgcgaaattgaaaggcacctatattgaccgtcttccggcattagtccacccgaaaacgggacgcctccatacccgcttcaaccaaacagccacggcgaccggtcgtttgtcctcctctgatccaaaccttcagaatattccagtacgtaccccattgggccagaagatccgccgcgcgtttgtagctgaggagggttggcgtttagtggccctcgattatagccaaattgaattacgtgtccttgcccatctttctggcgatgagaacctcatccgcgtgtttcaggaaggcaaagacattcacactcaaacggcaagctggatgtttggagtgccggcggaagcgatcgatcctttgatgcgtcgtgcagcgaagaccatcaatttcggtgttctctacggtatgagtgcccatcgtttgtcgcaggaattaggcattccctatgaagaagctgcggcgttcattcagcgctactttcaaagctatcccaaagttaaagcatggatcgagaagactctcgaagaaggccgcacacgtggttacgtagagaccttatttggacgtcgccgctatgttcccgatttaaccgctcgcgtgaaatctgtccgtgaagccgccgaacgcatggcgttcaacatgcctgtacagggcacggcagctgacctcatgaaacttgcaatggtgcgcctttttccacaattgcgtgaagttggtgcccgcatgctcttgcaggtccacgatgaactcttgttagaagcgccaaaagagcgtgcggaagaggtggcagccctcgcgaaagaggttatggaaggcgtgtggcccttagcggtgcctcttgaagtcgaagttggtattggcgaggattggttggctgccaaaggataatga

SEQ ID NO: 900 - protein, 841 aa, synthetic construct
  REGION 1..841: note = Variant of DNA polymerase I from Thermus sp. strain 2.9
MHHHHHHGGSGMLPLFEPKGRVLLVDGHHLAYRNFFALKGLTTSRGEPVQGVYGFAKSLLKALKEDGDVVIVVFDAKAPSFRHEAYEAYKAGRAPTPEDFPRQLALMKELVDLLGLERLEVPGFEADDVLATLAKKAEREGYEVQILTADRDLFQLLSPRISVLHPEGHRITPEWLWEKYGLRPEQWVDFRALVGDPSDNIPGVKGIGEKTALKLLKEWGSLENLLKNLDQVKPESVREKILAHLEDLKLSRELSRVRTDLPLEVDFRGRREPDWEGLKAFLERLEFGSLLHEFGLLESPLPAEEAPWPPPEGAFLGYRLSRPEPMWAELLALAASAQGRVYRAEDPHGALRGLKEVRGLLAKDLAVVALREGLDLPPTDDPMLLAYLLDPSNTTPEGVARRYGGEWTEDAGERALLAERLHQNLLGRLQGEERLLWLYEEVEKPLSRVLHHMEATGVKLDVAYLEALSLEVAAEMRRLEEEVFRLAGHSFNLNSRDQLERVLFDELGLPPIGKTEKTGKRSTSAAVLEALREVHPIVDKILQYRELAKLKGTYIDRLPALVHPKTGRLHTRFNQTATATGRLSSSDPNLQNIPVRTPLGQKIRRAFVAEEGWRLVALDYSQIELRVLAHLSGDENLIRVFQEGKDIHTQTASWMFGVPAEAIDPLMRRAAKTINFGVLYGMSAHRLSQELGIPYEEAAAFIQRYFQSYPKVKAWIEKTLEEGRTRGYVETLFGRRRYVPDLTARVKSVREAAERMAFNMPVQGTAADLMKLAMVRLFPQLREVGARMLLQVHDELLLEAPKERAEEVAALAKEVMEGVWPLAVPLEVEVGIGEDWLAAKG

SEQ ID NO: 901 - DNA, 2529 bp, synthetic construct
  misc_feature 1..2529: note = Variant of DNA polymerase I from Thermus sp. strain 2.9
  source 1..2529: mol_type = other DNA
atgcaccatcatcatcatcatggcggtagcggcatgttaccgttgttcgaacctaaaggtcgcgtgcttctggttgatggccatcatctcgcgtatcgtaacttctttgccctgaaaggattaaccaccagccgtggcgagccggtacagggtgtctacggctttgcaaagtcgctcctgaaagctctgaaagaagacggtgatgtggtgattgttgtctttgatgcgaaagcgccaagttttcgccacgaagcgtacgaagcttacaaagccgggcgtgctccaacgccggaagactttcctcgccaattggcgcttatgaaggaattagtggatttgcttggcctcgaacgcttggaagttcccggtttcgaggcagacgacgtattagcgactctcgcaaagaaagccgaacgtgagggctatgaagtccagatcttgacagcagatcgcgatcttttccagcttttatctccgcgcatctcggtgttacacccggaagggcatctgatcaccccggaatggctctgggagaaatatggtttgcgtcccgaacaatgggtggattttcgcgccttagtcggcgatccgagcgacaatattccgggagttaaaggtatcggcgagaagacggcgctcaagctccttaaagaatgggggtcgttggagaacttgcttaagaatttagatcaggtcaaaccagagtcagtgcgtgagaagattcttgcacacctcgaagacctcaaattaagccgcgaattgtcccgtgtacgcaccgatttgccgctcgaagttgatttccgtggccgccgcgaacctgactgggagggtcttaaagcgtttttagagcgtcttgaatttggttcgctcttgcatgaattcggccttttagaaagcccgttaccagccgaagaagcaccttggccaccgcccgaaggcgcgtttttaggttaccgtttgagtcgcccggaaccgatgtgggccgaattattggctcttgcagcgtctgcccagggacgtgtgtatcgcgcggaagaccctcatggtgcgctccgcggcctcaaagaagtccgtggactccttgccaaagacttagctgttgttgcattgcgcgaaggtcttgatttacctccgactgatgatccaatgcttcttgcgtacctcttggacccgtcaaacacgacgcccgaaggcgtagcccgtcgttacggcggcgagtggaccgaagatgcaggcgagcgcgcgttattggccgaacgtttgcacgcaaatttattaggacgtttgcaaggcgaggaacgtctcctctggctttacgaagaagtggagaaaccattgagtcgcgtgctcgctcatatggaagctaccggtgtcaaattagacgtggcgtatttggaggcactcagccttgaagttgctgccgaaatgcgccgcttggaggaagaagtattccgtttagcaggccactcctttaaccttaattctcgcgatcagttagaacgtgtgttgttcgatgaacttggtctccctcctatcggcaagacagagaagaccggtaaacgtagcacttcagcggcggttttagaagctcttcgcgaagtccatcccattgtggacaagatcttgcagtaccgcgaactcgcgaaattgaaaggcacctatattgaccctcttccggcattagtccacccgaaaacgggacgcctccatacccgcttcaaccaaacagccacggcgaccggtcgtttgtcctcctctgatccaaaccttcagaatattccagtacgtaccccattgggccagaagatccgccgcgcgtttgtagctgaggagggttggcgtttagtggccctcgattatagccaaattgaattacgtgtccttgcccatctttctggcgatgagaacctcatccgcgtgtttcaggaaggcaaagacattcacactcaaacggcaagctggatgtttggactgtcggcggaagcgatcgatcctttgatgcgtcgtgcagcgaagaccatcaatttcggtgttctctacggtatgagtgcccaccgtttgtcgcaggaattaggcattccctatgaagaagctgcggcgttcattcagcgctactttcaaagctatcccaaagttaaagcatggatcgagaagactctcgaagaaggccgcacacgtggttacgtagagaccttatttggacgtcgccgctatgttcccgatttaaacgctcgcgtgaaatctgtccgtgaagccgccgaacgcatggcgttcaacatgcctgtacagggcacggcagctgacctcatgaaacttgcaatggtgcgcctttttccacaattgcgtgaagttggtgcccgcatgctcttgcaggtccacgatgaactcttgttagaagcgccaaaagagcgtgcggaagaggtggcagccctcgcgaaagaggttatggaaggcgtgtggcccttagcggtgcctcttgaagtcgaagttggtattggcgaggattggttggctgccaaaggataatga

SEQ ID NO: 902 - protein, 841 aa, synthetic construct
  REGION 1..841: note = Variant of DNA polymerase I from Thermus sp. strain 2.9
MHHHHHHGGSGMLPLFEPKGRVLLVDGHHLAYRNFFALKGLTTSRGEPVQGVYGFAKSLLKALKEDGDVVIVVFDAKAPSFRHEAYEAYKAGRAPTPEDFPRQLALMKELVDLLGLERLEVPGFEADDVLATLAKKAEREGYEVQILTADRDLFQLLSPRISVLHPEGHLITPEWLWEKYGLRPEQWVDFRALVGDPSDNIPGVKGIGEKTALKLLKEWGSLENLLKNLDQVKPESVREKILAHLEDLKLSRELSRVRTDLPLEVDFRGRREPDWEGLKAFLERLEFGSLLHEFGLLESPLPAEEAPWPPPEGAFLGYRLSRPEPMWAELLALAASAQGRVYRAEDPHGALRGLKEVRGLLAKDLAVVALREGLDLPPTDDPMLLAYLLDPSNTTPEGVARRYGGEWTEDAGERALLAERLHANLLGRLQGEERLLWLYEEVEKPLSRVLAHMEATGVKLDVAYLEALSLEVAAEMRRLEEEVFRLAGHSFNLNSRDQLERVLFDELGLPPIGKTEKTGKRSTSAAVLEALREVHPIVDKILQYRELAKLKGTYIDPLPALVHPKTGRLHTRFNQTATATGRLSSSDPNLQNIPVRTPLGQKIRRAFVAEEGWRLVALDYSQIELRVLAHLSGDENLIRVFQEGKDIHTQTASWMFGLSAEAIDPLMRRAAKTINFGVLYGMSAHRLSQELGIPYEEAAAFIQRYFQSYPKVKAWIEKTLEEGRTRGYVETLFGRRRYVPDLNARVKSVREAAERMAFNMPVQGTAADLMKLAMVRLFPQLREVGARMLLQVHDELLLEAPKERAEEVAALAKEVMEGVWPLAVPLEVEVGIGEDWLAAKG

SEQ ID NO: 903 - DNA, 2529 bp, synthetic construct
  misc_feature 1..2529: note = Variant of DNA polymerase I from Thermus sp. strain 2.9
  source 1..2529: mol_type = other DNA
atgcaccatcatcatcatcatggcggtagcggcatgttaccgttgttcgaacctaaaggtcgcgtgcttctggttgatggccatcatctcgcgtatcgtaacttctttgccctgcctggattaaccaccagccgtggcgagccggtacagggtgtctacggctttgcaaagtcgctcctgaaagctctgaaagaagacggtgatgtggtgattgttgtctttgatgcgaaagcgccaagttttcgccacgaagcgtacgaagcttacaaagccgggcgtgctccaacgccggaagactttcctcgccaattggcgcttatgaaggaattagtggatttgcttggcctcgaacgcttggaagttcccggtttcgaggcagacgacgtattagcgactctcgcaaagaaagccgaacgtgagggctatgaagtccagatcttgacagcagatcgcgatcttttccagcttttatctccgcgcatctcggtgttacacccggaagggcatcgtatcaccccggaatggctctgggagaaatatggtttgcgtcccgaacaatgggtggattttcgcgccttagcaggcgatccgagcgacaatattccgggagttaaaggtatcggcgagaagacggcgctcaagctccttaaagaatgggggtcgttggagaacttgcttaagaatttagatcaggtcaaaccagagtcagtgcgtgagaagattcttgcacacctcgaagacctcaaattaagccgcgaattgtcccgtgtacgcaccgatttgccgctcgaagttgatttccgtggccgccgcgaacctgactgggagggtcttaaagcgtttttagagcgtcttgaatttggttcgctcttgcatgaattcggccttttagaaagcccgttaccagccgaagaagcaccttggccaccgcccgaaggcgcgtttttaggttaccgtttgagtcgcccggaaccgatgtgggccgaattattggctcttgcagcgtctgcccagggacgtgtgtatcgcgcggaagaccctcatggtgcgctccgcggcctcaaagaagtccgtggactccttgccaaagacttagctgttgttgcattgcgcgaaggtcttgatttacctccgactgatgatccaatgcttcttgcgtacctcttggacccgtcaaacacgacgcccgaaggcgtagcccgtcgttacggcggcgagtggaccgaagatgcaggcgagcgcgcgttattggccgaacgtttgcacgccaatttattaggacgtttgcaaggcgaggaacgtctcctctggctttacgaagaagtggagaaaccattgagtcgcgtgctcgcgcatatggaagctaccggtgtcaaattagacgtggcgtatttggaggcactcagccttgaagttgctgccgaaatgcgccgcttggaggaagaagtattccgtttagcaggccactcctttaaccttaattctcgcgatcagttagaacgtgtgttgttcgatgaacttggtctccctcctatcggcaagacagagaagaccggtaaacgtagcacttcagcggcggttttagaagctcttcgcgaagtccatcccattgtggacaagatcttgcagtaccgcgaactcgcgaaattgaaaggcacctatattgaccctcttccggcattagtccacccgaaaacgggacgcctccatacccgcttcaaccaaacagccacggcgaccggtcgtttgtcctcctctgatccaaaccttcagaatattccagtacgtaccccattgggccagaagatccgccgcgcgtttgtagctgaggagggttggcgtttagtggccctcgattatagccaaattgaattacgtgtccttgcccatctttctggcgatgagaacctcatccgcgtgtttcaggaaggcaaagacattcacactcaaacggcaagctggatgtttggattatcagctgaagcgatcgatcctttgatgcgtcgtgcagcgaagaccatcaatttcggtgttctctacggtatgagtgcccatcgtttgtcgcaggaattaggcattccctatgaagaagctgcggcgttcattcagcgctactttcaaagctatcccaaagttaaagcatggatcgagaagactctcgaagaaggccgcacacgtggttacgtagagaccttatttggacgtcgccgctatgttcccgatttaaacgctcgcgtgaaatctgtccgtgaagccgccgaacgcatggcgttcaacatgcctgtacagggcacggcagctgacctcatgaaacttgcaatggtgcgcctttttccacaattgcgtgaagttggtgcccgcatgctcttgcaggtccacgatgaactcttgttagaagcgccaaaagagcgtgcggaagaggtggcagccctcgcgaaagaggttatggaaggcgtgtggcccttagcggtgcctcttgaagtcgaagttggtattggcgaggattggttggctgccaaaggataatga

SEQ ID NO: 904 - protein, 841 aa, synthetic construct
  REGION 1..841: note = Variant of DNA polymerase I from Thermus sp. strain 2.9
MHHHHHHGGSGMLPLFEPKGRVLLVDGHHLAYRNFFALPGLTTSRGEPVQGVYGFAKSLLKALKEDGDVVIVVFDAKAPSFRHEAYEAYKAGRAPTPEDFPRQLALMKELVDLLGLERLEVPGFEADDVLATLAKKAEREGYEVQILTADRDLFQLLSPRISVLHPEGHRITPEWLWEKYGLRPEQWVDFRALAGDPSDNIPGVKGIGEKTALKLLKEWGSLENLLKNLDQVKPESVREKILAHLEDLKLSRELSRVRTDLPLEVDFRGRREPDWEGLKAFLERLEFGSLLHEFGLLESPLPAEEAPWPPPEGAFLGYRLSRPEPMWAELLALAASAQGRVYRAEDPHGALRGLKEVRGLLAKDLAVVALREGLDLPPTDDPMLLAYLLDPSNTTPEGVARRYGGEWTEDAGERALLAERLHANLLGRLQGEERLLWLYEEVEKPLSRVLAHMEATGVKLDVAYLEALSLEVAAEMRRLEEEVFRLAGHSFNLNSRDQLERVLFDELGLPPIGKTEKTGKRSTSAAVLEALREVHPIVDKILQYRELAKLKGTYIDPLPALVHPKTGRLHTRFNQTATATGRLSSSDPNLQNIPVRTPLGQKIRRAFVAEEGWRLVALDYSQIELRVLAHLSGDENLIRVFQEGKDIHTQTASWMFGLSAEAIDPLMRRAAKTINFGVLYGMSAHRLSQELGIPYEEAAAFIQRYFQSYPKVKAWIEKTLEEGRTRGYVETLFGRRRYVPDLNARVKSVREAAERMAFNMPVQGTAADLMKLAMVRLFPQLREVGARMLLQVHDELLLEAPKERAEEVAALAKEVMEGVWPLAVPLEVEVGIGEDWLAAKG

SEQ ID NO: 905 - DNA, 2529 bp, synthetic construct
  misc_feature 1..2529: note = Variant of DNA polymerase I from Thermus sp. strain 2.9
  source 1..2529: mol_type = other DNA
atgcaccatcatcatcatcatggcggtagcggcatgttaccgttgttcgaacctaaaggtcgcgtgcttctggttgatggccatcatctcgcgtatcgtaacttctttgccctgaaaggattaaccaccagccgtggcgagccggtacagggtgtctacggctttgcaaagtcgctcctgaaagctctgaaagaagacggtgatgtggtgattgttgtctttgatgcgaaagcgccaagttttcgccacgaagcgtacgaagcttacaaagccgggcgtgctccaacgccggaagactttcctcgccaattggcgcttatgaaggaattagtggatttgcttggcctcgaacgcttggaagttcccggtttcgaggcagacgacgtattagcgactctcgcaaagaaagccgaacgtgagggctatgaagtccagatcttgacagcagatcgcgatcttttccagcttttatctccgcgcatctcggtgttacacccggaagggcatcgtatcaccccggaatggctctgggagaaatatggtttgcgtcccgaacaatgggtggattttcgcgccttagcaggcgatccgagcgacaatattccgggagttaaaggtatcggcgagaagacggcgctcaagctccttaaagaatgggggtcgttggagaacttgcttaagaatttagatcaggtcaaaccagagtcagtgcgtgagaagattcttgcacacctcgaagacctcaaattaagccgcgaattgtcccgtgtacgcaccgatttgccgctcgaagttgatttccgtggccgccgcgaacctgactgggagggtcttaaagcgtttttagagcgtcttgaatttggttcgctcttgcatgaattcggccttttagaaagcccgttaccagccgaagaagcaccttggccaccgcccgaaggcgcgtttttaggttaccgtttgagtcgcccggaaccgatgtgggccgaattattggctcttgcagcgtctgcccagggacgtgtgtatcgcgcggaagaccctcatggtgcgctccgcggcctcaaagaagtccgtggactccttgccaaagacttagctgttgttgcattgcgcgaaggtcttgatttacctccgactgatgatccaatgcttcttgcgtacctcttggacccgtcaaacacgacgcccgaaggcgtagcccgtcgttacggcggcgagtggaccgaagatgcaggcgagcgcgcgttattggccgaacgtttgcaccagaatttattaggacgtttgcaaggcgaggaacgtctcctctggctttacgaagaagtggagaaaccattgagtcgcgtgctcgctcatatggaagctaccggtgtcaaattagacgtggcgtatttggaggcactcagccttgaagttgctgccgaaatgcgccgcttggaggaagaagtattccgtttagcaggccactcctttaaccttaattctcgcgatcagttagaacgtgtgttgttcgatgaacttggtctccctcctatcggcaagacagagaagaccggtaaacgtagcacttcagcggcggttttagaagctcttcgcgaagtccatcccattgtggacaagatcttgcagtaccgcgaactcgcgaaattgaaaggcacctatattgaccgtcttccggcattagtccacccgaaaacgggacgcctccatacccgcttcaaccaaacagccacggcgaccggtcgtttgtcctcctctgatccaaaccttcagaatattccagtacgtaccccattgggccagaagatccgccgcgcgtttgtagctgaggagggttggcgtttagtggccctcgattatagccaaattgaattacgtgtccttgcccatctttctggcgatgagaacctcatccgcgtgtttcaggaaggcaaagacattcacactcaaacggcaagctggatgtttggattatcagctgaagcgatcgatcctttgatgcgtcgtgcagcgaagaccatcaatttcggtgttctctacggtatgagtgccgctcgtttgtcgcaggaattaggcattccctatgaagaagctgcggcgttcattcagcgctactttcaaagctatcccaaagttaaagcatggatcgagaagactctcgaagaaggccgcacacgtggttacgtagagaccttatttggacgtcgccgctatgttcccgatttaaacgctcgcgtgaaatctgtccgtgaagccgccgaacgcatggcgttcaacatgcctgtacagggcacggcagctgacctcatgaaacttgcaatggtgcgcctttttccacaattgcgtgaagttggtgcccgcatgctcttgcaggtccacgatgaactcttgttagaagcgccaaaagagcgtgcggaagaggtggcagccctcgcgaaagaggttatggaaggcgtgtggcccttagcggtgcctcttgaagtcgaagttggtattggcgaggattggttggctgccaaaggataatga

SEQ ID NO: 906 - protein, 841 aa, synthetic construct
  REGION 1..841: note = Variant of DNA polymerase I from Thermus sp. strain 2.9
MHHHHHHGGSGMLPLFEPKGRVLLVDGHHLAYRNFFALKGLTTSRGEPVQGVYGFAKSLLKALKEDGDVVIVVFDAKAPSFRHEAYEAYKAGRAPTPEDFPRQLALMKELVDLLGLERLEVPGFEADDVLATLAKKAEREGYEVQILTADRDLFQLLSPRISVLHPEGHRITPEWLWEKYGLRPEQWVDFRALAGDPSDNIPGVKGIGEKTALKLLKEWGSLENLLKNLDQVKPESVREKILAHLEDLKLSRELSRVRTDLPLEVDFRGRREPDWEGLKAFLERLEFGSLLHEFGLLESPLPAEEAPWPPPEGAFLGYRLSRPEPMWAELLALAASAQGRVYRAEDPHGALRGLKEVRGLLAKDLAVVALREGLDLPPTDDPMLLAYLLDPSNTTPEGVARRYGGEWTEDAGERALLAERLHQNLLGRLQGEERLLWLYEEVEKPLSRVLAHMEATGVKLDVAYLEALSLEVAAEMRRLEEEVFRLAGHSFNLNSRDQLERVLFDELGLPPIGKTEKTGKRSTSAAVLEALREVHPIVDKILQYRELAKLKGTYIDRLPALVHPKTGRLHTRFNQTATATGRLSSSDPNLQNIPVRTPLGQKIRRAFVAEEGWRLVALDYSQIELRVLAHLSGDENLIRVFQEGKDIHTQTASWMFGLSAEAIDPLMRRAAKTINFGVLYGMSAARLSQELGIPYEEAAAFIQRYFQSYPKVKAWIEKTLEEGRTRGYVETLFGRRRYVPDLNARVKSVREAAERMAFNMPVQGTAADLMKLAMVRLFPQLREVGARMLLQVHDELLLEAPKERAEEVAALAKEVMEGVWPLAVPLEVEVGIGEDWLAAKG

SEQ ID NO: 907 - DNA, 2529 bp, synthetic construct
  misc_feature 1..2529: note = Variant of DNA polymerase I from Thermus sp. strain 2.9
  source 1..2529: mol_type = other DNA
atgcaccatcatcatcatcatggcggtagcggcatgttaccgttgttcgaacctaaaggtcgcgtgcttctggttgatggccatcatctcgcgtatcgtaacttctttgccctgaaaggattaaccaccagccgtggcgagccggtacagggtgtctacggctttgcaaagtcgctcctgaaagctctgaaagaagacggtgatgtggtgattgttgtctttgatgcgaaagcgccaagttttcgccacgaagcgtacgaagcttacaaagccgggcgtgctccaacgccggaagactttcctcgccaattggcgcttatgaaggaattagtggatttgcttggcctcgaacgcttggaagttcccggtttcgaggcagacgacgtattagcgactctcgcaaagaaagccgaacgtgagggctatgaagtccagatcttgacagcagatcgcgatcttttccagcttttatctccgcgcatctcggtgttacacccggaagggcatctgatcaccccggaatggctctgggagaaatatggtttgcgtcccgaacaatgggtggattttcgcgccttagcaggcgatccgagcgacaatattccgggagttaaaggtatcggcgagaagacggcgctcaagctccttaaagaatgggggtcgttggagaacttgcttaagaatttagatcaggtcaaaccagagtcagtgcgtgagaagattcttgcacacctcgaagacctcaaattaagccgcgaattgtcccgtgtacgcaccgatttgccgctcgaagttgatttccgtggccgccgcgaacctgactgggagggtcttaaagcgtttttagagcgtcttgaatttggttcgctcttgcatgaattcggccttttagaaagcccgttaccagccgaagaagcaccttggccaccgcccgaaggcgcgtttttaggttaccgtttgagtcgcccggaaccgatgtgggccgaattattggctcttgcagcgtctgcccagggacgtgtgtatcgcgcggaagaccctcatggtgcgctccgcggcctcaaagaagtccgtggactccttgccaaagacttagctgttgttgcattgcgcgaaggtcttgatttacctccgactgatgatccaatgcttcttgcgtacctcttggacccgtcaaacacgacgcccgaaggcgtagcccgtcgttacggcggcgagtggaccgaagatgcaggcgagcgcgcgttattggccgaacgtttgcaccagaatttattaggacgtttgcaaggcgaggaacgtctcctctggctttacgaagaagtggagaaaccattgagtcgcgtgctcgcgcatatggaagctaccggtgtcaaattagacgtggcgtatttggaggcactcagccttgaagttgctgccgaaatgcgccgcttggaggaagaagtattccgtttagcaggccactcctttaaccttaattctcgcgatcagttagaacgtgtgttgttcgatgaacttggtctccctcctatcggcaagacagagaagaccggtaaacgtagcacttcagcggcggttttagaagctcttcgcgaagtccatcccattgtggacaagatcttgcagtaccgcgaactcgcgaaattgaaaggcacctatattgaccctcttccggcattagtccacccgaaaacgggacgcctccatacccgcttcaaccaaacagccacggcgaccggtcgtttgtcctcctctgatccaaaccttcagaatattccagtacgtaccccattgggccagaagatccgccgcgcgtttgtagctgaggagggttggcgtttagtggccctcgattatagccaaattgaattacgtgtccttgcccatctttctggcgatgagaacctcatccgcgtgtttcaggaaggcaaagacattcacactcaaacggcaagctggatgtttggactgtcggcggaagcgatcgatcctttgatgcgtcgtgcagcgaagaccatcaatttcggtgttctctacggtatgagtgcccaccgtttgtcgcaggaattaggcattccctatgaagaagctgcggcgttcattcagcgctactttcaaagctatcccaaagttaaagcatggatcgagaagactctcgaagaaggccgcacacgtggttacgtagagaccttatttggacgtcgccgctatgttcccgatttaaccgctcgcgtgaaatctgtccgtgaagccgccgaacgcatggcgttcaacatgcctgtacagggcacggcagctgacctcatgaaacttgcaatggtgcgcctttttccacaattgcgtgaagttggtgcccgcatgctcttgcaggtccacgatgaactcttgttagaagcgccaaaagagcgtgcggaagaggtggcagccctcgcgaaagaggttatggaaggcgtgtggcccttagcggtgcctcttgaagtcgaagttggtattggcgaggattggttggctgccaaaggataatga

SEQ ID NO: 908 - protein, 841 aa, synthetic construct
  REGION 1..841: note = Variant of DNA polymerase I from Thermus sp. strain 2.9
MHHHHHHGGSGMLPLFEPKGRVLLVDGHHLAYRNFFALKGLTTSRGEPVQGVYGFAKSLLKALKEDGDVVIVVFDAKAPSFRHEAYEAYKAGRAPTPEDFPRQLALMKELVDLLGLERLEVPGFEADDVLATLAKKAEREGYEVQILTADRDLFQLLSPRISVLHPEGHLITPEWLWEKYGLRPEQWVDFRALAGDPSDNIPGVKGIGEKTALKLLKEWGSLENLLKNLDQVKPESVREKILAHLEDLKLSRELSRVRTDLPLEVDFRGRREPDWEGLKAFLERLEFGSLLHEFGLLESPLPAEEAPWPPPEGAFLGYRLSRPEPMWAELLALAASAQGRVYRAEDPHGALRGLKEVRGLLAKDLAVVALREGLDLPPTDDPMLLAYLLDPSNTTPEGVARRYGGEWTEDAGERALLAERLHQNLLGRLQGEERLLWLYEEVEKPLSRVLAHMEATGVKLDVAYLEALSLEVAAEMRRLEEEVFRLAGHSFNLNSRDQLERVLFDELGLPPIGKTEKTGKRSTSAAVLEALREVHPIVDKILQYRELAKLKGTYIDPLPALVHPKTGRLHTRFNQTATATGRLSSSDPNLQNIPVRTPLGQKIRRAFVAEEGWRLVALDYSQIELRVLAHLSGDENLIRVFQEGKDIHTQTASWMFGLSAEAIDPLMRRAAKTINFGVLYGMSAHRLSQELGIPYEEAAAFIQRYFQSYPKVKAWIEKTLEEGRTRGYVETLFGRRRYVPDLTARVKSVREAAERMAFNMPVQGTAADLMKLAMVRLFPQLREVGARMLLQVHDELLLEAPKERAEEVAALAKEVMEGVWPLAVPLEVEVGIGEDWLAAKG

SEQ ID NO: 909 - DNA, 2529 bp, synthetic construct
  misc_feature 1..2529: note = Variant of DNA polymerase I from Thermus sp. strain 2.9
  source 1..2529: mol_type = other DNA
atgcaccatcatcatcatcatggcggtagcggcatgttaccgttgttcgaacctaaaggtcgcgtgcttctggttgatggccatcatctcgcgtatcgtaacttctttgccctgaaaggattaaccaccagccgtggcgagccggtacagggtgtctacggctttgcaaagtcgctcctgaaagctctgaaagaagacggtgatgtggtgattgttgtctttgatgcgaaagcgccaagttttcgccacgaagcgtacgaagcttacaaagccgggcgtgctccaacgccggaagactttcctcgccaattggcgcttatgaaggaattagtggatttgcttggcctcgaacgcttggaagttcccggtttcgaggcagacgacgtattagcgactctcgcaaagaaagccgaacgtgagggctatgaagtccagatcttgacagcagatcgcgatcttttccagcttttatctccgcgcatctcggtgttacacccggaagggcatcgtatcaccccggaatggctctgggagaaatatggtttgcgtcccgaacaatgggtggattttcgcgccttagcaggcgatccgagcgacaatattccgggagttaaaggtatcggcgagaagacggcgctcaagctccttaaagaatgggggtcgttggagaacttgcttaagaatttagatcaggtcaaaccagagtcagtgcgtgagaagattcttgcacacctcgaagacctcaaattaagccgcgaattgtcccgtgtacgcaccgatttgccgctcgaagttgatttccgtggccgccgcgaacctgacgaggagggtcttaaagcgtttttagagcgtcttgaatttggttcgctcttgcatgaattcggccttttagaaagcccgttaccagccgaagaagcaccttggccaccgcccgaaggcgcgtttttaggttaccgtttgagtcgcccggaaccgatgtgggccgaattattggctcttgcagcgtctgcccagggacgtgtgtatcgcgcggaagaccctcatggtgcgctccgcggcctcaaagaagtccgtggactccttgccaaagacttagctgttgttgcattgcgcgaaggtcttgatttacctccgactgatgatccaatgcttcttgcgtacctcttggacccgtcaaacacgacgcccgaaggcgtagcccgtcgttacggcggcgagtggaccgaagatgcaggcgagcgcgcgttattggccgaacgtttgcacgccaatttattaggacgtttgcaaggcgaggaacgtctcctctggctttacgaagaagtggagaaaccattgagtcgcgtgctcgcgcatatggaagctaccggtgtcaaattagacgtggcgtatttggaggcactcagccttgaagttgctgccgaaatgcgccgcttggaggaagaagtattccgtttagcaggccactcctttaaccttaattctcgcgatcagttagaacgtgtgttgttcgatgaacttggtctccctcctatcggcaagacagagaagaccggtaaacgtagcacttcagcggcggttttagaagctcttcgcgaagtccatcccattgtggacaagatcttgcagtaccgcgaactcgcgaaattgaaaggcacctatattgaccctcttccggcattagtccacccgaaaacgggacgcctccatacccgcttcaaccaaacagccacggcgaccggtcgtttgtcctcctctgatccaaaccttcagaatattccagtacgtaccccattgggccagaagatccgccgcgcgtttgtagctgaggagggttggcgtttagtggccctcgattatagccaaattgaattacgtgtccttgcccatctttctggcgatgagaacctcatccgcgtgtttcaggaaggcaaagacattcacactcaaacggcaagctggatgtttggattatcagctgaagcgatcgatcctttgatgcgtcgtgcagcgaagaccatcaatttcggtgttctctacggtatgagtgcccatcgtttgtcgcaggaattaggcattccctatgaagaagctgcggcgttcattcagcgctactttcaaagctatcccaaagttaaagcatggatcgagaagactctcgaagaaggccgcacacgtggttacgtagagaccttatttggacgtcgccgctatgttcccgatttaaacgctcgcgtgaaatctgtccgtgaagccgccgaacgcatggcgttcaacatgcctgtacagggcacggcagctgacctcatgaaacttgcaatggtgcgcctttttccacaattgcgtgaagttggtgcccgcatgctcttgcaggtccacgatgaactcttgttagaagcgccaaaagagcgtgcggaagaggtggcagccctcgcgaaagaggttatggaaggcgtgtggcccttagcggtgcctcttgaagtcgaagttggtattggcgaggattggttggctgccaaaggataatga

SEQ ID NO: 910 - protein, 841 aa, synthetic construct
  REGION 1..841: note = Variant of DNA polymerase I from Thermus sp. strain 2.9
MHHHHHHGGSGMLPLFEPKGRVLLVDGHHLAYRNFFALKGLTTSRGEPVQGVYGFAKSLLKALKEDGDVVIVVFDAKAPSFRHEAYEAYKAGRAPTPEDFPRQLALMKELVDLLGLERLEVPGFEADDVLATLAKKAEREGYEVQILTADRDLFQLLSPRISVLHPEGHRITPEWLWEKYGLRPEQWVDFRALAGDPSDNIPGVKGIGEKTALKLLKEWGSLENLLKNLDQVKPESVREKILAHLEDLKLSRELSRVRTDLPLEVDFRGRREPDEEGLKAFLERLEFGSLLHEFGLLESPLPAEEAPWPPPEGAFLGYRLSRPEPMWAELLALAASAQGRVYRAEDPHGALRGLKEVRGLLAKDLAVVALREGLDLPPTDDPMLLAYLLDPSNTTPEGVARRYGGEWTEDAGERALLAERLHANLLGRLQGEERLLWLYEEVEKPLSRVLAHMEATGVKLDVAYLEALSLEVAAEMRRLEEEVFRLAGHSFNLNSRDQLERVLFDELGLPPIGKTEKTGKRSTSAAVLEALREVHPIVDKILQYRELAKLKGTYIDPLPALVHPKTGRLHTRFNQTATATGRLSSSDPNLQNIPVRTPLGQKIRRAFVAEEGWRLVALDYSQIELRVLAHLSGDENLIRVFQEGKDIHTQTASWMFGLSAEAIDPLMRRAAKTINFGVLYGMSAHRLSQELGIPYEEAAAFIQRYFQSYPKVKAWIEKTLEEGRTRGYVETLFGRRRYVPDLNARVKSVREAAERMAFNMPVQGTAADLMKLAMVRLFPQLREVGARMLLQVHDELLLEAPKERAEEVAALAKEVMEGVWPLAVPLEVEVGIGEDWLAAKG

SEQ ID NO: 911 - DNA, 2529 bp, synthetic construct
  misc_feature 1..2529: note = Variant of DNA polymerase I from Thermus sp. strain 2.9
  source 1..2529: mol_type = other DNA
atgcaccatcatcatcatcatggcggtagcggcatgttaccgttgttcgaacctaaaggtcgcgtgcttctggttgatggccatcatctcgcgtatcgtaacttctttgccctgaaaggattaaccaccagccgtggcgagccggtacagggtgtctacggctttgcaaagtcgctcctgaaagctctgaaagaagacggtgatgtggtgattgttgtctttgatgcgaaagcgccaagttttcgccacgaagcgtacgaagcttacaaagccgggcgtgctccaacgccggaagactttcctcgccaattggcgcttatgaaggaattagtggatttgcttggcctcgaacgcttggaagttcccggtttcgaggcagacgacgtattagcgactctcgcaaagaaagccgaacgtgagggctatgaagtccagatcttgacagcagatcgcgatcttttccagcttttatctccgcgcatctcggtgttacacccggaagggcatctgatcaccccggaatggctctgggagaaatatggtttgcgtcccgaacaatgggtggattttcgcgccttagcaggcgatccgagcgacaatattccgggagttaaaggtatcggcgagaagacggcgctcaagctccttaaagaatgggggtcgttggagaacttgcttaagaatttagatcaggtcaaaccagagtcagtgcgtgagaagattcttgcacacctcgaagacctcaaattaagccgcgaattgtcccgtgtacgcaccgatttgccgctcgaagttgatttccgtggccgccgcgaacctgactgggagggtcttaaagcgtttttagagcgtcttgaatttggttcgctcttgcatgaattcggccttttagaaagcccgttaccagccgaagaagcaccttggccaccgcccgaaggcgcgtttttaggttaccgtttgagtcgcccggaaccgatgtgggccgaattattggctcttgcagcgtctgcccagggacgtgtgtatcgcgcggaagaccctcatggtgcgctccgcggcctcaaagaagtccgtggactccttgccaaagacttagctgttgttgcattgcgcgaaggtcttgatttacctccgactgatgatccaatgcttcttgcgtacctcttggacccgtcaaacacgacgcccgaaggcgtagcccgtcgttacggcggcgagtggaccgaagatgcaggcgagcgcgcgttattggccgaacgtttgcaccagaatttattaggacgtttgcaaggcgaggaacgtctcctctggctttacgaagaagtggagaaaccattgagtcgcgtgctcgctcatatggaagctaccggtgtcaaattagacgtggcgtatttggaggcactcagccttgaagttgctgccgaaatgcgccgcttggaggaagaagtattccgtttagcaggccactcctttaaccttaattctcgcgatcagttagaacgtgtgttgttcgatgaacttggtctccctcctatcggcaagacagagaagaccggtaaacgtagcacttcagcggcggttttagaagctcttcgcgaagtccatcccattgtggacaagatcttgcagtaccgcgaactcgcgaaattgaaaggcacctatattgaccctcttccggcattagtccacccgaaaacgggacgcctccatacccgcttcaaccaaacagccacggcgaccggtcgtttgtcctcctctgatccaaaccttcagaatattccagtacgtaccccattgggccagaagatccgccgcgcgtttgtagctgaggagggttggcgtttagtggccctcgattatagccaaattgaattacgtgtccttgcccatctttctggcgatgagaacctcatccgcgtgtttcaggaaggcaaagacattcacactcaaacggcaagctggatgtttggagtgtcggcggaagcgatcgatcctttgatgcgtcgtgcagcgaagaccatcaatttcggtgttctctacggtatgagtgcccaccgtttgtcgcaggaattaggcattccctatgaagaagctgcggcgttcattcagcgctactttcaaagctatcccaaagttaaagcatggatcgagaagactctcgaagaaggccgcacacgtggttacgtagagaccttatttggacgtcgccgctatgttcccgatttaaacgctcgcgtgaaatctgtccgtgaagccgccgaacgcatggcgttcaacatgcctgtacagggcacggcagctgacctcatgaaacttgcaatggtgcgcctttttccacaattgcgtgaagttggtgcccgcatgctcttgcaggtccacgatgaactcttgttagaagcgccaaaagagcgtgcggaagaggtggcagccctcgcgaaagaggttatggaaggcgtgtggcccttagcggtgcctcttgaagtcgaagttggtattggcgaggattggttggctgccaaaggataatga

SEQ ID NO: 912 - protein, 841 aa, synthetic construct
  REGION 1..841: note = Variant of DNA polymerase I from Thermus sp. strain 2.9
MHHHHHHGGSGMLPLFEPKGRVLLVDGHHLAYRNFFALKGLTTSRGEPVQGVYGFAKSLLKALKEDGDVVIVVFDAKAPSFRHEAYEAYKAGRAPTPEDFPRQLALMKELVDLLGLERLEVPGFEADDVLATLAKKAEREGYEVQILTADRDLFQLLSPRISVLHPEGHLITPEWLWEKYGLRPEQWVDFRALAGDPSDNIPGVKGIGEKTALKLLKEWGSLENLLKNLDQVKPESVREKILAHLEDLKLSRELSRVRTDLPLEVDFRGRREPDWEGLKAFLERLEFGSLLHEFGLLESPLPAEEAPWPPPEGAFLGYRLSRPEPMWAELLALAASAQGRVYRAEDPHGALRGLKEVRGLLAKDLAVVALREGLDLPPTDDPMLLAYLLDPSNTTPEGVARRYGGEWTEDAGERALLAERLHQNLLGRLQGEERLLWLYEEVEKPLSRVLAHMEATGVKLDVAYLEALSLEVAAEMRRLEEEVFRLAGHSFNLNSRDQLERVLFDELGLPPIGKTEKTGKRSTSAAVLEALREVHPIVDKILQYRELAKLKGTYIDPLPALVHPKTGRLHTRFNQTATATGRLSSSDPNLQNIPVRTPLGQKIRRAFVAEEGWRLVALDYSQIELRVLAHLSGDENLIRVFQEGKDIHTQTASWMFGVSAEAIDPLMRRAAKTINFGVLYGMSAHRLSQELGIPYEEAAAFIQRYFQSYPKVKAWIEKTLEEGRTRGYVETLFGRRRYVPDLNARVKSVREAAERMAFNMPVQGTAADLMKLAMVRLFPQLREVGARMLLQVHDELLLEAPKERAEEVAALAKEVMEGVWPLAVPLEVEVGIGEDWLAAKG

SEQ ID NO: 913 - DNA, 2529 bp, synthetic construct
  misc_feature 1..2529: note = Variant of DNA polymerase I from Thermus sp. strain 2.9
  source 1..2529: mol_type = other DNA
atgcaccatcatcatcatcatggcggtagcggcatgttaccgttgttcgaacctaaaggtcgcgtgcttctggttgatggccatcatctcgcgtatcgtaacttctttgccctgaaaggattaaccaccagccgtggcgagccggtacagggtgtctacggctttgcaaagtcgctcctgaaagctctgaaagaagacggtgatgtggtgattgttgtctttgatgcgaaagcgccaagttttcgccacgaagcgtacgaagcttacaaagccgggcgtgctccaacgccggaagactttcctcgccaattggcgcttatgaaggaattagtggatttgcttggcctcgaacgcttggaagttcccggtttcgaggcagacgacgtattagcgactctcgcaaagaaagccgaacgtgagggctatgaagtccagatcttgacagcagatcgcgatcttttccagcttttatctccgcgcatctcggtgttacacccggaagggcatcgtatcaccccggaatggctctgggagaaatatggtttgcgtcccgaacaatgggtggattttcgcgccttagcaggcgatccgagcgacaatattccgggagttaaaggtatcggcgagaagacggcgctcaagctccttaaagaatgggggtcgttggagaacttgcttaagaatttagatcaggtcaaaccagagtcagtgcgtgagaagattcttgcacacctcgaagacctcaaattaagccgcgaattgtcccgtgtacgcaccgatttgccgctcgaagttgatttccgtggccgccgcgaacctgactgggagggtcttaaagcgtttttagagcgtcttgaatttggttcgctcttgcatgaattcggccttttagaaagcccgttaccagccgaagaagcaccttggccaccgcccgaaggcgcgtttttaggttaccgtttgagtcgcccggaaccgatgtgggccgaattattggctcttgcagcgtctgcccagggacgtgtgtatcgcgcggaagaccctcatggtgcgctccgcggcctcaaagaagtccgtggactccttgccaaagacttagctgttgttgcattgcgcgaaggtcttgatttacctccgactgatgatccaatgcttcttgcgtacctcttggacccgtcaaacacgacgcccgaaggcgtagcccgtcgttacggcggcgagtggaccgaagatgcaggcgagcgcgcgttattggccgaacgtttgcacgccaatttattaggacgtttgcaaggcgaggaacgtctcctctggctttacgaagaagtggagaaaccattgagtcgcgtgctcgcgcatatggaagctaccggtgtcaaattagacgtggcgtatttggaggcactcagccttgaagttgctgccgaaatgcgccgcttggaggaagaagtattccgtttagcaggccactcctttaaccttaattctcgcgatcagttagaacgtgtgttgttcgatgaacttggtctccctcctatcggcaagacagagacgaccggtaaacgtagcacttcagcggcggttttagaagctcttcgcgaagtccatcccattgtggacaagatcttgcagtaccgcgaactcgcgaaattgaaaggcacctatattgaccctcttccggcattagtccacccgaaaacgggacgcctccatacccgcttcaaccaaacagccacggcgaccggtcgtttgtcctcctctgatccaaaccttcagaatattccagtacgtaccccattgggccagaagatccgccgcgcgtttgtagctgaggagggttggcgtttagtggccctcgattatagccaaattgaattacgtgtccttgcccatctttctggcgatgagaacctcatccgcgtgtttcaggaaggcaaagacattcacactcaaacggcaagctggatgtttggattatcagctgaagcgatcgatcctttgatgcgtcgtgcagcgaagaccatcaatttcggtgttctctacggtatgagtgcccatcgtttgtcgcaggaattaggcattccctatgaagaagctgcggcgttcattcagcgctactttcaaagctatcccaaagttaaagcatggatcgagaagactctcgaagaaggccgcacacgtggttacgtagagaccttatttggacgtcgccgctatgttcccgatttaaacgctcgcgtgaaatctgtccgtgaagccgccgaacgcatggcgttcaacatgcctgtacagggcacggcagctgacctcatgaaacttgcaatggtgcgcctttttccacaattgcgtgaagttggtgcccgcatgctcttgcaggtccacgatgaactcttgttagaagcgccaaaagagcgtgcggaagaggtggcagccctcgcgaaagaggttatggaaggcgtgtggcccttagcggtgcctcttgaagtcgaagttggtattggcgaggattggttggctgccaaaggataatga

SEQ ID NO: 914 - protein, 841 aa, synthetic construct
  REGION 1..841: note = Variant of DNA polymerase I from Thermus sp. strain 2.9
MHHHHHHGGSGMLPLFEPKGRVLLVDGHHLAYRNFFALKGLTTSRGEPVQGVYGFAKSLLKALKEDGDVVIVVFDAKAPSFRHEAYEAYKAGRAPTPEDFPRQLALMKELVDLLGLERLEVPGFEADDVLATLAKKAEREGYEVQILTADRDLFQLLSPRISVLHPEGHRITPEWLWEKYGLRPEQWVDFRALAGDPSDNIPGVKGIGEKTALKLLKEWGSLENLLKNLDQVKPESVREKILAHLEDLKLSRELSRVRTDLPLEVDFRGRREPDWEGLKAFLERLEFGSLLHEFGLLESPLPAEEAPWPPPEGAFLGYRLSRPEPMWAELLALAASAQGRVYRAEDPHGALRGLKEVRGLLAKDLAVVALREGLDLPPTDDPMLLAYLLDPSNTTPEGVARRYGGEWTEDAGERALLAERLHANLLGRLQGEERLLWLYEEVEKPLSRVLAHMEATGVKLDVAYLEALSLEVAAEMRRLEEEVFRLAGHSFNLNSRDQLERVLFDELGLPPIGKTETTGKRSTSAAVLEALREVHPIVDKILQYRELAKLKGTYIDPLPALVHPKTGRLHTRFNQTATATGRLSSSDPNLQNIPVRTPLGQKIRRAFVAEEGWRLVALDYSQIELRVLAHLSGDENLIRVFQEGKDIHTQTASWMFGLSAEAIDPLMRRAAKTINFGVLYGMSAHRLSQELGIPYEEAAAFIQRYFQSYPKVKAWIEKTLEEGRTRGYVETLFGRRRYVPDLNARVKSVREAAERMAFNMPVQGTAADLMKLAMVRLFPQLREVGARMLLQVHDELLLEAPKERAEEVAALAKEVMEGVWPLAVPLEVEVGIGEDWLAAKG

SEQ ID NO: 915 - DNA, 2529 bp, synthetic construct
  misc_feature 1..2529: note = Variant of DNA polymerase I from Thermus sp. strain 2.9
  source 1..2529: mol_type = other DNA
atgcaccatcatcatcatcatggcggtagcggcatgttaccgttgttcgaacctaaaggtcgcgtgcttctggttgatggccatcatctcgcgtatcgtaacttctttgccctgaaaggattaaccaccagccgtggcgagccggtacagggtgtctacggctttgcaaagtcgctcctgaaagctctgaaagaagacggtgatgtggtgattgttgtctttgatgcgaaagcgccaagttttcgccacgaagcgtacgaagcttacaaagccgggcgtgctccaacgccggaagactttcctcgccaattggcgcttatgaaggaattagtggatttgcttggcctcgaacgcttggaagttcccggtttcgaggcagacgacgtattagcgactctcgcaaagaaagccgaacgtgagggctatgaagtccagatcttgacagcagatcgcgatcttttccagcttttatctccgcgcatctcggtgttacacccggaagggcatcgtatcaccccggaatggctctgggagaaatatggtttgcgtcccgaacaatgggtggattttcgcgccttagcaggcgatccgagcgacaatattccgggagttaaaggtatcggcgagaagacggcgctcaagctccttaaagaatgggggtcgttggagaacttgcttaagaatttagatcaggtcaaaccagagtcagtgcgtgagaagattcttgcacacctcgaagacctcaaattaagccgcgaattgtcccgtgtacgcaccgatttgccgctcgaagttgatttccgtggccgccgcgaacctgactgggagggtcttaaagcgtttttagagcgtcttgaatttggttcgctcttgcatgaattcggccttttagaaagcccgttaccagccgaagaagcaccttggccaccgcccgaaggcgcgtttttaggttaccgtttgagtcgcccggaaccgatgtgggccgaattattggctcttgcagcgtctgcccagggacgtgtgtatcgcgcggaagaccctcatggtgcgctccgcggcctcaaagaagtccgtggactccttgccaaagacttagctgttgttgcattgcgcgaaggtcttgatttacctccgactgatgatccaatgcttcttgcgtacctcttggacccgtcaaacacgacgcccgaaggcgtagcccgtcgttacggcggcgagtggaccgaagatgcaggcgagcgcgcgttattggccgaacgtttgcaccagaatttattaggacgtttgcaaggcgaggaacgtctcctctggctttacgaagaagtggagaaaccattgagtcgcgtgctcgctcatatggaagctaccggtgtcaaattagacgtggcgtatttggaggcactcagccttgaagttgctgccgaaatgcgccgcttggaggaagaagtattccgtttagcaggccactcctttaaccttaattctcgcgatcagttagaacgtgtgttgttcgatgaacttggtctccctcctatcggcaagacagagaagaccggtaaacgtagcacttcagcggcggttttagaagctcttcgcgaagtccatcccattgtggacaagatcttgcagtaccgcgaactcgcgaaattgaaaggcacctatattgaccctcttccggcattagtccacccgaaaacgggacgcctccatacccgcttcaaccaaacagccacggcgaccggtcgtttgtcctcctctgatccaaaccttcagaatattccagtacgtaccccattgggccagaagatccgccgcgcgtttgtagctgaggagggttggcgtttagtggccctcgattatagccaaattgaattacgtgtccttgcccatctttctggcgatgagaacctcatccgcgtgtttcaggaaggcaaagacattcacactcaaacggcaagctggatgtttggattatcagctgaagcgatcgatcctttgatgcgtcgtgcagcgaagaccatcaatttcggtgttctctacggtatgagtgccgctcgtttgtcgcaggaattaggcattccctatgaagaagctgcggcgttcattcagcgctactttcaaagctatcccaaagttaaagcatggatcgagaagactctcgaagaaggccgcacacgtggttacgtagagaccttatttggacgtcgccgctatgttcccgatttaaacgctcgcgtgaaatctgtccgtgaagccgccgaacgcatggcgttcaacatgcctgtacagggcacggcagctgacctcatgaaacttgcaatggtgcgcctttttccacaattgcgtgaagttggtgcccgcatgctcttgcaggtccacgatgaactcttgttagaagcgccaaaagagcgtgcggaagaggtggcagccctcgcgaaagaggttatggaaggcgtgtggcccttagcggtgcctcttgaagtcgaagttggtattggcgaggattggttggctgccaaaggataatga

SEQ ID NO: 916 - protein, 841 aa, synthetic construct
  REGION 1..841: note = Variant of DNA polymerase I from Thermus sp. strain 2.9
MHHHHHHGGSGMLPLFEPKGRVLLVDGHHLAYRNFFALKGLTTSRGEPVQGVYGFAKSLLKALKEDGDVVIVVFDAKAPSFRHEAYEAYKAGRAPTPEDFPRQLALMKELVDLLGLERLEVPGFEADDVLATLAKKAEREGYEVQILTADRDLFQLLSPRISVLHPEGHRITPEWLWEKYGLRPEQWVDFRALAGDPSDNIPGVKGIGEKTALKLLKEWGSLENLLKNLDQVKPESVREKILAHLEDLKLSRELSRVRTDLPLEVDFRGRREPDWEGLKAFLERLEFGSLLHEFGLLESPLPAEEAPWPPPEGAFLGYRLSRPEPMWAELLALAASAQGRVYRAEDPHGALRGLKEVRGLLAKDLAVVALREGLDLPPTDDPMLLAYLLDPSNTTPEGVARRYGGEWTEDAGERALLAERLHQNLLGRLQGEERLLWLYEEVEKPLSRVLAHMEATGVKLDVAYLEALSLEVAAEMRRLEEEVFRLAGHSFNLNSRDQLERVLFDELGLPPIGKTEKTGKRSTSAAVLEALREVHPIVDKILQYRELAKLKGTYIDPLPALVHPKTGRLHTRFNQTATATGRLSSSDPNLQNIPVRTPLGQKIRRAFVAEEGWRLVALDYSQIELRVLAHLSGDENLIRVFQEGKDIHTQTASWMFGLSAEAIDPLMRRAAKTINFGVLYGMSAARLSQELGIPYEEAAAFIQRYFQSYPKVKAWIEKTLEEGRTRGYVETLFGRRRYVPDLNARVKSVREAAERMAFNMPVQGTAADLMKLAMVRLFPQLREVGARMLLQVHDELLLEAPKERAEEVAALAKEVMEGVWPLAVPLEVEVGIGEDWLAAKG

SEQ ID NO: 917 - DNA, 2529 bp, synthetic construct
  misc_feature 1..2529: note = Variant of DNA polymerase I from Thermus sp. strain 2.9
  source 1..2529: mol_type = other DNA
atgcaccatcatcatcatcatggcggtagcggcatgttaccgttgttcgaacctaaaggtcgcgtgcttctggttgatggccatcatctcgcgtatcgtaacttctttgccctgaaaggattaaccaccagccgtggcgagccggtacagggtgtctacggctttgcaaagtcgctcctgaaagctctgaaagaagacggtgatgtggtgattgttgtctttgatgcgaaagcgccaagttttcgccacgaagcgtacgaagcttacaaagccgggcgtgctccaacgccggaagactttcctcgccaattggcgcttatgaaggaattagtggatttgcttggcctcgaacgcttggaagttcccggtttcgaggcagacgacgtattagcgactctcgcaaagaaagccgaacgtgagggctatgaagtccagatcttgacagcagatcgcgatcttttccagcttttatctccgcgcatctcggtgttacacccggaagggcatctgatcaccccggaatggctctgggagaaatatggtttgcgtcccgaacaatgggtggattttcgcgccttagccggcgatccgagcgacaatattccgggagttaaaggtatcggcgagaagacggcgctcaagctccttaaagaatgggggtcgttggagaacttgcttaagaatttagatcaggtcaaaccagagtcagtgcgtgagaagattcttgcacacctcgaagacctcaaattaagccgcgaattgtcccgtgtacgcaccgatttgccgctcgaagttgatttccgtggccgccgcgaacctgactgggagggtcttaaagcgtttttagagcgtcttgaatttggttcgctcttgcatgaattcggccttttagaaagcccgttaccagccgaagaagcaccttggccaccgcccgaaggcgcgtttttaggttaccgtttgagtcgcccggaaccgatgtgggccgaattattggctcttgcagcgtctgcccagggacgtgtgtatcgcgcggaagaccctcatggtgcgctccgcggcctcaaagaagtccgtggactccttgccaaagacttagctgttgttgcattgcgcgaaggtcttgatttacctccgactgatgatccaatgcttcttgcgtacctcttggacccgtcaaacacgacgcccgaaggcgtagcccgtcgttacggcggcgagtggaccgaagatgcaggcgagcgcgcgttattggccgaacgtttgcaccagaatttattaggacgtttgcaaggcgaggaacgtctcctctggctttacgaagaagtggagaaaccattgagtcgcgtgctccaccatatggaagctaccggtgtcaaattagacgtggcgtatttggaggcactcagccttgaagttgctgccgaaatgcgccgcttggaggaagaagtattccgtttagcaggccactcctttaaccttaattctcgcgatcagttagaacgtgtgttgttcgatgaacttggtctccctcctatcggcaagacagagaagaccggtaaacgtagcacttcagcggcggttttagaagctcttcgcgaagtccatcccattgtggacaagatcttgcagtaccgcgaactcgcgaaattgaaaggcacctatattgaccgtcttccggcattagtccacccgaaaacgggacgcctccatacccgcttcaaccaaacagccacggcgaccggtcgtttgtcctcctctgatccaaaccttcagaatattccagtacgtaccccattgggccagaagatccgccgcgcgtttgtagctgaggagggttggcgtttagtggccctcgattatagccaaattgaattacgtgtccttgcccatctttctggcgatgagaacctcatccgcgtgtttcaggaaggcaaagacattcacactcaaacggcaagctggatgtttggattatcagctgaagcgatcgatcctttgatgcgtcgtgcagcgaagaccatcaatttcggtgttctctacggtatgagtgcccaccgtttgtcgcaggaattaggcattccctatgaagaagctgcggcgttcattcagcgctactttcaaagctatcccaaagttaaagcatggatcgagaagactctcgaagaaggccgcacacgtggttacgtagagaccttatttggacgtcgccgctatgttcccgatttaaacgctcgcgtgaaatctgtccgtgaagccgccgaacgcatggcgttcaacatgcctgtacagggcacggcagctgacctcatgaaacttgcaatggtgcgcctttttccacaattgcgtgaagttggtgcccgcatgctcttgcaggtccacgatgaactcttgttagaagcgccaaaagagcgtgcggaagaggtggcagccctcgcgaaagaggttatggaaggcgtgtggcccttagcggtgcctcttgaagtcgaagttggtattggcgaggattggttggctgccaaaggataatga

SEQ ID NO: 918 - protein, 841 aa, synthetic construct
  REGION 1..841: note = Variant of DNA polymerase I from Thermus sp. strain 2.9
MHHHHHHGGSGMLPLFEPKGRVLLVDGHHLAYRNFFALKGLTTSRGEPVQGVYGFAKSLLKALKEDGDVVIVVFDAKAPSFRHEAYEAYKAGRAPTPEDFPRQLALMKELVDLLGLERLEVPGFEADDVLATLAKKAEREGYEVQILTADRDLFQLLSPRISVLHPEGHLITPEWLWEKYGLRPEQWVDFRALAGDPSDNIPGVKGIGEKTALKLLKEWGSLENLLKNLDQVKPESVREKILAHLEDLKLSRELSRVRTDLPLEVDFRGRREPDWEGLKAFLERLEFGSLLHEFGLLESPLPAEEAPWPPPEGAFLGYRLSRPEPMWAELLALAASAQGRVYRAEDPHGALRGLKEVRGLLAKDLAVVALREGLDLPPTDDPMLLAYLLDPSNTTPEGVARRYGGEWTEDAGERALLAERLHQNLLGRLQGEERLLWLYEEVEKPLSRVLHHMEATGVKLDVAYLEALSLEVAAEMRRLEEEVFRLAGHSFNLNSRDQLERVLFDELGLPPIGKTEKTGKRSTSAAVLEALREVHPIVDKILQYRELAKLKGTYIDRLPALVHPKTGRLHTRFNQTATATGRLSSSDPNLQNIPVRTPLGQKIRRAFVAEEGWRLVALDYSQIELRVLAHLSGDENLIRVFQEGKDIHTQTASWMFGLSAEAIDPLMRRAAKTINFGVLYGMSAHRLSQELGIPYEEAAAFIQRYFQSYPKVKAWIEKTLEEGRTRGYVETLFGRRRYVPDLNARVKSVREAAERMAFNMPVQGTAADLMKLAMVRLFPQLREVGARMLLQVHDELLLEAPKERAEEVAALAKEVMEGVWPLAVPLEVEVGIGEDWLAAKG

SEQ ID NO: 919 - DNA, 2529 bp, synthetic construct
  misc_feature 1..2529: note = Variant of DNA polymerase I from Thermus sp. strain 2.9
  source 1..2529: mol_type = other DNA
atgcaccatcatcatcatcatggcggtagcggcatgttaccgttgttcgaacctaaaggtcgcgtgcttctggttgatggccatcatctcgcgtatcgtaacttctttgccctgaaaggattaaccaccagccgtggcgagccggtacagggtgtctacggctttgcaaagtcgctcctgaaagctctgaaagaagacggtgatgtggtgattgttgtctttgatgcgaaagcgccaagttttcgccacgaagcgtacgaagcttacaaagccgggcgtgctccaacgccggaagactttcctcgccaattggcgcttatgaaggaattagtggatttgcttggcctcgaacgcttggaagttcccggtttcgaggcagacgacgtattagcgactctcgcaaagaaagccgaacgtgagggctatgaagtccagatcttgacagcagatcgcgatcttttccagcttttatctccgcgcatctcggtgttacacccggaagggcatcgtatcaccccggaatggctctgggagaaatatggtttgcgtcccgaacaatgggtggattttcgcgccttagcaggcgatccgagcgacaatattccgggagttaaaggtatcggcgagaagacggcgctcaagctccttaaagaatgggggtcgttggagaacttgcttaagaatttagatcaggtcaaaccagagtcagtgcgtgagaagattcttgcacacctcgaagacctcaaattaagccgcgaattgtcccgtgtacgcaccgatttgccgctcgaagttgatttccgtggccgccgcgaacctgactgggagggtcttaaagcgtttttagagcgtcttgaatttggttcgctcttgcatgaattcggccttttagaaagcccgttaccagccgaagaagcaccttggccaccgcccgaaggcgcgtttttaggttaccgtttgagtcgcccggaaccgatgtgggccgaattattggctcttgcagcgtctgcccagggacgtgtgtatcgcgcggaagaccctcatggtgcgctccgcggcctcaaagaagtccgtggactccttgccaaagacttagctgttgttgcattgcgcgaaggtcttgatttacctccgactgatgatccaatgcttcttgcgtacctcttggacccgtcaaacacgacgcccgaaggcgtagcccgtcgttacggcggcgagtggaccgaagatgcaggcgagcgcgcgttattggccgaacgtttgcaccagaatttattaggacgtttgcaaggcgaggaacgtctcctctggctttacgaagaagtggagaaaccattgagtcgcgtgctcgctcatatggaagctaccggtgtcaaattagacgtggcgtatttggaggcactcagccttgaagttgctgccgaactgcgccgcttggaggaagaagtattccgtttagcaggccactcctttaaccttaattctcgcgatcagttagaacgtgtgttgttcgatgaacttggtctccctcctatcggcaagacagagaagaccggtaaacgtagcacttcagcggcggttttagaagctcttcgcgaagtccatcccattgtggacaagatcttgcagtaccgcgaactcgcgaaattgaaaggcacctatattgaccctcttccggcattagtccacccgaaaacgggacgcctccatacccgcttcaaccaaacagccacggcgaccggtcgtttgtcctcctctgatccaaaccttcagaatattccagtacgtaccccattgggccagaagatccgccgcgcgtttgtagctgaggagggttggcgtttagtggccctcgattatagccaaattgaattacgtgtccttgcccatctttctggcgatgagaacctcatccgcgtgtttcaggaaggcaaagacattcacactcaaacggcaagctggatgtttggagtgtcgtcggaagcgatcgatcctttgatgcgtcgtgcagcgaagaccatcaatttcggtgttctctacggtatgagtgcccatcgtttgtcgcaggaattaggcattccctatgaagaagctgcggcgttcattcagcgctactttcaaagctatcccaaagttaaagcatggatcgagaagactctcgaagaaggccgcacacgtggttacgtagagaccttatttggacgtcgccgctatgttcccgatttaaccgctcgcgtgaaatctgtccgtgaagccgccgaacgcatggcgttcaacatgcctgtacagggcacggcagctgacctcatgaaacttgcaatggtgcgcctttttccacaattgcgtgaagttggtgcccgcatgctcttgcaggtccacgatgaactcttgttagaagcgccaaaagagcgtgcggaagaggtggcagccctcgcgaaagaggttatggaaggcgtgtggcccttagcggtgcctcttgaagtcgaagttggtattggcgaggattggttggctgccaaaggataatga

SEQ ID NO: 920 - protein, 841 aa, synthetic construct
  REGION 1..841: note = Variant of DNA polymerase I from Thermus sp. strain 2.9
MHHHHHHGGSGMLPLFEPKGRVLLVDGHHLAYRNFFALKGLTTSRGEPVQGVYGFAKSLLKALKEDGDVVIVVFDAKAPSFRHEAYEAYKAGRAPTPEDFPRQLALMKELVDLLGLERLEVPGFEADDVLATLAKKAEREGYEVQILTADRDLFQLLSPRISVLHPEGHRITPEWLWEKYGLRPEQWVDFRALAGDPSDNIPGVKGIGEKTALKLLKEWGSLENLLKNLDQVKPESVREKILAHLEDLKLSRELSRVRTDLPLEVDFRGRREPDWEGLKAFLERLEFGSLLHEFGLLESPLPAEEAPWPPPEGAFLGYRLSRPEPMWAELLALAASAQGRVYRAEDPHGALRGLKEVRGLLAKDLAVVALREGLDLPPTDDPMLLAYLLDPSNTTPEGVARRYGGEWTEDAGERALLAERLHQNLLGRLQGEERLLWLYEEVEKPLSRVLAHMEATGVKLDVAYLEALSLEVAAELRRLEEEVFRLAGHSFNLNSRDQLERVLFDELGLPPIGKTEKTGKRSTSAAVLEALREVHPIVDKILQYRELAKLKGTYIDPLPALVHPKTGRLHTRFNQTATATGRLSSSDPNLQNIPVRTPLGQKIRRAFVAEEGWRLVALDYSQIELRVLAHLSGDENLIRVFQEGKDIHTQTASWMFGVSSEAIDPLMRRAAKTINFGVLYGMSAHRLSQELGIPYEEAAAFIQRYFQSYPKVKAWIEKTLEEGRTRGYVETLFGRRRYVPDLTARVKSVREAAERMAFNMPVQGTAADLMKLAMVRLFPQLREVGARMLLQVHDELLLEAPKERAEEVAALAKEVMEGVWPLAVPLEVEVGIGEDWLAAKG

SEQ ID NO: 921 - DNA, 2529 bp, synthetic construct
  misc_feature 1..2529: note = Variant of DNA polymerase I from Thermus sp. strain 2.9
  source 1..2529: mol_type = other DNA
atgcaccatcatcatcatcatggcggtagcggcatgttaccgttgttcgaacctaaaggtcgcgtgcttctggttgatggccatcatctcgcgtatcgtaacttctttgccctgaaaggattaaccaccagccgtggcgagccggtacagggtgtctacggctttgcaaagtcgctcctgaaagctctgaaagaagacggtgatgtggtgattgttgtctttgatgcgaaagcgccaagttttcgccacgaagcgtacgaagcttacaaagccgggcgtgctccaacgccggaagactttcctcgccaattggcgcttatgaaggaattagtggatttgcttggcctcgaacgcttggaagttcccggtttcgaggcagacgacgtattagcgactctcgcaaagaaagccgaacgtgagggctatgaagtccagatcttgacagcagatcgcgatcttttccagcttttatctccgcgcatctcggtgttacacccggaagggcatcgtatcaccccggaatggctctgggagaaatatggtttgcgtcccgaacaatgggtggattttcgcgccttagccggcgatccgagcgacaatattccgggagttaaaggtatcggcgagaagacggcgctcaagctccttaaagaatgggggtcgttggagaacttgcttaagaatttagatcaggtcaaaccagagtcagtgcgtgagaagattcttgcacacctcgaagacctcaaattaagccgcgaattgtcccgtgtacgcaccgatttgccgctcgaagttgatttccgtggccgccgcgaacctgactgggagggtcttaaagcgtttttagagcgtcttgaatttggttcgctcttgcatgaattcggccttttagaaagcccgttaccagccgaagaagcaccttggccaccgcccgaaggcgcgtttttaggttaccgtttgagtcgcccggaaccgatgtgggccgaattattggctcttgcagcgtctgcccagggacgtgtgtatcgcgcggaagaccctcatggtgcgctccgcggcctcaaagaagtccgtggactccttgccaaagacttagctgttgttgcattgcgcgaaggtcttgatttacctccgactgatgatccaatgcttcttgcgtacctcttggacccgtcaaacacgacgcccgaaggcgtagcccgtcgttacggcggcgagtggaccgaagatgcaggcgagcgcgcgttattggccgaacgtttgcaccagaatttattaggacgtttgcaaggcgaggaacgtctcctctggctttacgaagaagtggagaaaccattgagtcgcgtgctccaccatatggaagctaccggtgtcaaattagacgtggcgtatttggaggcactcagccttgaagttgctgccgaactgcgccgcttggaggaagaagtattccgtttagcaggccactcctttaaccttaattctcgcgatcagttagaacgtgtgttgttcgatgaacttggtctccctcctatcggcaagacagagaagaccggtaaacgtagcacttcagcggcggttttagaagctcttcgcgaagtccatcccattgtggacaagatcttgcagtaccgcgaactcgcgaaattgaaaggcacctatattgaccgtcttccggcattagtccacccgaaaacgggacgcctccatacccgcttcaaccaaacagccacggcgaccggtcgtttgtcctcctctgatccaaaccttcagaatattccagtacgtaccccattgggccagaagatccgccgcgcgtttgtagctgaggagggttggcgtttagtggccctcgattatagccaaattgaattacgtgtccttgcccatctttctggcgatgagaacctcatccgcgtgtttcaggaaggcaaagacattcacactcaaacggcaagctggatgtttggagtgtcggcggaagcgatcgatcctttgatgcgtcgtgcagcgaagaccatcaatttcggtgttctctacggtatgagtgccgctcgtttgtcgcaggaattaggcattccctatgaagaagctgcggcgttcattcagcgctactttcaaagctatcccaaagttaaagcatggatcgagaagactctcgaagaaggccgcacacgtggttacgtagagaccttatttggacgtcgccgctatgttcccgatttaaacgctcgcgtgaaatctgtccgtgaagccgccgaacgcatggcgttcaacatgcctgtacagggcacggcagctgacctcatgaaacttgcaatggtgcgcctttttccacaattgcgtgaagttggtgcccgcatgctcttgcaggtccacgatgaactcttgttagaagcgccaaaagagcgtgcggaagaggtggcagccctcgcgaaagaggttatggaaggcgtgtggcccttagcggtgcctcttgaagtcgaagttggtattggcgaggattggttggctgccaaaggataatga

SEQ ID NO: 922 - protein, 841 aa, synthetic construct
  REGION 1..841: note = Variant of DNA polymerase I from Thermus sp. strain 2.9
MHHHHHHGGSGMLPLFEPKGRVLLVDGHHLAYRNFFALKGLTTSRGEPVQGVYGFAKSLLKALKEDGDVVIVVFDAKAPSFRHEAYEAYKAGRAPTPEDFPRQLALMKELVDLLGLERLEVPGFEADDVLATLAKKAEREGYEVQILTADRDLFQLLSPRISVLHPEGHRITPEWLWEKYGLRPEQWVDFRALAGDPSDNIPGVKGIGEKTALKLLKEWGSLENLLKNLDQVKPESVREKILAHLEDLKLSRELSRVRTDLPLEVDFRGRREPDWEGLKAFLERLEFGSLLHEFGLLESPLPAEEAPWPPPEGAFLGYRLSRPEPMWAELLALAASAQGRVYRAEDPHGALRGLKEVRGLLAKDLAVVALREGLDLPPTDDPMLLAYLLDPSNTTPEGVARRYGGEWTEDAGERALLAERLHQNLLGRLQGEERLLWLYEEVEKPLSRVLHHMEATGVKLDVAYLEALSLEVAAELRRLEEEVFRLAGHSFNLNSRDQLERVLFDELGLPPIGKTEKTGKRSTSAAVLEALREVHPIVDKILQYRELAKLKGTYIDRLPALVHPKTGRLHTRFNQTATATGRLSSSDPNLQNIPVRTPLGQKIRRAFVAEEGWRLVALDYSQIELRVLAHLSGDENLIRVFQEGKDIHTQTASWMFGVSAEAIDPLMRRAAKTINFGVLYGMSAARLSQELGIPYEEAAAFIQRYFQSYPKVKAWIEKTLEEGRTRGYVETLFGRRRYVPDLNARVKSVREAAERMAFNMPVQGTAADLMKLAMVRLFPQLREVGARMLLQVHDELLLEAPKERAEEVAALAKEVMEGVWPLAVPLEVEVGIGEDWLAAKG

SEQ ID NO: 923 - DNA, 2529 bp, synthetic construct
  misc_feature 1..2529: note = Variant of DNA polymerase I from Thermus sp. strain 2.9
  source 1..2529: mol_type = other DNA
atgcaccatcatcatcatcatggcggtagcggcatgttaccgttgttcgaacctaaaggtcgcgtgcttctggttgatggccatcatctcgcgtatcgtaacttctttgccctgaaaggattaaccaccagccgtggcgagccggtacagggtgtctacggctttgcaaagtcgctcctgaaagctctgaaagaagacggtgatgtggtgattgttgtctttgatgcgaaagcgccaagttttcgccacgaagcgtacgaagcttacaaagccgggcgtgctccaacgccggaagactttcctcgccaattggcgcttatgaaggaattagtggatttgcttggcctcgaacgcttggaagttcccggtttcgaggcagacgacgtattagcgactctcgcaaagaaagccgaacgtgagggctatgaagtccagatcttgacagcagatcgcgatcttttccagcttttatctccgcgcatctcggtgttacacccggaagggcatctgatcaccccggaatggctctgggagaaatatggtttgcgtcccgaacaatgggtggattttcgcgccttagcaggcgatccgagcgacaatattccgggagttaaaggtatcggcgagaagacggcgctcaagctccttaaagaatgggggtcgttggagaacttgcttaagaatttagatcaggtcaaaccagagtcagtgcgtgagaagattcttgcacacctcgaagacctcaaattaagccgcgaattgtcccgtgtacgcaccgatttgccgctcgaagttgatttccgtggccgccgcgaacctgactgggagggtcttaaagcgtttttagagcgtcttgaatttggttcgctcttgcatgaattcggccttttagaaagcccgttaccagccgaagaagcaccttggccaccgcccgaaggcgcgtttttaggttaccgtttgagtcgcccggaaccgatgtgggccgaattattggctcttgcagcgtctgcccagggacgtgtgtatcgcgcggaagaccctcatggtgcgctccgcggcctcaaagaagtccgtggactccttgccaaagacttagctgttgttgcattgcgcgaaggtcttgatttacctccgactgatgatccaatgcttcttgcgtacctcttggacccgtcaaacacgacgcccgaaggcgtagcccgtcgttacggcggcgagtggaccgaagatgcaggcgagcgcgcgttattggccgaacgtttgcaccagaatttattaggacgtttgcaaggcgaggaacgtctcctctggctttacgaagaagtggagaaaccattgagtcgcgtgctcgcgcatatggaagctaccggtgtcaaattagacgtggcgtatttggaggcactcagccttgaagttgctgccgaactgcgccgcttggaggaagaagtattccgtttagcaggccactcctttaaccttaattctcgcgatcagttagaacgtgtgttgttcgatgaacttggtctccctcctatcggcaagacagagaagaccggtaaacgtagcacttcagcggcggttttagaagctcttcgcgaagtccatcccattgtggacaagatcttgcagtaccgcgaactcgcgaaattgaaaggcacctatattgaccctcttccggcattagtccacccgaaaacgggacgcctccatacccgcttcaaccaaacagccacggcgaccggtcgtttgtcctcctctgatccaaaccttcagaatattccagtacgtaccccattgggccagaagatccgccgcgcgtttgtagctgaggagggttggcgtttagtggccctcgattatagccaaattgaattacgtgtccttgcccatctttctggcgatgagaacctcatccgcgtgtttcaggaaggcaaagacattcacactcaaacggcaagctggatgtttggactgtcggcggaagcgatcgatcctttgatgcgtcgtgcagcgaagaccatcaatttcggtgttctctacggtatgagtgccgctcgtttgtcgcaggaattaggcattccctatgaagaagctgcggcgttcattcagcgctactttcaaagctatcccaaagttaaagcatggatcgagaagactctcgaagaaggccgcacacgtggttacgtagagaccttatttggacgtcgccgctatgttcccgatttaaacgctcgcgtgaaatctgtccgtgaagccgccgaacgcatggcgttcaacatgcctgtacagggcacggcagctgacctcatgaaacttgcaatggtgcgcctttttccacaattgcgtgaagttggtgcccgcatgctcttgcaggtccacgatgaactcttgttagaagcgccaaaagagcgtgcggaagaggtggcagccctcgcgaaagaggttatggaaggcgtgtggcccttagcggtgcctcttgaagtcgaagttggtattggcgaggattggttggctgccaaaggataatga

SEQ ID NO: 924 - protein, 841 aa, synthetic construct
  REGION 1..841: note = Variant of DNA polymerase I from Thermus sp. strain 2.9
MHHHHHHGGSGMLPLFEPKGRVLLVDGHHLAYRNFFALKGLTTSRGEPVQGVYGFAKSLLKALKEDGDVVIVVFDAKAPSFRHEAYEAYKAGRAPTPEDFPRQLALMKELVDLLGLERLEVPGFEADDVLATLAKKAEREGYEVQILTADRDLFQLLSPRISVLHPEGHLITPEWLWEKYGLRPEQWVDFRALAGDPSDNIPGVKGIGEKTALKLLKEWGSLENLLKNLDQVKPESVREKILAHLEDLKLSRELSRVRTDLPLEVDFRGRREPDWEGLKAFLERLEFGSLLHEFGLLESPLPAEEAPWPPPEGAFLGYRLSRPEPMWAELLALAASAQGRVYRAEDPHGALRGLKEVRGLLAKDLAVVALREGLDLPPTDDPMLLAYLLDPSNTTPEGVARRYGGEWTEDAGERALLAERLHQNLLGRLQGEERLLWLYEEVEKPLSRVLAHMEATGVKLDVAYLEALSLEVAAELRRLEEEVFRLAGHSFNLNSRDQLERVLFDELGLPPIGKTEKTGKRSTSAAVLEALREVHPIVDKILQYRELAKLKGTYIDPLPALVHPKTGRLHTRFNQTATATGRLSSSDPNLQNIPVRTPLGQKIRRAFVAEEGWRLVALDYSQIELRVLAHLSGDENLIRVFQEGKDIHTQTASWMFGLSAEAIDPLMRRAAKTINFGVLYGMSAARLSQELGIPYEEAAAFIQRYFQSYPKVKAWIEKTLEEGRTRGYVETLFGRRRYVPDLNARVKSVREAAERMAFNMPVQGTAADLMKLAMVRLFPQLREVGARMLLQVHDELLLEAPKERAEEVAALAKEVMEGVWPLAVPLEVEVGIGEDWLAAKG

SEQ ID NO: 925 - DNA, 2529 bp, synthetic construct
  misc_feature 1..2529: note = Variant of DNA polymerase I from Thermus sp. strain 2.9
  source 1..2529: mol_type = other DNA
atgcaccatcatcatcatcatggcggtagcggcatgttaccgttgttcgaacctaaaggtcgcgtgcttctggttgatggccatcatctcgcgtatcgtaacttctttgccctgaaaggattaaccaccagccgtggcgagccggtacagggtgtctacggctttgcaaagtcgctcctgaaagctctgaaagaagacggtgatgtggtgattgttgtctttgatgcgaaagcgccaagttttcgccacgaagcgtacgaagcttacaaagccgggcgtgctccaacgccggaagactttcctcgccaattggcgcttatgaaggaattagtggatttgcttggcctcgaacgcttggaagttcccggtttcgaggcagacgacgtattagcgactctcgcaaagaaagccgaacgtgagggctatgaagtccagatcttgacagcagatcgcgatcttttccagcttttatctccgcgcatctcggtgttacacccggaagggcatcgtatcaccccggaatggctctgggagaaatatggtttgcgtcccgaacaatgggtggattttcgcgccttagcaggcgatccgagcgacaatattccgggagttaaaggtatcggcgagaagacggcgctcaagctccttaaagaatgggggtcgttggagaacttgcttaagaatttagatcaggtcaaaccagagtcagtgcgtgagaagattcttgcacacctcgaagacctcaaattaagccgcgaattgtcccgtgtacgcaccgatttgccgctcgaagttgatttccgtggccgccgcgaacctgactgggagggtcttaaagcgtttttagagcgtcttgaatttggttcgctcttgcatgaattcggccttttagaaagcccgttaccagccgaagaagcaccttggccaccgcccgaaggcgcgtttttaggttaccgtttgagtcgcccggaaccgatgtgggccgaattattggctcttgcagcgtctgcccagggacgtgtgtatcgcgcggaagaccctcatggtgcgctccgcggcctcaaagaagtccgtggactccttgccaaagacttagctgttgttgcattgcgcgaaggtcttgatttacctccgactgatgatccaatgcttcttgcgtacctcttggacccgtcaaacacgacgcccgaaggcgtagcccgtcgttacggcggcgagtggaccgaagatgcaggcgagcgcgcgttattggccgaacgtttgcacgccaatttattaggacgtttgcaaggcgaggaacgtctcctctggctttacgaagaagtggagaaaccattgagtcgcgtgctcgcgcatatggaagctaccggtgtcaaattagacgtggcgtatttggaggcactcagccttgaagttgctgccgaaatgcgccgcttggaggaagaagtattccgtttagcaggccactcctttaaccttaattctcgcgatcagttagaacgtgtgttgttcgatgaacttggtctccctcctatcggcaagacagagaagaccggtaaacgtagcacttcagcggcggttttagaagctcttcgcgaagcgcatcccattgtggacaagatcttgcagtaccgcgaactcgcgaaattgaaaggcacctatattgaccctcttccggcattagtccacccgaaaacgggacgcctccatacccgcttcaaccaaacagccacggcgaccggtcgtttgtcctcctctgatccaaaccttcagaatattccagtacgtaccccattgggccagaagatccgccgcgcgtttgtagctgaggagggttggcgtttagtggccctcgattatagccaaattgaattacgtgtccttgcccatctttctggcgatgagaacctcatccgcgtgtttcaggaaggcaaagacattcacactcaaacggcaagctggatgtttggattatcagctgaagcgatcgatcctttgatgcgtcgtgcagcgaagaccatcaatttcggtgttctctacggtatgagtgcccatcgtttgtcgcaggaattaggcattccctatgaagaagctgcggcgttcattcagcgctactttcaaagctatcccaaagttaaagcatggatcgagaagactctcgaagaaggccgcacacgtggttacgtagagaccttatttggacgtcgccgctatgttcccgatttaaacgctcgcgtgaaatctgtccgtgaagccgccgaacgcatggcgttcaacatgcctgtacagggcacggcagctgacctcatgaaacttgcaatggtgcgcctttttccacaattgcgtgaagttggtgcccgcatgctcttgcaggtccacgatgaactcttgttagaagcgccaaaagagcgtgcggaagaggtggcagccctcgcgaaagaggttatggaaggcgtgtggcccttagcggtgcctcttgaagtcgaagttggtattggcgaggattggttggctgccaaaggataatga

SEQ ID NO: 926 - protein, 841 aa, synthetic construct
  REGION 1..841: note = Variant of DNA polymerase I from Thermus sp. strain 2.9
MHHHHHHGGSGMLPLFEPKGRVLLVDGHHLAYRNFFALKGLTTSRGEPVQGVYGFAKSLLKALKEDGDVVIVVFDAKAPSFRHEAYEAYKAGRAPTPEDFPRQLALMKELVDLLGLERLEVPGFEADDVLATLAKKAEREGYEVQILTADRDLFQLLSPRISVLHPEGHRITPEWLWEKYGLRPEQWVDFRALAGDPSDNIPGVKGIGEKTALKLLKEWGSLENLLKNLDQVKPESVREKILAHLEDLKLSRELSRVRTDLPLEVDFRGRREPDWEGLKAFLERLEFGSLLHEFGLLESPLPAEEAPWPPPEGAFLGYRLSRPEPMWAELLALAASAQGRVYRAEDPHGALRGLKEVRGLLAKDLAVVALREGLDLPPTDDPMLLAYLLDPSNTTPEGVARRYGGEWTEDAGERALLAERLHANLLGRLQGEERLLWLYEEVEKPLSRVLAHMEATGVKLDVAYLEALSLEVAAEMRRLEEEVFRLAGHSFNLNSRDQLERVLFDELGLPPIGKTEKTGKRSTSAAVLEALREAHPIVDKILQYRELAKLKGTYIDPLPALVHPKTGRLHTRFNQTATATGRLSSSDPNLQNIPVRTPLGQKIRRAFVAEEGWRLVALDYSQIELRVLAHLSGDENLIRVFQEGKDIHTQTASWMFGLSAEAIDPLMRRAAKTINFGVLYGMSAHRLSQELGIPYEEAAAFIQRYFQSYPKVKAWIEKTLEEGRTRGYVETLFGRRRYVPDLNARVKSVREAAERMAFNMPVQGTAADLMKLAMVRLFPQLREVGARMLLQVHDELLLEAPKERAEEVAALAKEVMEGVWPLAVPLEVEVGIGEDWLAAKG

SEQ ID NO: 927 - DNA, 2529 bp, synthetic construct
  misc_feature 1..2529: note = Variant of DNA polymerase I from Thermus sp. strain 2.9
  source 1..2529: mol_type = other DNA
atgcaccatcatcatcatcatggcggtagcggcatgttaccgttgttcgaacctaaaggtcgcgtgcttctggttgatggccatcatctcgcgtatcgtaacttctttgccctgaaaggattaaccaccagccgtggcgagccggtacagggtgtctacggctttgcaaagtcgctcctgaaagctctgaaagaagacggtgatgtggtgattgttgtctttgatgcgaaagcgccaagttttcgccacgaagcgtacgaagcttacaaagccgggcgtgctccaacgccggaagactttcctcgccaattggcgcttatgaaggaattagtggatttgcttggcctcgaacgcttggaagttcccggtttcgaggcagacgacgtattagcgactctcgcaaagaaagccgaacgtgagggctatgaagtccagatcttgacagcagatcgcgatcttttccagcttttatctccgcgcatctcggtgttacacccggaagggcatcgtatcaccccggaatggctctgggagaaatatggtttgcgtcccgaacaatgggtggattttcgcgccttagcaggcgatccgagcgacaatattccgggagttaaaggtatcggcgagaagacggcgctcaagctccttaaagaatgggggtcgttggagaacttgcttaagaatttagatcaggtcaaaccagagtcagtgcgtgagaagattcttgcacacctcgaagacctcaaattaagccgcgaattgtcccgtgtacgcaccgatttgccgctcgaagttgatttccgtggccgccgcgaacctgactgggagggtcttaaagcgtttttagagcgtcttgaatttggttcgctcttgcatgaattcggccttttagaaagcccgttaccagccgaagaagcaccttggccaccgcccgaaggcgcgtttttaggttaccgtttgagtcgcccggaaccgatgtgggccgaattattggctcttgcagcgtctgcccagggacgtgtgtatcgcgcggaagaccctcatggtgcgctccgcggcctcaaagaagtccgtggactccttgccaaagacttagctgttgttgcattgcgcgaaggtcttgatttacctccgactgatgatccaatgcttcttgcgtacctcttggacccgtcaaacacgacgcccgaaggcgtagcccgtcgttacggcggcgagtggaccgaagatgcaggcgagcgcgcgttattggccgaacgtttgcacgccaatttattaggacgtttgcaaggcgaggaacgtctcctctggctttacgaagaagtggagaaaccattgagtcgcgtgctcgcgcatatggaagctaccggtgtcaaattagacgtggcgtatttggaggcactcagccttgaagttgctgccgaaatgcgccgcttggaggaagaagtattccgtttagcaggccactcctttaaccttaattctcgcgatcagttagaacgtgtgttgttcgatgaacttggtctccctcctatcggcaagacagagaagaccggtaaacgtagcacttcagcggcggttttagaagctcttcgcgaagtccatcccattgtggacaagatcttgcagtaccgcgaactcgcgaaattgaaaggcacctatattgaccgtcttccggcattagtccacccgaaaacgggacgcctccatacccgcttcaaccaaacagccacggcgaccggtcgtttgtcctcctctgatccaaaccttcagaatattccagtacgtaccccattgggccagaagatccgccgcgcgtttgtagctgaggagggttggcgtttagtggccctcgattatagccaaattgaattacgtgtccttgcccatctttctggcgatgagaacctcatccgcgtgtttcaggaaggcaaagacattcacactcaaacggcaagctggatgtttggagtgccgtcggaagcgatcgatcctttgatgcgtcgtgcagcgaagaccatcaatttcggtgttctctacggtatgagtgcccatcgtttgtcgcaggaattaggcattccctatgaagaagctgcggcgttcattcagcgctactttcaaagctatcccaaagttaaagcatggatcgagaagactctcgaagaaggccgcacacgtggttacgtagagaccttatttggacgtcgccgctatgttcccgatttaaacgctcgcgtgaaatctgtccgtgaagccgccgaacgcatggcgttcaacatgcctgtacagggcacggcagctgacctcatgaaacttgcaatggtgcgcctttttccacaattgcgtgaagttggtgcccgcatgctcttgcaggtccacgatgaactcttgttagaagcgccaaaagagcgtgcggaagaggtggcagccctcgcgaaagaggttatggaaggcgtgtggcccttagcggtgcctcttgaagtcgaagttggtattggcgaggattggttggctgccaaaggataatga

SEQ ID NO: 928 - protein, 841 aa, synthetic construct
  REGION 1..841: note = Variant of DNA polymerase I from Thermus sp. strain 2.9
MHHHHHHGGSGMLPLFEPKGRVLLVDGHHLAYRNFFALKGLTTSRGEPVQGVYGFAKSLLKALKEDGDVVIVVFDAKAPSFRHEAYEAYKAGRAPTPEDFPRQLALMKELVDLLGLERLEVPGFEADDVLATLAKKAEREGYEVQILTADRDLFQLLSPRISVLHPEGHRITPEWLWEKYGLRPEQWVDFRALAGDPSDNIPGVKGIGEKTALKLLKEWGSLENLLKNLDQVKPESVREKILAHLEDLKLSRELSRVRTDLPLEVDFRGRREPDWEGLKAFLERLEFGSLLHEFGLLESPLPAEEAPWPPPEGAFLGYRLSRPEPMWAELLALAASAQGRVYRAEDPHGALRGLKEVRGLLAKDLAVVALREGLDLPPTDDPMLLAYLLDPSNTTPEGVARRYGGEWTEDAGERALLAERLHANLLGRLQGEERLLWLYEEVEKPLSRVLAHMEATGVKLDVAYLEALSLEVAAEMRRLEEEVFRLAGHSFNLNSRDQLERVLFDELGLPPIGKTEKTGKRSTSAAVLEALREVHPIVDKILQYRELAKLKGTYIDRLPALVHPKTGRLHTRFNQTATATGRLSSSDPNLQNIPVRTPLGQKIRRAFVAEEGWRLVALDYSQIELRVLAHLSGDENLIRVFQEGKDIHTQTASWMFGVPSEAIDPLMRRAAKTINFGVLYGMSAHRLSQELGIPYEEAAAFIQRYFQSYPKVKAWIEKTLEEGRTRGYVETLFGRRRYVPDLNARVKSVREAAERMAFNMPVQGTAADLMKLAMVRLFPQLREVGARMLLQVHDELLLEAPKERAEEVAALAKEVMEGVWPLAVPLEVEVGIGEDWLAAKG

SEQ ID NO: 929 - DNA, 2529 bp, synthetic construct
  misc_feature 1..2529: note = Variant of DNA polymerase I from Thermus sp. strain 2.9
  source 1..2529: mol_type = other DNA
atgcaccatcatcatcatcatggcggtagcggcatgttaccgttgttcgaacctaaaggtcgcgtgcttctggttgatggccatcatctcgcgtatcgtaacttctttgccctgaaaggattaaccaccagccgtggcgagccggtacagggtgtctacggctttgcaaagtcgctcctgaaagctctgaaagaagacggtgatgtggtgattgttgtctttgatgcgaaagcgccaagttttcgccacgaagcgtacgaagcttacaaagccgggcgtgctccaacgccggaagactttcctcgccaattggcgcttatgaaggaattagtggatttgcttggcctcgaacgcttggaagttcccggtttcgaggcagacgacgtattagcgactctcgcaaagaaagccgaacgtgagggctatgaagtccagatcttgacagcagatcgcgatcttttccagcttttatctccgcgcatctcggtgttacacccggaagggcatcgtatcaccccggaatggctctgggagaaatatggtttgcgtcccgaacaatgggtggattttcgcgccttagcaggcgatccgagcgacaatattccgggagttaaaggtatcggcgagaagacggcgctcaagctccttaaagaatgggggtcgttggagaacttgcttaagaatttagatcaggtcaaaccagagtcagtgcgtgagaagattcttgcacacctcgaagacctcaaattaagccgcgaattgtcccgtgtacgcaccgatttgccgctcgaagttgatttccgtggccgccgcgaacctgactgggagggtcttaaagcgtttttagagcgtcttgaatttggttcgctcttgcatgaattcggccttttagaaagcccgttaccagccgaagaagcaccttggccaccgcccgaaggcgcgtttttaggttaccgtttgagtcgcccggaaccgatgtgggccgaattattggctcttgcagcgtctgcccagggacgtgtgtatcgcgcggaagaccctcatggtgcgctccgcggcctcaaagaagtccgtggactccttgccaaagacttagctgttgttgcattgcgcgaaggtcttgatttacctccgactgatgatccaatgcttcttgcgtacctcttggacccgtcaaacacgacgcccgaaggcgtagcccgtcgttacggcggcgagtggaccgaagatgcaggcgagcgcgcgttattggccgaacgtttgcacgcaaatttattaggacgtttgcaaggcgaggaacgtctcctctggctttacgaagaagtggagaaaccattgagtcgcgtgctcgctcatatggaagctaccggtgtcaaattagacgtggcgtatttggaggcactcagccttgaagttgctgccgaactgcgccgcttggaggaagaagtattccgtttagcaggccactcctttaaccttaattctcgcgatcagttagaacgtgtgttgttcgatgaacttggtctccctcctatcggcaagacagagaagaccggtaaacgtagcacttcagcggcggttttagaagctcttcgcgaagtccatcccattgtggacaagatcttgcagtaccgcgaactcgcgaaattgaaaggcacctatattgaccgtcttccggcattagtccacccgaaaacgggacgcctccatacccgcttcaaccaaacagccacggcgaccggtcgtttgtcctcctctgatccaaaccttcagaatattccagtacgtaccccattgggccagaagatccgccgcgcgtttgtagctgaggagggttggcgtttagtggccctcgattatagccaaattgaattacgtgtccttgcccatctttctggcgatgagaacctcatccgcgtgtttcaggaaggcaaagacattcacactcaaacggcaagctggatgtttggactgccgtcggaagcgatcgatcctttgatgcgtcgtgcagcgaagaccatcaatttcggtgttctctacggtatgagtgcccatcgtttgtcgcaggaattaggcattccctatgaagaagctgcggcgttcattcagcgctactttcaaagctatcccaaagttaaagcatggatcgagaagactctcgaagaaggccgcacacgtggttacgtagagaccttatttggacgtcgccgctatgttcccgatttaaacgctcgcgtgaaatctgtccgtgaagccgccgaacgcatggcgttcaacatgcctgtacagggcacggcagctgacctcatgaaacttgcaatggtgcgcctttttccacaattgcgtgaagttggtgcccgcatgctcttgcaggtccacgatgaactcttgttagaagcgccaaaagagcgtgcggaagaggtggcagccctcgcgaaagaggttatggaaggcgtgtggcccttagcggtgcctcttgaagtcgaagttggtattggcgaggattggttggctgccaaaggataatga

SEQ ID NO: 930 - protein, 841 aa, synthetic construct
  REGION 1..841: note = Variant of DNA polymerase I from Thermus sp. strain 2.9
MHHHHHHGGSGMLPLFEPKGRVLLVDGHHLAYRNFFALKGLTTSRGEPVQGVYGFAKSLLKALKEDGDVVIVVFDAKAPSFRHEAYEAYKAGRAPTPEDFPRQLALMKELVDLLGLERLEVPGFEADDVLATLAKKAEREGYEVQILTADRDLFQLLSPRISVLHPEGHRITPEWLWEKYGLRPEQWVDFRALAGDPSDNIPGVKGIGEKTALKLLKEWGSLENLLKNLDQVKPESVREKILAHLEDLKLSRELSRVRTDLPLEVDFRGRREPDWEGLKAFLERLEFGSLLHEFGLLESPLPAEEAPWPPPEGAFLGYRLSRPEPMWAELLALAASAQGRVYRAEDPHGALRGLKEVRGLLAKDLAVVALREGLDLPPTDDPMLLAYLLDPSNTTPEGVARRYGGEWTEDAGERALLAERLHANLLGRLQGEERLLWLYEEVEKPLSRVLAHMEATGVKLDVAYLEALSLEVAAELRRLEEEVFRLAGHSFNLNSRDQLERVLFDELGLPPIGKTEKTGKRSTSAAVLEALREVHPIVDKILQYRELAKLKGTYIDRLPALVHPKTGRLHTRFNQTATATGRLSSSDPNLQNIPVRTPLGQKIRRAFVAEEGWRLVALDYSQIELRVLAHLSGDENLIRVFQEGKDIHTQTASWMFGLPSEAIDPLMRRAAKTINFGVLYGMSAHRLSQELGIPYEEAAAFIQRYFQSYPKVKAWIEKTLEEGRTRGYVETLFGRRRYVPDLNARVKSVREAAERMAFNMPVQGTAADLMKLAMVRLFPQLREVGARMLLQVHDELLLEAPKERAEEVAALAKEVMEGVWPLAVPLEVEVGIGEDWLAAKG

SEQ ID NO: 931 - DNA, 2529 bp, synthetic construct
  misc_feature 1..2529: note = Variant of DNA polymerase I from Thermus sp. strain 2.9
  source 1..2529: mol_type = other DNA
atgcaccatcatcatcatcatggcggtagcggcatgttaccgttgttcgaacctaaaggtcgcgtgcttctggttgatggccatcatctcgcgtatcgtaacttctttgccctgaaaggattaaccaccagccgtggcgagccggtacagggtgtctacggctttgcaaagtcgctcctgaaagctctgaaagaagacggtgatgtggtgattgttgtctttgatgcgaaagcgccaagttttcgccacgaagcgtacgaagcttacaaagccgggcgtgctccaacgccggaagactttcctcgccaattggcgcttatgaaggaattagtggatttgcttggcctcgaacgcttggaagttcccggtttcgaggcagacgacgtattagcgactctcgcaaagaaagccgaacgtgagggctatgaagtccagatcttgacagcagatcgcgatcttttccagcttttatctccgcgcatctcggtgttacacccggaagggcatcgtatcaccccggaatggctctgggagaaatatggtttgcgtcccgaacaatgggtggattttcgcgccttagtcggcgatccgagcgacaatattccgggagttaaaggtatcggcgagaagacggcgctcaagctccttaaagaatgggggtcgttggagaacttgcttaagaatttagatcaggtcaaaccagagtcagtgcgtgagaagattcttgcacacctcgaagacctcaaattaagccgcgaattgtcccgtgtacgcaccgatttgccgctcgaagttgatttccgtggccgccgcgaacctgactgggagggtcttaaagcgtttttagagcgtcttgaatttggttcgctcttgcatgaattcggccttttagaaagcccgttaccagccgaagaagcaccttggccaccgcccgaaggcgcgtttttaggttaccgtttgagtcgcccggaaccgatgtgggccgaattattggctcttgcagcgtctgcccagggacgtgtgtatcgcgcggaagaccctcatggtgcgctccgcggcctcaaagaagtccgtggactccttgccaaagacttagctgttgttgcattgcgcgaaggtcttgatttacctccgactgatgatccaatgcttcttgcgtacctcttggacccgtcaaacacgacgcccgaaggcgtagcccgtcgttacggcggcgagtggaccgaagatgcaggcgagcgcgcgttattggccgaacgtttgcacgcaaatttattaggacgtttgcaaggcgaggaacgtctcctctggctttacgaagaagtggagaaaccattgagtcgcgtgctcgcgcatatggaagctaccggtgtcaaattagacgtggcgtatttggaggcactcagccttgaagttgctgccgaaatgcgccgcttggaggaagaagtattccgtttagcaggccactcctttaaccttaattctcgcgatcagttagaacgtgtgttgttcgatgaacttggtctccctcctatcggcaagacagagaagaccggtaaacgtagcacttcagcggcggttttagaagctcttcgcgaagtccatcccattgtggacaagatcttgcagtaccgcgaactcgcgaaattgaaaggcacctatattgaccgtcttccggcattagtccacccgaaaacgggacgcctccatacccgcttcaaccaaacagccacggcgaccggtcgtttgtcctcctctgatccaaaccttcagaatattccagtacgtaccccattgggccagaagatccgccgcgcgtttgtagctgaggagggttggcgtttagtggccctcgattatagccaaattgaattacgtgtccttgcccatctttctggcgatgagaacctcatccgcgtgtttcaggaaggcaaagacattcacactcaaacggcaagctggatgtttggactgccggcggaagcgatcgatcctttgatgcgtcgtgcagcgaagaccatcaatttcggtgttctctacggtatgagtgcccaccgtttgtcgcaggaattaggcattccctatgaagaagctgcggcgttcattcagcgctactttcaaagctatcccaaagttaaagcatggatcgagaagactctcgaagaaggccgcacacgtggttacgtagagaccttatttggacgtcgccgctatgttcccgatttaaccgctcgcgtgaaatctgtccgtgaagccgccgaacgcatggcgttcaacatgcctgtacagggcacggcagctgacctcatgaaacttgcaatggtgcgcctttttccacaattgcgtgaagttggtgcccgcatgctcttgcaggtccacgatgaactcttgttagaagcgccaaaagagcgtgcggaagaggtggcagccctcgcgaaagaggttatggaaggcgtgtggcccttagcggtgcctcttgaagtcgaagttggtattggcgaggattggttggctgccaaaggataatga

SEQ ID NO: 932 - protein, 841 aa, synthetic construct
  REGION 1..841: note = Variant of DNA polymerase I from Thermus sp. strain 2.9
MHHHHHHGGSGMLPLFEPKGRVLLVDGHHLAYRNFFALKGLTTSRGEPVQGVYGFAKSLLKALKEDGDVVIVVFDAKAPSFRHEAYEAYKAGRAPTPEDFPRQLALMKELVDLLGLERLEVPGFEADDVLATLAKKAEREGYEVQILTADRDLFQLLSPRISVLHPEGHRITPEWLWEKYGLRPEQWVDFRALVGDPSDNIPGVKGIGEKTALKLLKEWGSLENLLKNLDQVKPESVREKILAHLEDLKLSRELSRVRTDLPLEVDFRGRREPDWEGLKAFLERLEFGSLLHEFGLLESPLPAEEAPWPPPEGAFLGYRLSRPEPMWAELLALAASAQGRVYRAEDPHGALRGLKEVRGLLAKDLAVVALREGLDLPPTDDPMLLAYLLDPSNTTPEGVARRYGGEWTEDAGERALLAERLHANLLGRLQGEERLLWLYEEVEKPLSRVLAHMEATGVKLDVAYLEALSLEVAAEMRRLEEEVFRLAGHSFNLNSRDQLERVLFDELGLPPIGKTEKTGKRSTSAAVLEALREVHPIVDKILQYRELAKLKGTYIDRLPALVHPKTGRLHTRFNQTATATGRLSSSDPNLQNIPVRTPLGQKIRRAFVAEEGWRLVALDYSQIELRVLAHLSGDENLIRVFQEGKDIHTQTASWMFGLPAEAIDPLMRRAAKTINFGVLYGMSAHRLSQELGIPYEEAAAFIQRYFQSYPKVKAWIEKTLEEGRTRGYVETLFGRRRYVPDLTARVKSVREAAERMAFNMPVQGTAADLMKLAMVRLFPQLREVGARMLLQVHDELLLEAPKERAEEVAALAKEVMEGVWPLAVPLEVEVGIGEDWLAAKG

SEQ ID NO: 933 - DNA, 2529 bp, synthetic construct
  misc_feature 1..2529: note = Variant of DNA polymerase I from Thermus sp. strain 2.9
  source 1..2529: mol_type = other DNA
atgcaccatcatcatcatcatggcggtagcggcatgttaccgttgttcgaacctaaaggtcgcgtgcttctggttgatggccatcatctcgcgtatcgtaacttctttgccctgaaaggattaaccaccagccgtggcgagccggtacagggtgtctacggctttgcaaagtcgctcctgaaagctctgaaagaagacggtgatgtggtgattgttgtctttgatgcgaaagcgccaagttttcgccacgaagcgtacgaagcttacaaagccgggcgtgctccaacgccggaagactttcctcgccaattggcgcttatgaaggaattagtggatttgcttggcctcgaacgcttggaagttcccggtttcgaggcagacgacgtattagcgactctcgcaaagaaagccgaacgtgagggctatgaagtccagatcttgacagcagatcgcgatcttttccagcttttatctccgcgcatctcggtgttacacccggaagggcatcgtatcaccccggaatggctctgggagaaatatggtttgcgtcccgaacaatgggtggattttcgcgccttagcaggcgatccgagcgacaatattccgggagttaaaggtatcggcgagaagacggcgctcaagctccttaaagaatgggggtcgttggagaacttgcttaagaatttagatcaggtcaaaccagagtcagtgcgtgagaagattcttgcacacctcgaagacctcaaattaagccgcgaattgtcccgtgtacgcaccgatttgccgctcgaagttgatttccgtggccgccgcgaacctgactgggagggtcttaaagcgtttttagagcgtcttgaatttggttcgctcttgcatgaattcggccttttagaaagcccgttaccagccgaagaagcaccttggccaccgcccgaaggcgcgtttttaggttaccgtttgagtcgcccggaaccgatgtgggccgaattattggctcttgcagcgtctgcccagggacgtgtgtatcgcgcggaagaccctcatggtgcgctccgcggcctcaaagaagtccgtggactccttgccaaagacttagctgttgttgcattgcgcgaaggtcttgatttacctccgactgatgatccaatgcttcttgcgtacctcttggacccgtcaaacacgacgcccgaaggcgtagcccgtcgttacggcggcgagtggaccgaagatgcaggcgagcgcgcgttattggccgaacgtttgcacgcaaatttattaggacgtttgcaaggcgaggaacgtctcctctggctttacgaagaagtggagaaaccattgagtcgcgtgctcgctcatatggaagctaccggtgtcaaattagacgtggcgtatttggaggcactcagccttgaagttgctgccgaaatgcgccgcttggaggaagaagtattccgtttagcaggccactcctttaaccttaattctcgcgatcagttagaacgtgtgttgttcgatgaacttggtctccctcctatcggcaagacagagaagaccggtaaacgtagcacttcagcggcggttttagaagctcttcgcgaagtccatcccattgtggacaagatcttgcagtaccgcgaactcgcgaaattgaaaggcacctatattgaccctcttccggcattagtccacccgaaaacgggacgcctccatacccgcttcaaccaaacagccacggcgaccggtcgtttgtcctcctctgatccaaaccttcagaatattccagtacgtaccccattgggccagaagatccgccgcgcgtttgtagctgaggagggttggcgtttagtggccctcgattatagccaaattgaattacgtgtccttgcccatctttctggcgatgagaacctcatccgcgtgtttcaggaaggcaaagacattcacactcaaacggcaagctggatgtttggattatcagctgaagcgatcgatcctttgatgcgtcgtgcagcgaagaccatcaatttcggtgttctctacggtatgagtgcccaccgtttgtcgcaggaattaggcattccctatgaagaagctgcggcgttcattcagcgctactttcaaagctatcccaaagttaaagcatggatcgagaagactctcgaagaaggccgcacacgtggttacgtagagaccttatttggacgtcgccgctatgttcccgatttaaccgctcgcgtgaaatctgtccgtgaagccgccgaacgcatggcgttcaacatgcctgtacagggcacggcagctgacctcatgaaacttgcaatggtgcgcctttttccacaattgcgtgaagttggtgcccgcatgctcttgcaggtccacgatgaactcttgttagaagcgccaaaagagcgtgcggaagaggtggcagccctcgcgaaagaggttatggaaggcgtgtggcccttagcggtgcctcttgaagtcgaagttggtattggcgaggattggttggctgccaaaggataatga

SEQ ID NO: 934 - protein, 841 aa, synthetic construct
  REGION 1..841: note = Variant of DNA polymerase I from Thermus sp. strain 2.9
MHHHHHHGGSGMLPLFEPKGRVLLVDGHHLAYRNFFALKGLTTSRGEPVQGVYGFAKSLLKALKEDGDVVIVVFDAKAPSFRHEAYEAYKAGRAPTPEDFPRQLALMKELVDLLGLERLEVPGFEADDVLATLAKKAEREGYEVQILTADRDLFQLLSPRISVLHPEGHRITPEWLWEKYGLRPEQWVDFRALAGDPSDNIPGVKGIGEKTALKLLKEWGSLENLLKNLDQVKPESVREKILAHLEDLKLSRELSRVRTDLPLEVDFRGRREPDWEGLKAFLERLEFGSLLHEFGLLESPLPAEEAPWPPPEGAFLGYRLSRPEPMWAELLALAASAQGRVYRAEDPHGALRGLKEVRGLLAKDLAVVALREGLDLPPTDDPMLLAYLLDPSNTTPEGVARRYGGEWTEDAGERALLAERLHANLLGRLQGEERLLWLYEEVEKPLSRVLAHMEATGVKLDVAYLEALSLEVAAEMRRLEEEVFRLAGHSFNLNSRDQLERVLFDELGLPPIGKTEKTGKRSTSAAVLEALREVHPIVDKILQYRELAKLKGTYIDPLPALVHPKTGRLHTRFNQTATATGRLSSSDPNLQNIPVRTPLGQKIRRAFVAEEGWRLVALDYSQIELRVLAHLSGDENLIRVFQEGKDIHTQTASWMFGLSAEAIDPLMRRAAKTINFGVLYGMSAHRLSQELGIPYEEAAAFIQRYFQSYPKVKAWIEKTLEEGRTRGYVETLFGRRRYVPDLTARVKSVREAAERMAFNMPVQGTAADLMKLAMVRLFPQLREVGARMLLQVHDELLLEAPKERAEEVAALAKEVMEGVWPLAVPLEVEVGIGEDWLAAKG

SEQ ID NO: 935 - DNA, 2529 bp, synthetic construct
  misc_feature 1..2529: note = Variant of DNA polymerase I from Thermus sp. strain 2.9
  source 1..2529: mol_type = other DNA
atgcaccatcatcatcatcatggcggtagcggcatgttaccgttgttcgaacctaaaggtcgcgtgcttctggttgatggccatcatctcgcgtatcgtaacttctttgccctgaaaggattaaccaccagccgtggcgagccggtacagggtgtctacggctttgcaaagtcgctcctgaaagctctgaaagaagacggtgatgtggtgattgttgtctttgatgcgaaagcgccaagttttcgccacgaagcgtacgaagcttacaaagccgggcgtgctccaacgccggaagactttcctcgccaattggcgcttatgaaggaattagtggatttgcttggcctcgaacgcttggaagttcccggtttcgaggcagacgacgtattagcgactctcgcaaagaaagccgaacgtgagggctatgaagtccagatcttgacagcagatcgcgatcttttccagcttttatctccgcgcatctcggtgttacacccggaagggcatctgatcaccccggaatggctctgggagaaatatggtttgcgtcccgaacaatgggtggattttcgcgccttagcaggcgatccgagcgacaatattccgggagttaaaggtatcggcgagaagacggcgctcaagctccttaaagaatgggggtcgttggagaacttgcttaagaatttagatcaggtcaaaccagagtcagtgcgtgagaagattcttgcacacctcgaagacctcaaattaagccgcgaattgtcccgtgtacgcaccgatttgccgctcgaagttgatttccgtggccgccgcgaacctgactgggagggtcttaaagcgtttttagagcgtcttgaatttggttcgctcttgcatgaattcggccttttagaaagcccgttaccagccgaagaagcaccttggccaccgcccgaaggcgcgtttttaggttaccgtttgagtcgcccggaaccgatgtgggccgaattattggctcttgcagcgtctgcccagggacgtgtgtatcgcgcggaagaccctcatggtgcgctccgcggcctcaaagaagtccgtggactccttgccaaagacttagctgttgttgcattgcgcgaaggtcttgatttacctccgactgatgatccaatgcttcttgcgtacctcttggacccgtcaaacacgacgcccgaaggcgtagcccgtcgttacggcggcgagtggaccgaagatgcaggcgagcgcgcgttattggccgaacgtttgcaccagaatttattaggacgtttgcaaggcgaggaacgtctcctctggctttacgaagaagtggagaaaccattgagtcgcgtgctccaccatatggaagctaccggtgtcaaattagacgtggcgtatttggaggcactcagccttgaagttgctgccgaactgcgccgcttggaggaagaagtattccgtttagcaggccactcctttaaccttaattctcgcgatcagttagaacgtgtgttgttcgatgaacttggtctccctcctatcggcaagacagagaagaccggtaaacgtagcacttcagcggcggttttagaagctcttcgcgaagtccatcccattgtggacaagatcttgcagtaccgcgaactcgcgaaattgaaaggcacctatattgaccgtcttccggcattagtccacccgaaaacgggacgcctccatacccgcttcaaccaaacagccacggcgaccggtcgtttgtcctcctctgatccaaaccttcagaatattccagtacgtaccccattgggccagaagatccgccgcgcgtttgtagctgaggagggttggcgtttagtggccctcgattatagccaaattgaattacgtgtccttgcccatctttctggcgatgagaacctcatccgcgtgtttcaggaaggcaaagacattcacactcaaacggcaagctggatgtttggagtgccggcggaagcgatcgatcctttgatgcgtcgtgcagcgaagaccatcaatttcggtgttctctacggtatgagtgcccatcgtttgtcgcaggaattaggcattccctatgaagaagctgcggcgttcattcagcgctactttcaaagctatcccaaagttaaagcatggatcgagaagactctcgaagaaggccgcacacgtggttacgtagagaccttatttggacgtcgccgctatgttcccgatttaaccgctcgcgtgaaatctgtccgtgaagccgccgaacgcatggcgttcaacatgcctgtacagggcacggcagctgacctcatgaaacttgcaatggtgcgcctttttccacaattgcgtgaagttggtgcccgcatgctcttgcaggtccacgatgaactcttgttagaagcgccaaaagagcgtgcggaagaggtggcagccctcgcgaaagaggttatggaaggcgtgtggcccttagcggtgcctcttgaagtcgaagttggtattggcgaggattggttggctgccaaaggataatga

SEQ ID NO: 936 - protein, 841 aa, synthetic construct
  REGION 1..841: note = Variant of DNA polymerase I from Thermus sp. strain 2.9
MHHHHHHGGSGMLPLFEPKGRVLLVDGHHLAYRNFFALKGLTTSRGEPVQGVYGFAKSLLKALKEDGDVVIVVFDAKAPSFRHEAYEAYKAGRAPTPEDFPRQLALMKELVDLLGLERLEVPGFEADDVLATLAKKAEREGYEVQILTADRDLFQLLSPRISVLHPEGHLITPEWLWEKYGLRPEQWVDFRALAGDPSDNIPGVKGIGEKTALKLLKEWGSLENLLKNLDQVKPESVREKILAHLEDLKLSRELSRVRTDLPLEVDFRGRREPDWEGLKAFLERLEFGSLLHEFGLLESPLPAEEAPWPPPEGAFLGYRLSRPEPMWAELLALAASAQGRVYRAEDPHGALRGLKEVRGLLAKDLAVVALREGLDLPPTDDPMLLAYLLDPSNTTPEGVARRYGGEWTEDAGERALLAERLHQNLLGRLQGEERLLWLYEEVEKPLSRVLHHMEATGVKLDVAYLEALSLEVAAELRRLEEEVFRLAGHSFNLNSRDQLERVLFDELGLPPIGKTEKTGKRSTSAAVLEALREVHPIVDKILQYRELAKLKGTYIDRLPALVHPKTGRLHTRFNQTATATGRLSSSDPNLQNIPVRTPLGQKIRRAFVAEEGWRLVALDYSQIELRVLAHLSGDENLIRVFQEGKDIHTQTASWMFGVPAEAIDPLMRRAAKTINFGVLYGMSAHRLSQELGIPYEEAAAFIQRYFQSYPKVKAWIEKTLEEGRTRGYVETLFGRRRYVPDLTARVKSVREAAERMAFNMPVQGTAADLMKLAMVRLFPQLREVGARMLLQVHDELLLEAPKERAEEVAALAKEVMEGVWPLAVPLEVEVGIGEDWLAAKG

SEQ ID NO: 937 - DNA, 2529 bp, synthetic construct
  misc_feature 1..2529: note = Variant of DNA polymerase I from Thermus sp. strain 2.9
  source 1..2529: mol_type = other DNA
atgcaccatcatcatcatcatggcggtagcggcatgttaccgttgttcgaacctaaaggtcgcgtgcttctggttgatggccatcatctcgcgtatcgtaacttctttgccctgaaaggattaaccaccagccgtggcgagccggtacagggtgtctacggctttgcaaagtcgctcctgaaagctctgaaagaagacggtgatgtggtgattgttgtctttgatgcgaaagcgccaagttttcgccacgaagcgtacgaagcttacaaagccgggcgtgctccaacgccggaagactttcctcgccaattggcgcttatgaaggaattagtggatttgcttggcctcgaacgcttggaagttcccggtttcgaggcagacgacgtattagcgactctcgcaaagaaagccgaacgtgagggctatgaagtccagatcttgacagcagatcgcgatcttttccagcttttatctccgcgcatctcggtgttacacccggaagggcatctgatcaccccggaatggctctgggagaaatatggtttgcgtcccgaacaatgggtggattttcgcgccttagtcggcgatccgagcgacaatattccgggagttaaaggtatcggcgagaagacggcgctcaagctccttaaagaatgggggtcgttggagaacttgcttaagaatttagatcaggtcaaaccagagtcagtgcgtgagaagattcttgcacacctcgaagacctcaaattaagccgcgaattgtcccgtgtacgcaccgatttgccgctcgaagttgatttccgtggccgccgcgaacctgactgggagggtcttaaagcgtttttagagcgtcttgaatttggttcgctcttgcatgaattcggccttttagaaagcccgttaccagccgaagaagcaccttggccaccgcccgaaggcgcgtttttaggttaccgtttgagtcgcccggaaccgatgtgggccgaattattggctcttgcagcgtctgcccagggacgtgtgtatcgcgcggaagaccctcatggtgcgctccgcggcctcaaagaagtccgtggactccttgccaaagacttagctgttgttgcattgcgcgaaggtcttgatttacctccgactgatgatccaatgcttcttgcgtacctcttggacccgtcaaacacgacgcccgaaggcgtagcccgtcgttacggcggcgagtggaccgaagatgcaggcgagcgcgcgttattggccgaacgtttgcacgcaaatttattaggacgtttgcaaggcgaggaacgtctcctctggctttacgaagaagtggagaaaccattgagtcgcgtgctccaccatatggaagctaccggtgtcaaattagacgtggcgtatttggaggcactcagccttgaagttgctgccgaactgcgccgcttggaggaagaagtattccgtttagcaggccactcctttaaccttaattctcgcgatcagttagaacgtgtgttgttcgatgaacttggtctccctcctatcggcaagacagagaagaccggtaaacgtagcacttcagcggcggttttagaagctcttcgcgaagtccatcccattgtggacaagatcttgcagtaccgcgaactcgcgaaattgaaaggcacctatattgaccgtcttccggcattagtccacccgaaaacgggacgcctccatacccgcttcaaccaaacagccacggcgaccggtcgtttgtcctcctctgatccaaaccttcagaatattccagtacgtaccccattgggccagaagatccgccgcgcgtttgtagctgaggagggttggcgtttagtggccctcgattatagccaaattgaattacgtgtccttgcccatctttctggcgatgagaacctcatccgcgtgtttcaggaaggcaaagacattcacactcaaacggcaagctggatgtttggagtgtcggcggaagcgatcgatcctttgatgcgtcgtgcagcgaagaccatcaatttcggtgttctctacggtatgagtgcccaccgtttgtcgcaggaattaggcattccctatgaagaagctgcggcgttcattcagcgctactttcaaagctatcccaaagttaaagcatggatcgagaagactctcgaagaaggccgcacacgtggttacgtagagaccttatttggacgtcgccgctatgttcccgatttaaacgctcgcgtgaaatctgtccgtgaagccgccgaacgcatggcgttcaacatgcctgtacagggcacggcagctgacctcatgaaacttgcaatggtgcgcctttttccacaattgcgtgaagttggtgcccgcatgctcttgcaggtccacgatgaactcttgttagaagcgccaaaagagcgtgcggaagaggtggcagccctcgcgaaagaggttatggaaggcgtgtggcccttagcggtgcctcttgaagtcgaagttggtattggcgaggattggttggctgccaaaggataatga

SEQ ID NO: 938 - protein, 841 aa, synthetic construct
  REGION 1..841: note = Variant of DNA polymerase I from Thermus sp. strain 2.9
MHHHHHHGGSGMLPLFEPKGRVLLVDGHHLAYRNFFALKGLTTSRGEPVQGVYGFAKSLLKALKEDGDVVIVVFDAKAPSFRHEAYEAYKAGRAPTPEDFPRQLALMKELVDLLGLERLEVPGFEADDVLATLAKKAEREGYEVQILTADRDLFQLLSPRISVLHPEGHLITPEWLWEKYGLRPEQWVDFRALVGDPSDNIPGVKGIGEKTALKLLKEWGSLENLLKNLDQVKPESVREKILAHLEDLKLSRELSRVRTDLPLEVDFRGRREPDWEGLKAFLERLEFGSLLHEFGLLESPLPAEEAPWPPPEGAFLGYRLSRPEPMWAELLALAASAQGRVYRAEDPHGALRGLKEVRGLLAKDLAVVALREGLDLPPTDDPMLLAYLLDPSNTTPEGVARRYGGEWTEDAGERALLAERLHANLLGRLQGEERLLWLYEEVEKPLSRVLHHMEATGVKLDVAYLEALSLEVAAELRRLEEEVFRLAGHSFNLNSRDQLERVLFDELGLPPIGKTEKTGKRSTSAAVLEALREVHPIVDKILQYRELAKLKGTYIDRLPALVHPKTGRLHTRFNQTATATGRLSSSDPNLQNIPVRTPLGQKIRRAFVAEEGWRLVALDYSQIELRVLAHLSGDENLIRVFQEGKDIHTQTASWMFGVSAEAIDPLMRRAAKTINFGVLYGMSAHRLSQELGIPYEEAAAFIQRYFQSYPKVKAWIEKTLEEGRTRGYVETLFGRRRYVPDLNARVKSVREAAERMAFNMPVQGTAADLMKLAMVRLFPQLREVGARMLLQVHDELLLEAPKERAEEVAALAKEVMEGVWPLAVPLEVEVGIGEDWLAAKG

SEQ ID NO: 939 - DNA, 2529 bp, synthetic construct
  misc_feature 1..2529: note = Variant of DNA polymerase I from Thermus sp. strain 2.9
  source 1..2529: mol_type = other DNA
atgcaccatcatcatcatcatggcggtagcggcatgttaccgttgttcgaacctaaaggtcgcgtgcttctggttgatggccatcatctcgcgtatcgtaacttctttgccctgaaaggattaaccaccagccgtggcgagccggtacagggtgtctacggctttgcaaagtcgctcctgaaagctctgaaagaagacggtgatgtggtgattgttgtctttgatgcgaaagcgccaagttttcgccacgaagcgtacgaagcttacaaagccgggcgtgctccaacgccggaagactttcctcgccaattggcgcttatgaaggaattagtggatttgcttggcctcgaacgcttggaagttcccggtttcgaggcagacgacgtattagcgactctcgcaaagaaagccgaacgtgagggctatgaagtccagatcttgacagcagatcgcgatcttttccagcttttatctccgcgcatctcggtgttacacccggaagggcatcgtatcaccccggaatggctctgggagaaatatggtttgcgtcccgaacaatgggtggattttcgcgccttagccggcgatccgggcgacaatattccgggagttaaaggtatcggcgagaagacggcgctcaagctccttaaagaatgggggtcgttggagaacttgcttaagaatttagatcaggtcaaaccagagtcagtgcgtgagaagattcttgcacacctcgaagacctcaaattaagccgcgaattgtcccgtgtacgcaccgatttgccgctcgaagttgatttccgtggccgccgcgaacctgactgggagggtcttaaagcgtttttagagcgtcttgaatttggttcgctcttgcatgaattcggccttttagaaagcccgttaccagccgaagaagcaccttggccaccgcccgaaggcgcgtttttaggttaccgtttgagtcgcccggaaccgatgtgggccgaattattggctcttgcagcgtctgcccagggacgtgtgtatcgcgcggaagaccctcatggtgcgctccgcggcctcaaagaagtccgtggactccttgccaaagacttagctgttgttgcattgcgcgaaggtcttgatttacctccgactgatgatccaatgcttcttgcgtacctcttggacccgtcaaacacgacgcccgaaggcgtagcccgtcgttacggcggcgagtggaccgaagatgcaggcgagcgcgcgttattggccgaacgtttgcaccagaatttattaggacgtttgcaaggcgaggaacgtctcctctggctttacgaagaagtggagaaaccattgagtcgcgtgctcgcgcatatggaagctaccggtgtcaaattagacgtggcgtatttggaggcactcagccttgaagttgctgccgaactgcgccgcttggaggaagaagtattccgtttagcaggccactcctttaaccttaattctcgcgatcagttagaacgtgtgttgttcgatgaacttggtctccctcctatcggcaagacagagaagaccggtaaacgtagcacttcagcggcggttttagaagctcttcgcgaagtccatcccattgtggacaagatcttgcagtaccgcgaactcgcgaaattgaaaggcacctatattgaccgtcttccggcattagtccacccgaaaacgggacgcctccatacccgcttcaaccaaacagccacggcgaccggtcgtttgtcctcctctgatccaaaccttcagaatattccagtacgtaccccattgggccagaagatccgccgcgcgtttgtagctgaggagggttggcgtttagtggccctcgattatagccaaattgaattacgtgtccttgcccatctttctggcgatgagaacctcatccgcgtgtttcaggaaggcaaagacattcacactcaaacggcaagctggatgtttggattatcagctgaagcgatcgatcctttgatgcgtcgtgcagcgaagaccatcaatttcggtgttctctacggtatgagtgcccaccgtttgtcgcaggaattaggcattccctatgaagaagctgcggcgttcattcagcgctactttcaaagctatcccaaagttaaagcatggatcgagaagactctcgaagaaggccgcacacgtggttacgtagagaccttatttggacgtcgccgctatgttcccgatttaaccgctcgcgtgaaatctgtccgtgaagccgccgaacgcatggcgttcaacatgcctgtacagggcacggcagctgacctcatgaaacttgcaatggtgcgcctttttccacaattgcgtgaagttggtgcccgcatgctcttgcaggtccacgatgaactcttgttagaagcgccaaaagagcgtgcggaagaggtggcagccctcgcgaaagaggttatggaaggcgtgtggcccttagcggtgcctcttgaagtcgaagttggtattggcgaggattggttggctgccaaaggataatga

SEQ ID NO: 940 - protein, 841 aa, synthetic construct
  REGION 1..841: note = Variant of DNA polymerase I from Thermus sp. strain 2.9
MHHHHHHGGSGMLPLFEPKGRVLLVDGHHLAYRNFFALKGLTTSRGEPVQGVYGFAKSLLKALKEDGDVVIVVFDAKAPSFRHEAYEAYKAGRAPTPEDFPRQLALMKELVDLLGLERLEVPGFEADDVLATLAKKAEREGYEVQILTADRDLFQLLSPRISVLHPEGHRITPEWLWEKYGLRPEQWVDFRALAGDPGDNIPGVKGIGEKTALKLLKEWGSLENLLKNLDQVKPESVREKILAHLEDLKLSRELSRVRTDLPLEVDFRGRREPDWEGLKAFLERLEFGSLLHEFGLLESPLPAEEAPWPPPEGAFLGYRLSRPEPMWAELLALAASAQGRVYRAEDPHGALRGLKEVRGLLAKDLAVVALREGLDLPPTDDPMLLAYLLDPSNTTPEGVARRYGGEWTEDAGERALLAERLHQNLLGRLQGEERLLWLYEEVEKPLSRVLAHMEATGVKLDVAYLEALSLEVAAELRRLEEEVFRLAGHSFNLNSRDQLERVLFDELGLPPIGKTEKTGKRSTSAAVLEALREVHPIVDKILQYRELAKLKGTYIDRLPALVHPKTGRLHTRFNQTATATGRLSSSDPNLQNIPVRTPLGQKIRRAFVAEEGWRLVALDYSQIELRVLAHLSGDENLIRVFQEGKDIHTQTASWMFGLSAEAIDPLMRRAAKTINFGVLYGMSAHRLSQELGIPYEEAAAFIQRYFQSYPKVKAWIEKTLEEGRTRGYVETLFGRRRYVPDLTARVKSVREAAERMAFNMPVQGTAADLMKLAMVRLFPQLREVGARMLLQVHDELLLEAPKERAEEVAALAKEVMEGVWPLAVPLEVEVGIGEDWLAAKG

SEQ ID NO: 941 - DNA, 2529 bp, synthetic construct
  misc_feature 1..2529: note = Variant of DNA polymerase I from Thermus sp. strain 2.9
  source 1..2529: mol_type = other DNA
atgcaccatcatcatcatcatggcggtagcggcgttttaccgttgttcgaacctaaaggtcgcgtgcttctggttgatggccatcatctcgcgtatcgtaacttctttgccctgaaaggattaaccaccagccgtggcgagccggtacagggtgtctacggctttgcaaagtcgctcctgaaagctctgaaagaagacggtgatgtggtgattgttgtctttgatgcgaaagcgccaagttttcgccacgaagcgtacgaagcttacaaagccgggcgtgctccaacgccggaagactttcctcgccaattggcgcttatgaaggaattagtggatttgcttggcctcgaacgcttggaagttcccggtttcgaggcagacgacgtattagcgactctcgcaaagaaagccgaacgtgagggctatgaagtccagatcttgacagcagatcgcgatcttttccagcttttatctccgcgcatctcggtgttacacccggaagggcatcgtatcaccccggaatggctctgggagaaatatggtttgcgtcccgaacaatgggtggattttcgcgccttagcaggcgatccgagcgacaatattccgggagttaaaggtatcggcgagaagacggcgctcaagctccttaaagaatgggggtcgttggagaacttgcttaagaatttagatcaggtcaaaccagagtcagtgcgtgagaagattcttgcacacctcgaagacctcaaattaagccgcgaattgtcccgtgtacgcaccgatttgccgctcgaagttgatttccgtggccgccgcgaacctgactgggagggtcttaaagcgtttttagagcgtcttgaatttggttcgctcttgcatgaattcggccttttagaaagcccgttaccagccgaagaagcaccttggccaccgcccgaaggcgcgtttttaggttaccgtttgagtcgcccggaaccgatgtgggccgaattattggctcttgcagcgtctgcccagggacgtgtgtatcgcgcggaagaccctcatggtgcgctccgcggcctcaaagaagtccgtggactccttgccaaagacttagctgttgttgcattgcgcgaaggtcttgatttacctccgactgatgatccaatgcttcttgcgtacctcttggacccgtcaaacacgacgcccgaaggcgtagcccgtcgttacggcggcgagtggaccgaagatgcaggcgagcgcgcgttattggccgaacgtttgcacgccaatttattaggacgtttgcaaggcgaggaacgtctcctctggctttacgaagaagtggagaaaccattgagtcgcgtgctcgcgcatatggaagctaccggtgtcaaattagacgtggcgtatttggaggcactcagccttgaagttgctgccgaaatgcgccgcttggaggaagaagtattccgtttagcaggccactcctttaaccttaattctcgcgatcagttagaacgtgtgttgttcgatgaacttggtctccctcctatcggcaagacagagaagaccggtaaacgtagcacttcagcggcggttttagaagctcttcgcgaagtccatcccattgtggacaagatcttgcagtaccgcgaactcgcgaaattgaaaggcacctatattgaccctcttccggcattagtccacccgaaaacgggacgcctccatacccgcttcaaccaaacagccacggcgaccggtcgtttgtcctcctctgatccaaaccttcagaatattccagtacgtaccccattgggccagaagatccgccgcgcgtttgtagctgaggagggttggcgtttagtggccctcgattatagccaaattgaattacgtgtccttgcccatctttctggcgatgagaacctcatccgcgtgtttcaggaaggcaaagacattcacactcaaacggcaagctggatgtttggattatcagctgaagcgatcgatcctttgatgcgtcgtgcagcgaagaccatcaatttcggtgttctctacggtatgagtgcccatcgtttgtcgcaggaattaggcattccctatgaagaagctgcggcgttcattcagcgctactttcaaagctatcccaaagttaaagcatggatcgagaagactctcgaagaaggccgcacacgtggttacgtagagaccttatttggacgtcgccgctatgttcccgatttaaacgctcgcgtgaaatctgtccgtgaagccgccgaacgcatggcgttcaacatgcctgtacagggcacggcagctgacctcatgaaacttgcaatggtgcgcctttttccacaattgcgtgaagttggtgcccgcatgctcttgcaggtccacgatgaactcttgttagaagcgccaaaagagcgtgcggaagaggtggcagccctcgcgaaagaggttatggaaggcgtgtggcccttagcggtgcctcttgaagtcgaagttggtattggcgaggattggttggctgccaaaggataatga

SEQ ID NO: 942 - protein, 841 aa, synthetic construct
  REGION 1..841: note = Variant of DNA polymerase I from Thermus sp. strain 2.9
MHHHHHHGGSGVLPLFEPKGRVLLVDGHHLAYRNFFALKGLTTSRGEPVQGVYGFAKSLLKALKEDGDVVIVVFDAKAPSFRHEAYEAYKAGRAPTPEDFPRQLALMKELVDLLGLERLEVPGFEADDVLATLAKKAEREGYEVQILTADRDLFQLLSPRISVLHPEGHRITPEWLWEKYGLRPEQWVDFRALAGDPSDNIPGVKGIGEKTALKLLKEWGSLENLLKNLDQVKPESVREKILAHLEDLKLSRELSRVRTDLPLEVDFRGRREPDWEGLKAFLERLEFGSLLHEFGLLESPLPAEEAPWPPPEGAFLGYRLSRPEPMWAELLALAASAQGRVYRAEDPHGALRGLKEVRGLLAKDLAVVALREGLDLPPTDDPMLLAYLLDPSNTTPEGVARRYGGEWTEDAGERALLAERLHANLLGRLQGEERLLWLYEEVEKPLSRVLAHMEATGVKLDVAYLEALSLEVAAEMRRLEEEVFRLAGHSFNLNSRDQLERVLFDELGLPPIGKTEKTGKRSTSAAVLEALREVHPIVDKILQYRELAKLKGTYIDPLPALVHPKTGRLHTRFNQTATATGRLSSSDPNLQNIPVRTPLGQKIRRAFVAEEGWRLVALDYSQIELRVLAHLSGDENLIRVFQEGKDIHTQTASWMFGLSAEAIDPLMRRAAKTINFGVLYGMSAHRLSQELGIPYEEAAAFIQRYFQSYPKVKAWIEKTLEEGRTRGYVETLFGRRRYVPDLNARVKSVREAAERMAFNMPVQGTAADLMKLAMVRLFPQLREVGARMLLQVHDELLLEAPKERAEEVAALAKEVMEGVWPLAVPLEVEVGIGEDWLAAKG

SEQ ID NO: 943 - DNA, 2529 bp, synthetic construct
  misc_feature 1..2529: note = Variant of DNA polymerase I from Thermus sp. strain 2.9
  source 1..2529: mol_type = other DNA
atgcaccatcatcatcatcatggcggtagcggcatgttaccgttgttcgaacctaaaggtcgcgtgcttctggttgatggccatcatctcgcgtatcgtaacttctttgccctgaaaggattaaccaccagccgtggcgagccggtacagggtgtctacggctttgcaaagtcgctcctgaaagctctgaaagaagacggtgatgtggtgattgttgtctttgatgcgaaagcgccaagttttcgccacgaagcgtacgaagcttacaaagccgggcgtgctccaacgccggaagactttcctcgccaattggcgcttatgaaggaattagtggatttgcttggcctcgaacgcttggaagttcccggtttcgaggcagacgacgtattagcgactctcgcaaagaaagccgaacgtgagggctatgaagtccagatcttgacagcagatcgcgatcttttccagcttttatctccgcgcatctcggtgttacacccggaagggcatcgtatcaccccggaatggctctgggagaaatatggtttgcgtcccgaacaatgggtggattttcgcgccttagcaggcgatccgagcgacaatattccgggagttaaaggtatcggcgagaagacggcgctcaagctccttaaagaatgggggtcgttggagaacttgcttaagaatttagatcaggtcaaaccagagtcagtgcgtgagaagattcttgcacacctcgaagacctcaaattaagccgcgaattgtcccgtgtacgcaccgatttgccgctcgaagttgatttccgtggccgccgcgaacctgactgggagggtcttaaagcgtttttagagcgtcttgaatttggttcgctcttgcatgaattcggccttttagaaagcccgttaccagccgaagaagcaccttggccaccgcccgaaggcgcgtttttaggttaccgtttgagtcgcccggaaccgatgtgggccgaattattggctcttgcagcgtctgcccagggacgtgtgtatcgcgcggaagaccctcatggtgcgctccgcggcctcaaagaagtccgtggactccttgccaaagacttagctgttgttgcattgcgcgaaggtcttgatttacctccgactgatgatccaatgcttcttgcgtacctcttggacccgtcaaacacgacgcccgaaggcgtagcccgtcgttacggcggcgagtggaccgaagatgcaggcgagcgcgcgttattggccgaacgtttgcaccagaatttattaggacgtttgcaaggcgaggaacgtctcctctggctttacgaagaagtggagaaaccattgagtcgcgtgctcgcgcatatggaagctaccggtgtcaaattagacgtggcgtatttggaggcactcagccttgaagttgctgccgaaatgcgccgcttggaggaagaagtattccgtttagcaggccactcctttaaccttaattctcgcgatcagttagaacgtgtgttgttcgatgaacttggtctccctcctatcggcaagacagagaagaccggtaaacgtagcacttcagcggcggttttagaagctcttcgcgaagtccatcccattgtggacaagatcttgcagtaccgcgaactcgcgaaattgaaaggcacctatattgaccctcttccggcattagtccacccgaaaacgggacgcctccatacccgcttcaaccaaacagccacggcgaccggtcgtttgtcctcctctgatccaaaccttcagaatattccagtacgtaccccattgggccagaagatccgccgcgcgtttgtagctgaggagggttggcgtttagtggccctcgattatagccaaattgaattacgtgtccttgcccatctttctggcgatgagaacctcatccgcgtgtttcaggaaggcaaagacattcacactcaaacggcaagctggatgtttggagtgtcggcggaagcgatcgatcctttgatgcgtcgtgcagcgaagaccatcaatttcggtgttctctacggtatgagtgcccaccgtttgtcgcaggaattaggcattccctatgaagaagctgcggcgttcattcagcgctactttcaaagctatcccaaagttaaagcatggatcgagaagactctcgaagaaggccgcacacgtggttacgtagagaccttatttggacgtcgccgctatgttcccgatttaaacgctcgcgtgaaatctgtccgtgaagccgccgaacgcatggcgttcaacatgcctgtacagggcacggcagctgacctcatgaaacttgcaatggtgcgcctttttccacaattgcgtgaagttggtgcccgcatgctcttgcaggtccacgatgaactcttgttagaagcgccaaaagagcgtgcggaagaggtggcagccctcgcgaaagaggttatggaaggcgtgtggcccttagcggtgcctcttgaagtcgaagttggtattggcgaggattggttggctgccaaaggataatga

SEQ ID NO: 944 - protein, 841 aa, synthetic construct
  REGION 1..841: note = Variant of DNA polymerase I from Thermus sp. strain 2.9
MHHHHHHGGSGMLPLFEPKGRVLLVDGHHLAYRNFFALKGLTTSRGEPVQGVYGFAKSLLKALKEDGDVVIVVFDAKAPSFRHEAYEAYKAGRAPTPEDFPRQLALMKELVDLLGLERLEVPGFEADDVLATLAKKAEREGYEVQILTADRDLFQLLSPRISVLHPEGHRITPEWLWEKYGLRPEQWVDFRALAGDPSDNIPGVKGIGEKTALKLLKEWGSLENLLKNLDQVKPESVREKILAHLEDLKLSRELSRVRTDLPLEVDFRGRREPDWEGLKAFLERLEFGSLLHEFGLLESPLPAEEAPWPPPEGAFLGYRLSRPEPMWAELLALAASAQGRVYRAEDPHGALRGLKEVRGLLAKDLAVVALREGLDLPPTDDPMLLAYLLDPSNTTPEGVARRYGGEWTEDAGERALLAERLHQNLLGRLQGEERLLWLYEEVEKPLSRVLAHMEATGVKLDVAYLEALSLEVAAEMRRLEEEVFRLAGHSFNLNSRDQLERVLFDELGLPPIGKTEKTGKRSTSAAVLEALREVHPIVDKILQYRELAKLKGTYIDPLPALVHPKTGRLHTRFNQTATATGRLSSSDPNLQNIPVRTPLGQKIRRAFVAEEGWRLVALDYSQIELRVLAHLSGDENLIRVFQEGKDIHTQTASWMFGVSAEAIDPLMRRAAKTINFGVLYGMSAHRLSQELGIPYEEAAAFIQRYFQSYPKVKAWIEKTLEEGRTRGYVETLFGRRRYVPDLNARVKSVREAAERMAFNMPVQGTAADLMKLAMVRLFPQLREVGARMLLQVHDELLLEAPKERAEEVAALAKEVMEGVWPLAVPLEVEVGIGEDWLAAKG

SEQ ID NO: 945 - DNA, 2529 bp, synthetic construct
  misc_feature 1..2529: note = Variant of DNA polymerase I from Thermus sp. strain 2.9
  source 1..2529: mol_type = other DNA
atgcaccatcatcatcatcatggcggtagcggcatgttaccgttgttcgaacctaaaggtcgcgtgcttctggttgatggccatcatctcgcgtatcgtaacttctttgccctgaaaggattaaccaccagccgtggcgagccggtacagggtgtctacggctttgcaaagtcgctcctgaaagctctgaaagaagacggtgatgtggtgattgttgtctttgatgcgaaagcgccaagttttcgccacgaagcgtacgaagcttacaaagccgggcgtgctccaacgccggaagactttcctcgccaattggcgcttatgaaggaattagtggatttgcttggcctcgaacgcttggaagttcccggtttcgaggcagacgacgtattagcgactctcgcaaagaaagccgaacgtgagggctatgaagtccagatcttgacagcagatcgcgatcttttccagcttttatctccgcgcatctcggtgttacacccggaagggcatctgatcaccccggaatggctctgggagaaatatggtttgcgtcccgaacaatgggtggattttcgcgccttagccggcgatccgagcgacaatattccgggagttaaaggtatcggcgagaagacggcgctcaagctccttaaagaatgggggtcgttggagaacttgcttaagaatttagatcaggtcaaaccagagtcagtgcgtgagaagattcttgcacacctcgaagacctcaaattaagccgcgaattgtcccgtgtacgcaccgatttgccgctcgaagttgatttccgtggccgccgcgaacctgactgggagggtcttaaagcgtttttagagcgtcttgaatttggttcgctcttgcatgaattcggccttttagaaagcccgttaccagccgaagaagcaccttggccaccgcccgaaggcgcgtttttaggttaccgtttgagtcgcccggaaccgatgtgggccgaattattggctcttgcagcgtctgcccagggacgtgtgtatcgcgcggaagaccctcatggtgcgctccgcggcctcaaagaagtccgtggactccttgccaaagacttagctgttgttgcattgcgcgaaggtcttgatttacctccgactgatgatccaatgcttcttgcgtacctcttggacccgtcaaacacgacgcccgaaggcgtagcccgtcgttacggcggcgagtggaccgaagatgcaggcgagcgcgcgttattggccgaacgtttgcaccagaatttattaggacgtttgcaaggcgaggaacgtctcctctggctttacgaagaagtggagaaaccattgagtcgcgtgctcgctcatatggaagctaccggtgtcaaattagacgtggcgtatttggaggcactcagccttgaagttgctgccgaaatgcgccgcttggaggaagaagtattccgtttagcaggccactcctttaaccttaattctcgcgatcagttagaacgtgtgttgttcgatgaacttggtctccctcctatcggcaagacagagaagaccggtaaacgtagcacttcagcggcggttttagaagctcttcgcgaagtccatcccattgtggacaagatcttgcagtaccgcgaactcgcgaaattgaaaggcacctatattgaccgtcttccggcattagtccacccgaaaacgggacgcctccatacccgcttcaaccaaacagccacggcgaccggtcgtttgtcctcctctgatccaaaccttcagaatattccagtacgtaccccattgggccagaagatccgccgcgcgtttgtagctgaggagggttggcgtttagtggccctcgattatagccaaattgaattacgtgtccttgcccatctttctggcgatgagaacctcatccgcgtgtttcaggaaggcaaagacattcacactcaaacggcaagctggatgtttggactgtcgtcggaagcgatcgatcctttgatgcgtcgtgcagcgaagaccatcaatttcggtgttctctacggtatgagtgcccatcgtttgtcgcaggaattaggcattccctatgaagaagctgcggcgttcattcagcgctactttcaaagctatcccaaagttaaagcatggatcgagaagactctcgaagaaggccgcacacgtggttacgtagagaccttatttggacgtcgccgctatgttcccgatttaaccgctcgcgtgaaatctgtccgtgaagccgccgaacgcatggcgttcaacatgcctgtacagggcacggcagctgacctcatgaaacttgcaatggtgcgcctttttccacaattgcgtgaagttggtgcccgcatgctcttgcaggtccacgatgaactcttgttagaagcgccaaaagagcgtgcggaagaggtggcagccctcgcgaaagaggttatggaaggcgtgtggcccttagcggtgcctcttgaagtcgaagttggtattggcgaggattggttggctgccaaaggataatga

SEQ ID NO: 946 - protein, 841 aa, synthetic construct
  REGION 1..841: note = Variant of DNA polymerase I from Thermus sp. strain 2.9
MHHHHHHGGSGMLPLFEPKGRVLLVDGHHLAYRNFFALKGLTTSRGEPVQGVYGFAKSLLKALKEDGDVVIVVFDAKAPSFRHEAYEAYKAGRAPTPEDFPRQLALMKELVDLLGLERLEVPGFEADDVLATLAKKAEREGYEVQILTADRDLFQLLSPRISVLHPEGHLITPEWLWEKYGLRPEQWVDFRALAGDPSDNIPGVKGIGEKTALKLLKEWGSLENLLKNLDQVKPESVREKILAHLEDLKLSRELSRVRTDLPLEVDFRGRREPDWEGLKAFLERLEFGSLLHEFGLLESPLPAEEAPWPPPEGAFLGYRLSRPEPMWAELLALAASAQGRVYRAEDPHGALRGLKEVRGLLAKDLAVVALREGLDLPPTDDPMLLAYLLDPSNTTPEGVARRYGGEWTEDAGERALLAERLHQNLLGRLQGEERLLWLYEEVEKPLSRVLAHMEATGVKLDVAYLEALSLEVAAEMRRLEEEVFRLAGHSFNLNSRDQLERVLFDELGLPPIGKTEKTGKRSTSAAVLEALREVHPIVDKILQYRELAKLKGTYIDRLPALVHPKTGRLHTRFNQTATATGRLSSSDPNLQNIPVRTPLGQKIRRAFVAEEGWRLVALDYSQIELRVLAHLSGDENLIRVFQEGKDIHTQTASWMFGLSSEAIDPLMRRAAKTINFGVLYGMSAHRLSQELGIPYEEAAAFIQRYFQSYPKVKAWIEKTLEEGRTRGYVETLFGRRRYVPDLTARVKSVREAAERMAFNMPVQGTAADLMKLAMVRLFPQLREVGARMLLQVHDELLLEAPKERAEEVAALAKEVMEGVWPLAVPLEVEVGIGEDWLAAKG

SEQ ID NO: 947 - DNA, 2529 bp, synthetic construct
  misc_feature 1..2529: note = Variant of DNA polymerase I from Thermus sp. strain 2.9
  source 1..2529: mol_type = other DNA
atgcaccatcatcatcatcatggcggtagcggcatgttaccgttgttcgaacctaaaggtcgcgtgcttctggttgatggccatcatctcgcgtatcgtaacttctttgccctgaaaggattaaccaccagccgtggcgagccggtacagggtgtctacggctttgcaaagtcgctcctgaaagctctgaaagaagacggtgatgtggtgattgttgtctttgatgcgaaagcgccaagttttcgccacgaagcgtacgaagcttacaaagccgggcgtgctccaacgccggaagactttcctcgccaattggcgcttatgaaggaattagtggatttgcttggcctcgaacgcttggaagttcccggtttcgaggcagacgacgtattagcgactctcgcaaagaaagccgaacgtgagggctatgaagtccagatcttgacagcagatcgcgatcttttccagcttttatctccgcgcatctcggtgttacacccggaagggcatcgtatcaccccggaatggctctgggagaaatatggtttgcgtcccgaacaatgggtggattttcgcgccttagcaggcgatccgagcgacaatattccgggagttaaaggtatcggcgagaagacggcgctcaagctccttaaagaatgggggtcgttggagaacttgcttaagaatttagatcaggtcaaaccagagtcagtgcgtgagaagattcttgcacacctcgaagacctcaaattaagccgcgaattgtcccgtgtacgcaccgatttgccgctcgaagttgatttccgtggccgccgcgaacctgactgggagggtcttaaagcgtttttagagcgtcttgaatttggttcgctcttgcatgaattcggccttttagaaagcccgttaccagccgaagaagcaccttggccaccgcccgaaggcgcgtttttaggttaccgtttgagtcgcccggaaccgatgtgggccgaattattggctcttgcagcgtctgcccagggacgtgtgtatcgcgcggaagaccctcatggtgcgctccgcggcctcaaagaagtccgtggactccttgccaaagacttagctgttgttgcattgcgcgaaggtcttgatttacctccgactgatgatccaatgcttcttgcgtacctcttggacccgtcaaacacgacgcccgaaggcgtagcccgtcgttacggcggcgagtggaccgaagatgcaggcgagcgcgcgttattggccgaacgtttgcacgccaatttattaggacgtttgcaaggcgaggaacgtctcctctggctttacgaagaagtggagaaaccattgagtcgcgtgctcgcgcatatggaagctaccggtgtcaaattagacgtggcgtatttggaggcactcagccttgaagttgctgccgaaatgcgccgcttggaggaagaagtattccgtttagcaggccactcctttaaccttaattctcgcgatcagttagaacgtgtgttgttcgatgaacttggtctccctcctatcggcgtgacagagaagaccggtaaacgtagcacttcagcggcggttttagaagctcttcgcgaagtccatcccattgtggacaagatcttgcagtaccgcgaactcgcgaaattgaaaggcacctatattgaccctcttccggcattagtccacccgaaaacgggacgcctccatacccgcttcaaccaaacagccacggcgaccggtcgtttgtcctcctctgatccaaaccttcagaatattccagtacgtaccccattgggccagaagatccgccgcgcgtttgtagctgaggagggttggcgtttagtggccctcgattatagccaaattgaattacgtgtccttgcccatctttctggcgatgagaacctcatccgcgtgtttcaggaaggcaaagacattcacactcaaacggcaagctggatgtttggattatcagctgaagcgatcgatcctttgatgcgtcgtgcagcgaagaccatcaatttcggtgttctctacggtatgagtgcccatcgtttgtcgcaggaattaggcattccctatgaagaagctgcggcgttcattcagcgctactttcaaagctatcccaaagttaaagcatggatcgagaagactctcgaagaaggccgcacacgtggttacgtagagaccttatttggacgtcgccgctatgttcccgatttaaacgctcgcgtgaaatctgtccgtgaagccgccgaacgcatggcgttcaacatgcctgtacagggcacggcagctgacctcatgaaacttgcaatggtgcgcctttttccacaattgcgtgaagttggtgcccgcatgctcttgcaggtccacgatgaactcttgttagaagcgccaaaagagcgtgcggaagaggtggcagccctcgcgaaagaggttatggaaggcgtgtggcccttagcggtgcctcttgaagtcgaagttggtattggcgaggattggttggctgccaaaggataatga

SEQ ID NO: 948 - protein, 841 aa, synthetic construct
  REGION 1..841: note = Variant of DNA polymerase I from Thermus sp. strain 2.9
MHHHHHHGGSGMLPLFEPKGRVLLVDGHHLAYRNFFALKGLTTSRGEPVQGVYGFAKSLLKALKEDGDVVIVVFDAKAPSFRHEAYEAYKAGRAPTPEDFPRQLALMKELVDLLGLERLEVPGFEADDVLATLAKKAEREGYEVQILTADRDLFQLLSPRISVLHPEGHRITPEWLWEKYGLRPEQWVDFRALAGDPSDNIPGVKGIGEKTALKLLKEWGSLENLLKNLDQVKPESVREKILAHLEDLKLSRELSRVRTDLPLEVDFRGRREPDWEGLKAFLERLEFGSLLHEFGLLESPLPAEEAPWPPPEGAFLGYRLSRPEPMWAELLALAASAQGRVYRAEDPHGALRGLKEVRGLLAKDLAVVALREGLDLPPTDDPMLLAYLLDPSNTTPEGVARRYGGEWTEDAGERALLAERLHANLLGRLQGEERLLWLYEEVEKPLSRVLAHMEATGVKLDVAYLEALSLEVAAEMRRLEEEVFRLAGHSFNLNSRDQLERVLFDELGLPPIGVTEKTGKRSTSAAVLEALREVHPIVDKILQYRELAKLKGTYIDPLPALVHPKTGRLHTRFNQTATATGRLSSSDPNLQNIPVRTPLGQKIRRAFVAEEGWRLVALDYSQIELRVLAHLSGDENLIRVFQEGKDIHTQTASWMFGLSAEAIDPLMRRAAKTINFGVLYGMSAHRLSQELGIPYEEAAAFIQRYFQSYPKVKAWIEKTLEEGRTRGYVETLFGRRRYVPDLNARVKSVREAAERMAFNMPVQGTAADLMKLAMVRLFPQLREVGARMLLQVHDELLLEAPKERAEEVAALAKEVMEGVWPLAVPLEVEVGIGEDWLAAKG

SEQ ID NO: 949 - DNA, 2529 bp, synthetic construct
  misc_feature 1..2529: note = Variant of DNA polymerase I from Thermus sp. strain 2.9
  source 1..2529: mol_type = other DNA
atgcaccatcatcatcatcatggcggtagcggcatgttaccgttgttcgaacctaaaggtcgcgtgcttctggttgatggccatcatctcgcgtatcgtaacttctttgccctgaaaggattaaccaccagccgtggcgagccggtacagggtgtctacggctttgcaaagtcgctcctgaaagctctgaaagaagacggtgatgtggtgattgttgtctttgatgcgaaagcgccaagttttcgccacgaagcgtacgaagcttacaaagccgggcgtgctccaacgccggaagactttcctcgccaattggcgcttatgaaggaattagtggatttgcttggcctcgaacgcttggaagttcccggtttcgaggcagacgacgtattagcgactctcgcaaagaaagccgaacgtgagggctatgaagtccagatcttgacagcagatcgcgatcttttccagcttttatctccgcgcatctcggtgttacacccggaagggcatcgtatcaccccggaatggctctgggagaaatatggtttgcgtcccgaacaatgggtggattttcgcgccttagcaggcgatccgagcgacaatattccgggagttaaaggtatcggcgagaagacggcgctcaagctccttaaagaatgggggtcgttggagaacttgcttaagaatttagatcaggtcaaaccagagtcagtgcgtgagaagattcttgcacacctcgaagacctcaaattaagccgcgaattgtcccgtgtacgcaccgatttgccgctcgaagttgatttccgtggccgccgcgaacctgactgggagggtcttaaagcgtttttagagcgtcttgaatttggttcgctcttgcatgaattcggccttttagaaagcccgggtccagccgaagaagcaccttggccaccgcccgaaggcgcgtttttaggttaccgtttgagtcgcccggaaccgatgtgggccgaattattggctcttgcagcgtctgcccagggacgtgtgtatcgcgcggaagaccctcatggtgcgctccgcggcctcaaagaagtccgtggactccttgccaaagacttagctgttgttgcattgcgcgaaggtcttgatttacctccgactgatgatccaatgcttcttgcgtacctcttggacccgtcaaacacgacgcccgaaggcgtagcccgtcgttacggcggcgagtggaccgaagatgcaggcgagcgcgcgttattggccgaacgtttgcacgccaatttattaggacgtttgcaaggcgaggaacgtctcctctggctttacgaagaagtggagaaaccattgagtcgcgtgctcgcgcatatggaagctaccggtgtcaaattagacgtggcgtatttggaggcactcagccttgaagttgctgccgaaatgcgccgcttggaggaagaagtattccgtttagcaggccactcctttaaccttaattctcgcgatcagttagaacgtgtgttgttcgatgaacttggtctccctcctatcggcaagacagagaagaccggtaaacgtagcacttcagcggcggttttagaagctcttcgcgaagtccatcccattgtggacaagatcttgcagtaccgcgaactcgcgaaattgaaaggcacctatattgaccctcttccggcattagtccacccgaaaacgggacgcctccatacccgcttcaaccaaacagccacggcgaccggtcgtttgtcctcctctgatccaaaccttcagaatattccagtacgtaccccattgggccagaagatccgccgcgcgtttgtagctgaggagggttggcgtttagtggccctcgattatagccaaattgaattacgtgtccttgcccatctttctggcgatgagaacctcatccgcgtgtttcaggaaggcaaagacattcacactcaaacggcaagctggatgtttggattatcagctgaagcgatcgatcctttgatgcgtcgtgcagcgaagaccatcaatttcggtgttctctacggtatgagtgcccatcgtttgtcgcaggaattaggcattccctatgaagaagctgcggcgttcattcagcgctactttcaaagctatcccaaagttaaagcatggatcgagaagactctcgaagaaggccgcacacgtggttacgtagagaccttatttggacgtcgccgctatgttcccgatttaaacgctcgcgtgaaatctgtccgtgaagccgccgaacgcatggcgttcaacatgcctgtacagggcacggcagctgacctcatgaaacttgcaatggtgcgcctttttccacaattgcgtgaagttggtgcccgcatgctcttgcaggtccacgatgaactcttgttagaagcgccaaaagagcgtgcggaagaggtggcagccctcgcgaaagaggttatggaaggcgtgtggcccttagcggtgcctcttgaagtcgaagttggtattggcgaggattggttggctgccaaaggataatga

SEQ ID NO: 950 - protein, 841 aa, synthetic construct
  REGION 1..841: note = Variant of DNA polymerase I from Thermus sp. strain 2.9
MHHHHHHGGSGMLPLFEPKGRVLLVDGHHLAYRNFFALKGLTTSRGEPVQGVYGFAKSLLKALKEDGDVVIVVFDAKAPSFRHEAYEAYKAGRAPTPEDFPRQLALMKELVDLLGLERLEVPGFEADDVLATLAKKAEREGYEVQILTADRDLFQLLSPRISVLHPEGHRITPEWLWEKYGLRPEQWVDFRALAGDPSDNIPGVKGIGEKTALKLLKEWGSLENLLKNLDQVKPESVREKILAHLEDLKLSRELSRVRTDLPLEVDFRGRREPDWEGLKAFLERLEFGSLLHEFGLLESPGPAEEAPWPPPEGAFLGYRLSRPEPMWAELLALAASAQGRVYRAEDPHGALRGLKEVRGLLAKDLAVVALREGLDLPPTDDPMLLAYLLDPSNTTPEGVARRYGGEWTEDAGERALLAERLHANLLGRLQGEERLLWLYEEVEKPLSRVLAHMEATGVKLDVAYLEALSLEVAAEMRRLEEEVFRLAGHSFNLNSRDQLERVLFDELGLPPIGKTEKTGKRSTSAAVLEALREVHPIVDKILQYRELAKLKGTYIDPLPALVHPKTGRLHTRFNQTATATGRLSSSDPNLQNIPVRTPLGQKIRRAFVAEEGWRLVALDYSQIELRVLAHLSGDENLIRVFQEGKDIHTQTASWMFGLSAEAIDPLMRRAAKTINFGVLYGMSAHRLSQELGIPYEEAAAFIQRYFQSYPKVKAWIEKTLEEGRTRGYVETLFGRRRYVPDLNARVKSVREAAERMAFNMPVQGTAADLMKLAMVRLFPQLREVGARMLLQVHDELLLEAPKERAEEVAALAKEVMEGVWPLAVPLEVEVGIGEDWLAAKG

SEQ ID NO: 951 - DNA, 2529 bp, synthetic construct
  misc_feature 1..2529: note = Variant of DNA polymerase I from Thermus sp. strain 2.9
  source 1..2529: mol_type = other DNA
atgcaccatcatcatcatcatggcggtagcggcatgttaccgttgttcgaacctaaaggtcgcgtgcttctggttgatggccatcatctcgcgtatcgtaacttctttgccctgaaaggattaaccaccagccgtggcgagccggtacagggtgtctacggctttgcaaagtcgctcctgaaagctctgaaagaagacggtgatgtggtgattgttgtctttgatgcgaaagcgccaagttttcgccacgaagcgtacgaagcttacaaagccgggcgtgctccaacgccggaagactttcctcgccaattggcgcttatgaaggaattagtggatttgcttggcctcgaacgcttggaagttcccggtttcgaggcagacgacgtattagcgactctcgcaaagaaagccgaacgtgagggctatgaagtccagatcttgacagcagatcgcgatcttttccagcttttatctccgcgcatctcggtgttacacccggaagggcatcgtatcaccccggaatggctctgggagaaatatggtttgcgtcccgaacaatgggtggattttcgcgccttagcaggcgatccgagcgacaatattccgggagttaaaggtatcggcgagaagacggcgctcaagctccttaaagaatgggggtcgttggagaacttgcttaagaatttagatcaggtcaaaccagagtcagtgcgtgagaagattcttgcacacctcgaagacctcaaattaagccgcgaattgtcccgtgtacgcaccgatttgccgctcgaagttgatttccgtggccgccgcgaacctgactgggagggtcttaaagcgtttttagagcgtcttgaatttggttcgctcttgcatgaattcggccttttagaaagcccgttaccagccgaagaagcaccttggccaccgcccgaaggcgcgtttttaggttaccgtttgagtcgcccggaaccgatgtgggccgaattattggctcttgcagcgtctgcccagggacgtgtgtatcgcgcggaagaccctcatggtgcgctccgcggcctcaaagaagtccgtggactccttgccaaagacttagctgttgttgcattgcgcgaaggtcttgatttacctccgactgatgatccaatgcttcttgcgtacctcttggacccgtcaaacacgacgcccgaaggcgtagcccgtcgttacggcggcgagtggaccgaagatgcaggcgagcgcgcgttattggccgaacgtttgcacgccaatttattaggacgtttgcaaggcgaggaacgtctcctctggctttacgaagaagtggagaaaccattgagtcgcgtgctcgcgcatatggaagctaccggtgtcaaattagacgtggcgtatttggaggcactcagccttgaagttgctgccgaaatgcgccgcttggaggaagaagtattccgtttagcaggccactcctttaaccttaattctcgcgatcagttagaacgtgtgttgttcgatgaacttggtctccctcctatcggcaagacagagaagaccggtaaacgtagcacttcagcggcggttttagaagctcttcgcgaagtccatcccattgtggacaagatcttgcagtaccgcgaactcgcgaaattgaaaggcacctatattgaccctcttccggcattagtccacccgaaaacgggacgcctccatacccgcttcaaccaaacagccacggcgaccggtcgtttgtcctcctctgatccaaaccttcagaatattccagtaagtaccccattgggccagaagatccgccgcgcgtttgtagctgaggagggttggcgtttagtggccctcgattatagccaaattgaattacgtgtccttgcccatctttctggcgatgagaacctcatccgcgtgtttcaggaaggcaaagacattcacactcaaacggcaagctggatgtttggattatcagctgaagcgatcgatcctttgatgcgtcgtgcagcgaagaccatcaatttcggtgttctctacggtatgagtgcccatcgtttgtcgcaggaattaggcattccctatgaagaagctgcggcgttcattcagcgctactttcaaagctatcccaaagttaaagcatggatcgagaagactctcgaagaaggccgcacacgtggttacgtagagaccttatttggacgtcgccgctatgttcccgatttaaacgctcgcgtgaaatctgtccgtgaagccgccgaacgcatggcgttcaacatgcctgtacagggcacggcagctgacctcatgaaacttgcaatggtgcgcctttttccacaattgcgtgaagttggtgcccgcatgctcttgcaggtccacgatgaactcttgttagaagcgccaaaagagcgtgcggaagaggtggcagccctcgcgaaagaggttatggaaggcgtgtggcccttagcggtgcctcttgaagtcgaagttggtattggcgaggattggttggctgccaaaggataatga

SEQ ID NO: 952 - protein, 841 aa, synthetic construct
  REGION 1..841: note = Variant of DNA polymerase I from Thermus sp. strain 2.9
MHHHHHHGGSGMLPLFEPKGRVLLVDGHHLAYRNFFALKGLTTSRGEPVQGVYGFAKSLLKALKEDGDVVIVVFDAKAPSFRHEAYEAYKAGRAPTPEDFPRQLALMKELVDLLGLERLEVPGFEADDVLATLAKKAEREGYEVQILTADRDLFQLLSPRISVLHPEGHRITPEWLWEKYGLRPEQWVDFRALAGDPSDNIPGVKGIGEKTALKLLKEWGSLENLLKNLDQVKPESVREKILAHLEDLKLSRELSRVRTDLPLEVDFRGRREPDWEGLKAFLERLEFGSLLHEFGLLESPLPAEEAPWPPPEGAFLGYRLSRPEPMWAELLALAASAQGRVYRAEDPHGALRGLKEVRGLLAKDLAVVALREGLDLPPTDDPMLLAYLLDPSNTTPEGVARRYGGEWTEDAGERALLAERLHANLLGRLQGEERLLWLYEEVEKPLSRVLAHMEATGVKLDVAYLEALSLEVAAEMRRLEEEVFRLAGHSFNLNSRDQLERVLFDELGLPPIGKTEKTGKRSTSAAVLEALREVHPIVDKILQYRELAKLKGTYIDPLPALVHPKTGRLHTRFNQTATATGRLSSSDPNLQNIPVSTPLGQKIRRAFVAEEGWRLVALDYSQIELRVLAHLSGDENLIRVFQEGKDIHTQTASWMFGLSAEAIDPLMRRAAKTINFGVLYGMSAHRLSQELGIPYEEAAAFIQRYFQSYPKVKAWIEKTLEEGRTRGYVETLFGRRRYVPDLNARVKSVREAAERMAFNMPVQGTAADLMKLAMVRLFPQLREVGARMLLQVHDELLLEAPKERAEEVAALAKEVMEGVWPLAVPLEVEVGIGEDWLAAKG

SEQ ID NO: 953 - DNA, 2529 bp, synthetic construct
  misc_feature 1..2529: note = Variant of DNA polymerase I from Thermus sp. strain 2.9
  source 1..2529: mol_type = other DNA
atgcaccatcatcatcatcatggcggtagcggcatgttaccgttgttcgaacctaaaggtcgcgtgcttctggttgatggccatcatctcgcgtatcgtaacttctttgccctgaaaggattaaccaccagccgtggcgagccggtacagggtgtctacggctttgcaaagtcgctcctgaaagctctgaaagaagacggtgatgtggtgattgttgtctttgatgcgaaagcgccaagttttcgccacgaagcgtacgaagcttacaaagccgggcgtgctccaacgccggaagactttcctcgccaattggcgcttatgaaggaattagtggatttgcttggcctcgaacgcttggaagttcccggtttcgaggcagacgacgtattagcgactctcgcaaagaaagccgaacgtgagggctatgaagtccagatcttgacagcagatcgcgatcttttccagcttttatctccgcgcatctcggtgttacacccggaagggcatcgtatcaccccggaatggctctgggagaaatatggtttgcgtcccgaacaatgggtggattttcgcgccttagcaggcgatccgggtgacaatattccgggagttaaaggtatcggcgagaagacggcgctcaagctccttaaagaatgggggtcgttggagaacttgcttaagaatttagatcaggtcaaaccagagtcagtgcgtgagaagattcttgcacacctcgaagacctcaaattaagccgcgaattgtcccgtgtacgcaccgatttgccgctcgaagttgatttccgtggccgccgcgaacctgactgggagggtcttaaagcgtttttagagcgtcttgaatttggttcgctcttgcatgaattcggccttttagaaagcccgttaccagccgaagaagcaccttggccaccgcccgaaggcgcgtttttaggttaccgtttgagtcgcccggaaccgatgtgggccgaattattggctcttgcagcgtctgcccagggacgtgtgtatcgcgcggaagaccctcatggtgcgctccgcggcctcaaagaagtccgtggactccttgccaaagacttagctgttgttgcattgcgcgaaggtcttgatttacctccgactgatgatccaatgcttcttgcgtacctcttggacccgtcaaacacgacgcccgaaggcgtagcccgtcgttacggcggcgagtggaccgaagatgcaggcgagcgcgcgttattggccgaacgtttgcacgccaatttattaggacgtttgcaaggcgaggaacgtctcctctggctttacgaagaagtggagaaaccattgagtcgcgtgctcgcgcatatggaagctaccggtgtcaaattagacgtggcgtatttggaggcactcagccttgaagttgctgccgaaatgcgccgcttggaggaagaagtattccgtttagcaggccactcctttaaccttaattctcgcgatcagttagaacgtgtgttgttcgatgaacttggtctccctcctatcggcaagacagagaagaccggtaaacgtagcacttcagcggcggttttagaagctcttcgcgaagtccatcccattgtggacaagatcttgcagtaccgcgaactcgcgaaattgaaaggcacctatattgaccctcttccggcattagtccacccgaaaacgggacgcctccatacccgcttcaaccaaacagccacggcgaccggtcgtttgtcctcctctgatccaaaccttcagaatattccagtacgtaccccattgggccagaagatccgccgcgcgtttgtagctgaggagggttggcgtttagtggccctcgattatagccaaattgaattacgtgtccttgcccatctttctggcgatgagaacctcatccgcgtgtttcaggaaggcaaagacattcacactcaaacggcaagctggatgtttggattatcagctgaagcgatcgatcctttgatgcgtcgtgcagcgaagaccatcaatttcggtgttctctacggtatgagtgcccatcgtttgtcgcaggaattaggcattccctatgaagaagctgcggcgttcattcagcgctactttcaaagctatcccaaagttaaagcatggatcgagaagactctcgaagaaggccgcacacgtggttacgtagagaccttatttggacgtcgccgctatgttcccgatttaaacgctcgcgtgaaatctgtccgtgaagccgccgaacgcatggcgttcaacatgcctgtacagggcacggcagctgacctcatgaaacttgcaatggtgcgcctttttccacaattgcgtgaagttggtgcccgcatgctcttgcaggtccacgatgaactcttgttagaagcgccaaaagagcgtgcggaagaggtggcagccctcgcgaaagaggttatggaaggcgtgtggcccttagcggtgcctcttgaagtcgaagttggtattggcgaggattggttggctgccaaaggataatga

SEQ ID NO: 954 - protein, 841 aa, synthetic construct
  REGION 1..841: note = Variant of DNA polymerase I from Thermus sp. strain 2.9
MHHHHHHGGSGMLPLFEPKGRVLLVDGHHLAYRNFFALKGLTTSRGEPVQGVYGFAKSLLKALKEDGDVVIVVFDAKAPSFRHEAYEAYKAGRAPTPEDFPRQLALMKELVDLLGLERLEVPGFEADDVLATLAKKAEREGYEVQILTADRDLFQLLSPRISVLHPEGHRITPEWLWEKYGLRPEQWVDFRALAGDPGDNIPGVKGIGEKTALKLLKEWGSLENLLKNLDQVKPESVREKILAHLEDLKLSRELSRVRTDLPLEVDFRGRREPDWEGLKAFLERLEFGSLLHEFGLLESPLPAEEAPWPPPEGAFLGYRLSRPEPMWAELLALAASAQGRVYRAEDPHGALRGLKEVRGLLAKDLAVVALREGLDLPPTDDPMLLAYLLDPSNTTPEGVARRYGGEWTEDAGERALLAERLHANLLGRLQGEERLLWLYEEVEKPLSRVLAHMEATGVKLDVAYLEALSLEVAAEMRRLEEEVFRLAGHSFNLNSRDQLERVLFDELGLPPIGKTEKTGKRSTSAAVLEALREVHPIVDKILQYRELAKLKGTYIDPLPALVHPKTGRLHTRFNQTATATGRLSSSDPNLQNIPVRTPLGQKIRRAFVAEEGWRLVALDYSQIELRVLAHLSGDENLIRVFQEGKDIHTQTASWMFGLSAEAIDPLMRRAAKTINFGVLYGMSAHRLSQELGIPYEEAAAFIQRYFQSYPKVKAWIEKTLEEGRTRGYVETLFGRRRYVPDLNARVKSVREAAERMAFNMPVQGTAADLMKLAMVRLFPQLREVGARMLLQVHDELLLEAPKERAEEVAALAKEVMEGVWPLAVPLEVEVGIGEDWLAAKG

SEQ ID NO: 955 - DNA, 2529 bp, synthetic construct
  misc_feature 1..2529: note = Variant of DNA polymerase I from Thermus sp. strain 2.9
  source 1..2529: mol_type = other DNA
atgcaccatcatcatcatcatggcggtagcggcatgttaccgttgttcgaacctaaaggtcgcgtgcttctggttgatggccatcatctcgcgtatcgtaacttctttgccctgaaaggattaaccaccagccgtggcgagccggtacagggtgtctacggctttgcaaagtcgctcctgaaagctctgaaagaagacggtgatgtggtgattgttgtctttgatgcgaaagcgccaagttttcgccacgaagcgtacgaagcttacaaagccgggcgtgctccaacgccggaagactttcctcgccaattggcgcttatgaaggaattagtggatttgcttggcctcgaacgcttggaagttcccggtttcgaggcagacgacgtattagcgactctcgcaaagaaagccgaacgtgagggctatgaagtccagatcttgacagcagatcgcgatcttttccagcttttatctccgcgcatctcggtgttacacccggaagggcatcgtatcaccccggaatggctctgggagaaatatggtttgcgtcccgaacaatgggtggattttcgcgccttagcaggcgatccgagcgacaatattccgggagttaaaggtatcggcgagaagacggcgctcaagctccttaaagaatgggggtcgttggagaacttgcttaagaatttagatcaggtcaaaccagagtcagtgcgtgagaagattcttgcacacctcgaagacctcaaattaagccgcgaattgtcccgtgtacgcaccgatttgccgctcgaagttgatttccgtggccgccgcgaacctgactgggagggtcttaaagcgtttttagagcgtcttgaatttggttcgctcttgcatgaattcggccttttagaaagcccgttaccagccgaagaagcaccttggccaccgcccgaaggcgcgtttttaggttaccgtttgagtcgcccggaaccgatgtgggccgaattattggctcttgcagcgtctgcccagggacgtgtgtatcgcgcggaagaccctcatggtgcgctccgcggcctcaaagaagtccgtggactccttgccaaagacttagctgttgttgcattgcgcgaaggtcttgatttacctccgactgatgatccaatgcttcttgcgtacctcttggacccgtcaaacacgacgcccgaaggcgtagcccgtcgttacggcggcgagtggaccgaagatgcaggcgagcgcgcgttattggccgaacgtttgcacgccaatttattaggacgtttgcaaggcgaggaacgtctcctctggctttacgaagaagtggagaaaccattgagtcgcgtgctcgcgcatatggaagctaccggtgtcaaattagacgtggcgtatttggaggcactcagccttgaagttgctgccgaaatgcgccgcttggaggaagaagtattccgtttagcaggccactcctttaaccttaattctcgcgatcagttagaacgtgtgttgttcgatgaacttggtctccctcctatcggcaagacagaggctaccggtaaacgtagcacttcagcggcggttttagaagctcttcgcgaagtccatcccattgtggacaagatcttgcagtaccgcgaactcgcgaaattgaaaggcacctatattgaccctcttccggcattagtccacccgaaaacgggacgcctccatacccgcttcaaccaaacagccacggcgaccggtcgtttgtcctcctctgatccaaaccttcagaatattccagtacgtaccccattgggccagaagatccgccgcgcgtttgtagctgaggagggttggcgtttagtggccctcgattatagccaaattgaattacgtgtccttgcccatctttctggcgatgagaacctcatccgcgtgtttcaggaaggcaaagacattcacactcaaacggcaagctggatgtttggattatcagctgaagcgatcgatcctttgatgcgtcgtgcagcgaagaccatcaatttcggtgttctctacggtatgagtgcccatcgtttgtcgcaggaattaggcattccctatgaagaagctgcggcgttcattcagcgctactttcaaagctatcccaaagttaaagcatggatcgagaagactctcgaagaaggccgcacacgtggttacgtagagaccttatttggacgtcgccgctatgttcccgatttaaacgctcgcgtgaaatctgtccgtgaagccgccgaacgcatggcgttcaacatgcctgtacagggcacggcagctgacctcatgaaacttgcaatggtgcgcctttttccacaattgcgtgaagttggtgcccgcatgctcttgcaggtccacgatgaactcttgttagaagcgccaaaagagcgtgcggaagaggtggcagccctcgcgaaagaggttatggaaggcgtgtggcccttagcggtgcctcttgaagtcgaagttggtattggcgaggattggttggctgccaaaggataatga

SEQ ID NO: 956 - protein, 841 aa, synthetic construct
  REGION 1..841: note = Variant of DNA polymerase I from Thermus sp. strain 2.9
MHHHHHHGGSGMLPLFEPKGRVLLVDGHHLAYRNFFALKGLTTSRGEPVQGVYGFAKSLLKALKEDGDVVIVVFDAKAPSFRHEAYEAYKAGRAPTPEDFPRQLALMKELVDLLGLERLEVPGFEADDVLATLAKKAEREGYEVQILTADRDLFQLLSPRISVLHPEGHRITPEWLWEKYGLRPEQWVDFRALAGDPSDNIPGVKGIGEKTALKLLKEWGSLENLLKNLDQVKPESVREKILAHLEDLKLSRELSRVRTDLPLEVDFRGRREPDWEGLKAFLERLEFGSLLHEFGLLESPLPAEEAPWPPPEGAFLGYRLSRPEPMWAELLALAASAQGRVYRAEDPHGALRGLKEVRGLLAKDLAVVALREGLDLPPTDDPMLLAYLLDPSNTTPEGVARRYGGEWTEDAGERALLAERLHANLLGRLQGEERLLWLYEEVEKPLSRVLAHMEATGVKLDVAYLEALSLEVAAEMRRLEEEVFRLAGHSFNLNSRDQLERVLFDELGLPPIGKTEATGKRSTSAAVLEALREVHPIVDKILQYRELAKLKGTYIDPLPALVHPKTGRLHTRFNQTATATGRLSSSDPNLQNIPVRTPLGQKIRRAFVAEEGWRLVALDYSQIELRVLAHLSGDENLIRVFQEGKDIHTQTASWMFGLSAEAIDPLMRRAAKTINFGVLYGMSAHRLSQELGIPYEEAAAFIQRYFQSYPKVKAWIEKTLEEGRTRGYVETLFGRRRYVPDLNARVKSVREAAERMAFNMPVQGTAADLMKLAMVRLFPQLREVGARMLLQVHDELLLEAPKERAEEVAALAKEVMEGVWPLAVPLEVEVGIGEDWLAAKG

SEQ ID NO: 957 - DNA, 2529 bp, synthetic construct
  misc_feature 1..2529: note = Variant of DNA polymerase I from Thermus sp. strain 2.9
  source 1..2529: mol_type = other DNA
atgcaccatcatcatcatcatggcggtagcggcatgttaccgttgttcgaacctaaaggtcgcgtgcttctggttgatggccatcatctcgcgtatcgtaacttctttgccctgaaaggattaaccaccagccgtggcgagccggtacagggtgtctacggctttgcaaagtcgctcctgaaagctctgaaagaagacggtgatgtggtgattgttgtctttgatgcgaaagcgccaagttttcgccacgaagcgtacgaagcttacaaagccgggcgtgctccaacgccggaagactttcctcgccaattggcgcttatgaaggaattagtggatttgcttggcctcgaacgcttggaagttcccggtttcgaggcagacgacgtattagcgactctcgcaaagaaagccgaacgtgagggctatgaagtccagatcttgacagcagatcgcgatcttttccagcttttatctccgcgcatctcggtgttacacccggaagggcatcgtatcaccccggaatggctctgggagaaatatggtttgcgtcccgaacaatgggtggattttcgcgccttagcaggcgatccgagcgacaatattccgggagttaaaggtatcggcgagaagacggcgctcaagctccttaaagaatgggggtcgttggagaacttgcttaagaatttagatcaggtcaaaccagagtcagtgcgtgagaagattcttgcacacctcgaagacctcaaattaagccgcgaattgtcccgtgtacgcaccgatttgccgctcgaagttgatttccgtggccgccgcgaacctgactgggagggtcttaaagcgtttttagagcgtcttgaatttggttcgctcttgcatgaattcggccttttagaaagcccgttaccagccgaagaagcaccttggccaccgcccgaaggcgcgtttttaggttaccgtttgagtcgcccggaaccgatgtgggccgaattattggctcttgcagcgtctgcccagggacgtgtgtatcgcgcggaagaccctcatggtgcgctccgcggcctcaaagaagtccgtggactccttgccaaagacttagctgttgttgcattgcgcgaaggtcttgatttacctccgactgatgatccaatgcttcttgcgtacctcttggacccgtcaaacacgacgcccgaaggcgtagcccgtcgttacggcggcgagtggaccgaagatgcaggcgagcgcgcgttattggccgaacgtttgcaccagaatttattaggacgtttgcaaggcgaggaacgtctcctctggctttacgaagaagtggagaaaccattgagtcgcgtgctcgcgcatatggaagctaccggtgtcaaattagacgtggcgtatttggaggcactcagccttgaagttgctgccgaaatgcgccgcttggaggaagaagtattccgtttagcaggccactcctttaaccttaattctcgcgatcagttagaacgtgtgttgttcgatgaacttggtctccctcctatcggcaagacagagaagaccggtaaacgtagcacttcagcggcggttttagaagctcttcgcgaagtccatcccattgtggacaagatcttgcagtaccgcgaactcgcgaaattgaaaggcacctatattgaccgtcttccggcattagtccacccgaaaacgggacgcctccatacccgcttcaaccaaacagccacggcgaccggtcgtttgtcctcctctgatccaaaccttcagaatattccagtacgtaccccattgggccagaagatccgccgcgcgtttgtagctgaggagggttggcgtttagtggccctcgattatagccaaattgaattacgtgtccttgcccatctttctggcgatgagaacctcatccgcgtgtttcaggaaggcaaagacattcacactcaaacggcaagctggatgtttggattatcagctgaagcgatcgatcctttgatgcgtcgtgcagcgaagaccatcaatttcggtgttctctacggtatgagtgccgctcgtttgtcgcaggaattaggcattccctatgaagaagctgcggcgttcattcagcgctactttcaaagctatcccaaagttaaagcatggatcgagaagactctcgaagaaggccgcacacgtggttacgtagagaccttatttggacgtcgccgctatgttcccgatttaaccgctcgcgtgaaatctgtccgtgaagccgccgaacgcatggcgttcaacatgcctgtacagggcacggcagctgacctcatgaaacttgcaatggtgcgcctttttccacaattgcgtgaagttggtgcccgcatgctcttgcaggtccacgatgaactcttgttagaagcgccaaaagagcgtgcggaagaggtggcagccctcgcgaaagaggttatggaaggcgtgtggcccttagcggtgcctcttgaagtcgaagttggtattggcgaggattggttggctgccaaaggataatga

SEQ ID NO: 958 - protein, 841 aa, synthetic construct
  REGION 1..841: note = Variant of DNA polymerase I from Thermus sp. strain 2.9
MHHHHHHGGSGMLPLFEPKGRVLLVDGHHLAYRNFFALKGLTTSRGEPVQGVYGFAKSLLKALKEDGDVVIVVFDAKAPSFRHEAYEAYKAGRAPTPEDFPRQLALMKELVDLLGLERLEVPGFEADDVLATLAKKAEREGYEVQILTADRDLFQLLSPRISVLHPEGHRITPEWLWEKYGLRPEQWVDFRALAGDPSDNIPGVKGIGEKTALKLLKEWGSLENLLKNLDQVKPESVREKILAHLEDLKLSRELSRVRTDLPLEVDFRGRREPDWEGLKAFLERLEFGSLLHEFGLLESPLPAEEAPWPPPEGAFLGYRLSRPEPMWAELLALAASAQGRVYRAEDPHGALRGLKEVRGLLAKDLAVVALREGLDLPPTDDPMLLAYLLDPSNTTPEGVARRYGGEWTEDAGERALLAERLHQNLLGRLQGEERLLWLYEEVEKPLSRVLAHMEATGVKLDVAYLEALSLEVAAEMRRLEEEVFRLAGHSFNLNSRDQLERVLFDELGLPPIGKTEKTGKRSTSAAVLEALREVHPIVDKILQYRELAKLKGTYIDRLPALVHPKTGRLHTRFNQTATATGRLSSSDPNLQNIPVRTPLGQKIRRAFVAEEGWRLVALDYSQIELRVLAHLSGDENLIRVFQEGKDIHTQTASWMFGLSAEAIDPLMRRAAKTINFGVLYGMSAARLSQELGIPYEEAAAFIQRYFQSYPKVKAWIEKTLEEGRTRGYVETLFGRRRYVPDLTARVKSVREAAERMAFNMPVQGTAADLMKLAMVRLFPQLREVGARMLLQVHDELLLEAPKERAEEVAALAKEVMEGVWPLAVPLEVEVGIGEDWLAAKG

SEQ ID NO: 959 - DNA, 2529 bp, synthetic construct
  misc_feature 1..2529: note = Variant of DNA polymerase I from Thermus sp. strain 2.9
  source 1..2529: mol_type = other DNA
atgcaccatcatcatcatcatggcggtagcggcatgttaccgttgttcgaacctaaaggtcgcgtgcttctggttgatggccatcatctcgcgtatcgtaacttctttgccctgaaaggattaaccaccagccgtggcgagccggtacagggtgtctacggctttgcaaagtcgctcctgaaagctctgaaagaagacggtgatgtggtgattgttgtctttgatgcgaaagcgccaagttttcgccacgaagcgtacgaagcttacaaagccgggcgtgctccaacgccggaagactttcctcgccaattggcgcttatgaaggaattagtggatttgcttggcctcgaacgcttggaagttcccggtttcgaggcagacgacgtattagcgactctcgcaaagaaagccgaacgtgagggctatgaagtccagatcttgacagcagatcgcgatcttttccagcttttatctccgcgcatctcggtgttacacccggaagggcatcgtatcaccccggaatggctctgggagaaatatggtttgcgtcccgaacaatgggtggattttcgcgccttagcaggcgatccgagcgacaatattccgggagttaggggtatcggcgagaagacggcgctcaagctccttaaagaatgggggtcgttggagaacttgcttaagaatttagatcaggtcaaaccagagtcagtgcgtgagaagattcttgcacacctcgaagacctcaaattaagccgcgaattgtcccgtgtacgcaccgatttgccgctcgaagttgatttccgtggccgccgcgaacctgactgggagggtcttaaagcgtttttagagcgtcttgaatttggttcgctcttgcatgaattcggccttttagaaagcccgttaccagccgaagaagcaccttggccaccgcccgaaggcgcgtttttaggttaccgtttgagtcgcccggaaccgatgtgggccgaattattggctcttgcagcgtctgcccagggacgtgtgtatcgcgcggaagaccctcatggtgcgctccgcggcctcaaagaagtccgtggactccttgccaaagacttagctgttgttgcattgcgcgaaggtcttgatttacctccgactgatgatccaatgcttcttgcgtacctcttggacccgtcaaacacgacgcccgaaggcgtagcccgtcgttacggcggcgagtggaccgaagatgcaggcgagcgcgcgttattggccgaacgtttgcacgccaatttattaggacgtttgcaaggcgaggaacgtctcctctggctttacgaagaagtggagaaaccattgagtcgcgtgctcgcgcatatggaagctaccggtgtcaaattagacgtggcgtatttggaggcactcagccttgaagttgctgccgaaatgcgccgcttggaggaagaagtattccgtttagcaggccactcctttaaccttaattctcgcgatcagttagaacgtgtgttgttcgatgaacttggtctccctcctatcggcaagacagagaagaccggtaaacgtagcacttcagcggcggttttagaagctcttcgcgaagtccatcccattgtggacaagatcttgcagtaccgcgaactcgcgaaattgaaaggcacctatattgaccctcttccggcattagtccacccgaaaacgggacgcctccatacccgcttcaaccaaacagccacggcgaccggtcgtttgtcctcctctgatccaaaccttcagaatattccagtacgtaccccattgggccagaagatccgccgcgcgtttgtagctgaggagggttggcgtttagtggccctcgattatagccaaattgaattacgtgtccttgcccatctttctggcgatgagaacctcatccgcgtgtttcaggaaggcaaagacattcacactcaaacggcaagctggatgtttggattatcagctgaagcgatcgatcctttgatgcgtcgtgcagcgaagaccatcaatttcggtgttctctacggtatgagtgcccatcgtttgtcgcaggaattaggcattccctatgaagaagctgcggcgttcattcagcgctactttcaaagctatcccaaagttaaagcatggatcgagaagactctcgaagaaggccgcacacgtggttacgtagagaccttatttggacgtcgccgctatgttcccgatttaaacgctcgcgtgaaatctgtccgtgaagccgccgaacgcatggcgttcaacatgcctgtacagggcacggcagctgacctcatgaaacttgcaatggtgcgcctttttccacaattgcgtgaagttggtgcccgcatgctcttgcaggtccacgatgaactcttgttagaagcgccaaaagagcgtgcggaagaggtggcagccctcgcgaaagaggttatggaaggcgtgtggcccttagcggtgcctcttgaagtcgaagttggtattggcgaggattggttggctgccaaaggataatga

SEQ ID NO: 960 - protein, 841 aa, synthetic construct
  REGION 1..841: note = Variant of DNA polymerase I from Thermus sp. strain 2.9
MHHHHHHGGSGMLPLFEPKGRVLLVDGHHLAYRNFFALKGLTTSRGEPVQGVYGFAKSLLKALKEDGDVVIVVFDAKAPSFRHEAYEAYKAGRAPTPEDFPRQLALMKELVDLLGLERLEVPGFEADDVLATLAKKAEREGYEVQILTADRDLFQLLSPRISVLHPEGHRITPEWLWEKYGLRPEQWVDFRALAGDPSDNIPGVRGIGEKTALKLLKEWGSLENLLKNLDQVKPESVREKILAHLEDLKLSRELSRVRTDLPLEVDFRGRREPDWEGLKAFLERLEFGSLLHEFGLLESPLPAEEAPWPPPEGAFLGYRLSRPEPMWAELLALAASAQGRVYRAEDPHGALRGLKEVRGLLAKDLAVVALREGLDLPPTDDPMLLAYLLDPSNTTPEGVARRYGGEWTEDAGERALLAERLHANLLGRLQGEERLLWLYEEVEKPLSRVLAHMEATGVKLDVAYLEALSLEVAAEMRRLEEEVFRLAGHSFNLNSRDQLERVLFDELGLPPIGKTEKTGKRSTSAAVLEALREVHPIVDKILQYRELAKLKGTYIDPLPALVHPKTGRLHTRFNQTATATGRLSSSDPNLQNIPVRTPLGQKIRRAFVAEEGWRLVALDYSQIELRVLAHLSGDENLIRVFQEGKDIHTQTASWMFGLSAEAIDPLMRRAAKTINFGVLYGMSAHRLSQELGIPYEEAAAFIQRYFQSYPKVKAWIEKTLEEGRTRGYVETLFGRRRYVPDLNARVKSVREAAERMAFNMPVQGTAADLMKLAMVRLFPQLREVGARMLLQVHDELLLEAPKERAEEVAALAKEVMEGVWPLAVPLEVEVGIGEDWLAAKG

SEQ ID NO: 961 - DNA, 2529 bp, synthetic construct
  misc_feature 1..2529: note = Variant of DNA polymerase I from Thermus sp. strain 2.9
  source 1..2529: mol_type = other DNA
atgcaccatcatcatcatcatggcggtagcggcatgttaccgttgttcgaacctaaaggtcgcgtgcttctggttgatggccatcatctcgcgtatcgtaacttctttgccctgaaaggattaaccaccagccgtggcgagccggtacagggtgtctacggctttgcaaagtcgctcctgaaagctctgaaagaagacggtgatgtggtgattgttgtctttgatgcgaaagcgccaagttttcgccacgaagcgtacgaagcttacaaagccgggcgtgctccaacgccggaagactttcctcgccaattggcgcttatgaaggaattagtggatttgcttggcctcgaacgcttggaagttcccggtttcgaggcagacgacgtattagcgactctcgcaaagaaagccgaacgtgagggctatgaagtccagatcttgacagcagatcgcgatcttttccagcttttatctccgcgcatctcggtgttacacccggaagggcatcgtatcaccccggaatggctctgggagaaatatggtttgcgtcccgaacaatgggtggattttcgcgccttagcaggcgatccgagcgacaatattccgggagttaaaggtatcggcgagaagacggcgctcaagctccttaaagaatgggggtcgttggagaacttgcttaagaatttagatcaggtcaaaccagagtcagtgcgtgagaagattcttgcacacctcgaagacctcaaattaagccgcgaattgtcccgtgtacgcaccgatttgccgctcgaagttgatttccgtggccgccgcgaacctgactgggagggtcttaaagcgtttttagagcgtcttgaatttggttcgctcttgcatgaattcggccttttagaaagcccgttaccagccgaagaagcaccttggccaccgcccgaaggcgcgtttttaggttaccgtttgagtcgcccggaaccgatgtgggccgaattattggctcttgcagcgtctgcccagggacgtgtgtatcgcgcggaagaccctcatggtgcgctccgcggcctcaaagaagtccgtggactccttgccaaagacttagctgttgttgcattgcgcgaaggtcttgatttacctccgactgatgatccaatgcttcttgcgtacctcttggacccgtcaaacacgacgcccgaaggcgtagcccgtcgttacggcggcgagtggaccgaagatgcaggcgagcgcgcgttattggccgaacgtttgcacgccaatttattaggacgtttgcaaggcgaggaacgtctcctctggctttacgaagaagtggagaaaccattgagtcgcgtgctcgcgcatatggaagctaccggtgtcaaattagacgtggcgtatttggaggcactcagcgaggaagttgctgccgaaatgcgccgcttggaggaagaagtattccgtttagcaggccactcctttaaccttaattctcgcgatcagttagaacgtgtgttgttcgatgaacttggtctccctcctatcggcaagacagagaagaccggtaaacgtagcacttcagcggcggttttagaagctcttcgcgaagtccatcccattgtggacaagatcttgcagtaccgcgaactcgcgaaattgaaaggcacctatattgaccctcttccggcattagtccacccgaaaacgggacgcctccatacccgcttcaaccaaacagccacggcgaccggtcgtttgtcctcctctgatccaaaccttcagaatattccagtacgtaccccattgggccagaagatccgccgcgcgtttgtagctgaggagggttggcgtttagtggccctcgattatagccaaattgaattacgtgtccttgcccatctttctggcgatgagaacctcatccgcgtgtttcaggaaggcaaagacattcacactcaaacggcaagctggatgtttggattatcagctgaagcgatcgatcctttgatgcgtcgtgcagcgaagaccatcaatttcggtgttctctacggtatgagtgcccatcgtttgtcgcaggaattaggcattccctatgaagaagctgcggcgttcattcagcgctactttcaaagctatcccaaagttaaagcatggatcgagaagactctcgaagaaggccgcacacgtggttacgtagagaccttatttggacgtcgccgctatgttcccgatttaaacgctcgcgtgaaatctgtccgtgaagccgccgaacgcatggcgttcaacatgcctgtacagggcacggcagctgacctcatgaaacttgcaatggtgcgcctttttccacaattgcgtgaagttggtgcccgcatgctcttgcaggtccacgatgaactcttgttagaagcgccaaaagagcgtgcggaagaggtggcagccctcgcgaaagaggttatggaaggcgtgtggcccttagcggtgcctcttgaagtcgaagttggtattggcgaggattggttggctgccaaaggataatga

SEQ ID NO: 962 - protein, 841 aa, synthetic construct
  REGION 1..841: note = Variant of DNA polymerase I from Thermus sp. strain 2.9
MHHHHHHGGSGMLPLFEPKGRVLLVDGHHLAYRNFFALKGLTTSRGEPVQGVYGFAKSLLKALKEDGDVVIVVFDAKAPSFRHEAYEAYKAGRAPTPEDFPRQLALMKELVDLLGLERLEVPGFEADDVLATLAKKAEREGYEVQILTADRDLFQLLSPRISVLHPEGHRITPEWLWEKYGLRPEQWVDFRALAGDPSDNIPGVKGIGEKTALKLLKEWGSLENLLKNLDQVKPESVREKILAHLEDLKLSRELSRVRTDLPLEVDFRGRREPDWEGLKAFLERLEFGSLLHEFGLLESPLPAEEAPWPPPEGAFLGYRLSRPEPMWAELLALAASAQGRVYRAEDPHGALRGLKEVRGLLAKDLAVVALREGLDLPPTDDPMLLAYLLDPSNTTPEGVARRYGGEWTEDAGERALLAERLHANLLGRLQGEERLLWLYEEVEKPLSRVLAHMEATGVKLDVAYLEALSEEVAAEMRRLEEEVFRLAGHSFNLNSRDQLERVLFDELGLPPIGKTEKTGKRSTSAAVLEALREVHPIVDKILQYRELAKLKGTYIDPLPALVHPKTGRLHTRFNQTATATGRLSSSDPNLQNIPVRTPLGQKIRRAFVAEEGWRLVALDYSQIELRVLAHLSGDENLIRVFQEGKDIHTQTASWMFGLSAEAIDPLMRRAAKTINFGVLYGMSAHRLSQELGIPYEEAAAFIQRYFQSYPKVKAWIEKTLEEGRTRGYVETLFGRRRYVPDLNARVKSVREAAERMAFNMPVQGTAADLMKLAMVRLFPQLREVGARMLLQVHDELLLEAPKERAEEVAALAKEVMEGVWPLAVPLEVEVGIGEDWLAAKG

SEQ ID NO: 963 - DNA, 2529 bp, synthetic construct
  misc_feature 1..2529: note = Variant of DNA polymerase I from Thermus sp. strain 2.9
  source 1..2529: mol_type = other DNA
atgcaccatcatcatcatcatggcggtagcggcatgttaccgttgttcgaacctaaaggtcgcgtgcttctggttgatggccatcatctcgcgtatcgtaacttctttgccctgaaaggattaaccaccagccgtggcgagccggtacagggtgtctacggctttgcaaagtcgctcctgaaagctctgaaagaagacggtgatgtggtgattgttgtctttgatgcgaaagcgccaagttttcgccacgaagcgtacgaagcttacaaagccgggcgtgctccaacgccggaagactttcctcgccaattggcgcttatgaaggaattagtggatttgcttggcctcgaacgcttggaagttcccggtttcgaggcagacgacgtattagcgactctcgcaaagaaagccgaacgtgagggctatgaagtccagatcttgacagcagatcgcgatcttttccagcttttatctccgcgcatctcggtgttacacccggaagggcatctgatcaccccggaatggctctgggagaaatatggtttgcgtcccgaacaatgggtggattttcgcgccttagccggcgatccgagcgacaatattccgggagttaaaggtatcggcgagaagacggcgctcaagctccttaaagaatgggggtcgttggagaacttgcttaagaatttagatcaggtcaaaccagagtcagtgcgtgagaagattcttgcacacctcgaagacctcaaattaagccgcgaattgtcccgtgtacgcaccgatttgccgctcgaagttgatttccgtggccgccgcgaacctgactgggagggtcttaaagcgtttttagagcgtcttgaatttggttcgctcttgcatgaattcggccttttagaaagcccgttaccagccgaagaagcaccttggccaccgcccgaaggcgcgtttttaggttaccgtttgagtcgcccggaaccgatgtgggccgaattattggctcttgcagcgtctgcccagggacgtgtgtatcgcgcggaagaccctcatggtgcgctccgcggcctcaaagaagtccgtggactccttgccaaagacttagctgttgttgcattgcgcgaaggtcttgatttacctccgactgatgatccaatgcttcttgcgtacctcttggacccgtcaaacacgacgcccgaaggcgtagcccgtcgttacggcggcgagtggaccgaagatgcaggcgagcgcgcgttattggccgaacgtttgcacgcaaatttattaggacgtttgcaaggcgaggaacgtctcctctggctttacgaagaagtggagaaaccattgagtcgcgtgctccaccatatggaagctaccggtgtcaaattagacgtggcgtatttggaggcactcagccttgaagttgctgccgaaatgcgccgcttggaggaagaagtattccgtttagcaggccactcctttaaccttaattctcgcgatcagttagaacgtgtgttgttcgatgaacttggtctccctcctatcggcaagacagagaagaccggtaaacgtagcacttcagcggcggttttagaagctcttcgcgaagtccatcccattgtggacaagatcttgcagtaccgcgaactcgcgaaattgaaaggcacctatattgaccgtcttccggcattagtccacccgaaaacgggacgcctccatacccgcttcaaccaaacagccacggcgaccggtcgtttgtcctcctctgatccaaaccttcagaatattccagtacgtaccccattgggccagaagatccgccgcgcgtttgtagctgaggagggttggcgtttagtggccctcgattatagccaaattgaattacgtgtccttgcccatctttctggcgatgagaacctcatccgcgtgtttcaggaaggcaaagacattcacactcaaacggcaagctggatgtttggagtgtcgtcggaagcgatcgatcctttgatgcgtcgtgcagcgaagaccatcaatttcggtgttctctacggtatgagtgcccaccgtttgtcgcaggaattaggcattccctatgaagaagctgcggcgttcattcagcgctactttcaaagctatcccaaagttaaagcatggatcgagaagactctcgaagaaggccgcacacgtggttacgtagagaccttatttggacgtcgccgctatgttcccgatttaaacgctcgcgtgaaatctgtccgtgaagccgccgaacgcatggcgttcaacatgcctgtacagggcacggcagctgacctcatgaaacttgcaatggtgcgcctttttccacaattgcgtgaagttggtgcccgcatgctcttgcaggtccacgatgaactcttgttagaagcgccaaaagagcgtgcggaagaggtggcagccctcgcgaaagaggttatggaaggcgtgtggcccttagcggtgcctcttgaagtcgaagttggtattggcgaggattggttggctgccaaaggataatga

SEQ ID NO: 964 - protein, 841 aa, synthetic construct
  REGION 1..841: note = Variant of DNA polymerase I from Thermus sp. strain 2.9
MHHHHHHGGSGMLPLFEPKGRVLLVDGHHLAYRNFFALKGLTTSRGEPVQGVYGFAKSLLKALKEDGDVVIVVFDAKAPSFRHEAYEAYKAGRAPTPEDFPRQLALMKELVDLLGLERLEVPGFEADDVLATLAKKAEREGYEVQILTADRDLFQLLSPRISVLHPEGHLITPEWLWEKYGLRPEQWVDFRALAGDPSDNIPGVKGIGEKTALKLLKEWGSLENLLKNLDQVKPESVREKILAHLEDLKLSRELSRVRTDLPLEVDFRGRREPDWEGLKAFLERLEFGSLLHEFGLLESPLPAEEAPWPPPEGAFLGYRLSRPEPMWAELLALAASAQGRVYRAEDPHGALRGLKEVRGLLAKDLAVVALREGLDLPPTDDPMLLAYLLDPSNTTPEGVARRYGGEWTEDAGERALLAERLHANLLGRLQGEERLLWLYEEVEKPLSRVLHHMEATGVKLDVAYLEALSLEVAAEMRRLEEEVFRLAGHSFNLNSRDQLERVLFDELGLPPIGKTEKTGKRSTSAAVLEALREVHPIVDKILQYRELAKLKGTYIDRLPALVHPKTGRLHTRFNQTATATGRLSSSDPNLQNIPVRTPLGQKIRRAFVAEEGWRLVALDYSQIELRVLAHLSGDENLIRVFQEGKDIHTQTASWMFGVSSEAIDPLMRRAAKTINFGVLYGMSAHRLSQELGIPYEEAAAFIQRYFQSYPKVKAWIEKTLEEGRTRGYVETLFGRRRYVPDLNARVKSVREAAERMAFNMPVQGTAADLMKLAMVRLFPQLREVGARMLLQVHDELLLEAPKERAEEVAALAKEVMEGVWPLAVPLEVEVGIGEDWLAAKG

SEQ ID NO: 965 - DNA, 2529 bp, synthetic construct
  misc_feature 1..2529: note = Variant of DNA polymerase I from Thermus sp. strain 2.9
  source 1..2529: mol_type = other DNA
atgcaccatcatcatcatcatggcggtagcggcatgttaccgttgttcgaacctaaaggtcgcgtgcttctggttgatggccatcatctcgcgtatcgtaacttctttgccctgaaaggattaaccaccagccgtggcgagccggtacagggtgtctacggctttgcaaagtcgctcctgaaagctctgaaagaagacggtgatgtggtgattgttgtctttgatgcgaaagcgccaagttttcgccacgaagcgtacgaagcttacaaagccgggcgtgctccaacgccggaagactttcctcgccaattggcgcttatgaaggaattagtggatttgcttggcctcgaacgcttggaagttcccggtttcgaggcagacgacgtattagcgactctcgcaaagaaagccgaacgtgagggctatgaagtccagatcttgacagcagatcgcgatcttttccagcttttatctccgcgcatctcggtgttacacccggaagggcatctgatcaccccggaatggctctgggagaaatatggtttgcgtcccgaacaatgggtggattttcgcgccttagtcggcgatccgagcgacaatattccgggagttaaaggtatcggcgagaagacggcgctcaagctccttaaagaatgggggtcgttggagaacttgcttaagaatttagatcaggtcaaaccagagtcagtgcgtgagaagattcttgcacacctcgaagacctcaaattaagccgcgaattgtcccgtgtacgcaccgatttgccgctcgaagttgatttccgtggccgccgcgaacctgactgggagggtcttaaagcgtttttagagcgtcttgaatttggttcgctcttgcatgaattcggccttttagaaagcccgttaccagccgaagaagcaccttggccaccgcccgaaggcgcgtttttaggttaccgtttgagtcgcccggaaccgatgtgggccgaattattggctcttgcagcgtctgcccagggacgtgtgtatcgcgcggaagaccctcatggtgcgctccgcggcctcaaagaagtccgtggactccttgccaaagacttagctgttgttgcattgcgcgaaggtcttgatttacctccgactgatgatccaatgcttcttgcgtacctcttggacccgtcaaacacgacgcccgaaggcgtagcccgtcgttacggcggcgagtggaccgaagatgcaggcgagcgcgcgttattggccgaacgtttgcacgcaaatttattaggacgtttgcaaggcgaggaacgtctcctctggctttacgaagaagtggagaaaccattgagtcgcgtgctcgctcatatggaagctaccggtgtcaaattagacgtggcgtatttggaggcactcagccttgaagttgctgccgaaatgcgccgcttggaggaagaagtattccgtttagcaggccactcctttaaccttaattctcgcgatcagttagaacgtgtgttgttcgatgaacttggtctccctcctatcggcaagacagagaagaccggtaaacgtagcacttcagcggcggttttagaagctcttcgcgaagtccatcccattgtggacaagatcttgcagtaccgcgaactcgcgaaattgaaaggcacctatattgaccctcttccggcattagtccacccgaaaacgggacgcctccatacccgcttcaaccaaacagccacggcgaccggtcgtttgtcctcctctgatccaaaccttcagaatattccagtacgtaccccattgggccagaagatccgccgcgcgtttgtagctgaggagggttggcgtttagtggccctcgattatagccaaattgaattacgtgtccttgcccatctttctggcgatgagaacctcatccgcgtgtttcaggaaggcaaagacattcacactcaaacggcaagctggatgtttggagtgtcggcggaagcgatcgatcctttgatgcgtcgtgcagcgaagaccatcaatttcggtgttctctacggtatgagtgcccaccgtttgtcgcaggaattaggcattccctatgaagaagctgcggcgttcattcagcgctactttcaaagctatcccaaagttaaagcatggatcgagaagactctcgaagaaggccgcacacgtggttacgtagagaccttatttggacgtcgccgctatgttcccgatttaaacgctcgcgtgaaatctgtccgtgaagccgccgaacgcatggcgttcaacatgcctgtacagggcacggcagctgacctcatgaaacttgcaatggtgcgcctttttccacaattgcgtgaagttggtgcccgcatgctcttgcaggtccacgatgaactcttgttagaagcgccaaaagagcgtgcggaagaggtggcagccctcgcgaaagaggttatggaaggcgtgtggcccttagcggtgcctcttgaagtcgaagttggtattggcgaggattggttggctgccaaaggataatga

SEQ ID NO: 966 - protein, 841 aa, synthetic construct
  REGION 1..841: note = Variant of DNA polymerase I from Thermus sp. strain 2.9
MHHHHHHGGSGMLPLFEPKGRVLLVDGHHLAYRNFFALKGLTTSRGEPVQGVYGFAKSLLKALKEDGDVVIVVFDAKAPSFRHEAYEAYKAGRAPTPEDFPRQLALMKELVDLLGLERLEVPGFEADDVLATLAKKAEREGYEVQILTADRDLFQLLSPRISVLHPEGHLITPEWLWEKYGLRPEQWVDFRALVGDPSDNIPGVKGIGEKTALKLLKEWGSLENLLKNLDQVKPESVREKILAHLEDLKLSRELSRVRTDLPLEVDFRGRREPDWEGLKAFLERLEFGSLLHEFGLLESPLPAEEAPWPPPEGAFLGYRLSRPEPMWAELLALAASAQGRVYRAEDPHGALRGLKEVRGLLAKDLAVVALREGLDLPPTDDPMLLAYLLDPSNTTPEGVARRYGGEWTEDAGERALLAERLHANLLGRLQGEERLLWLYEEVEKPLSRVLAHMEATGVKLDVAYLEALSLEVAAEMRRLEEEVFRLAGHSFNLNSRDQLERVLFDELGLPPIGKTEKTGKRSTSAAVLEALREVHPIVDKILQYRELAKLKGTYIDPLPALVHPKTGRLHTRFNQTATATGRLSSSDPNLQNIPVRTPLGQKIRRAFVAEEGWRLVALDYSQIELRVLAHLSGDENLIRVFQEGKDIHTQTASWMFGVSAEAIDPLMRRAAKTINFGVLYGMSAHRLSQELGIPYEEAAAFIQRYFQSYPKVKAWIEKTLEEGRTRGYVETLFGRRRYVPDLNARVKSVREAAERMAFNMPVQGTAADLMKLAMVRLFPQLREVGARMLLQVHDELLLEAPKERAEEVAALAKEVMEGVWPLAVPLEVEVGIGEDWLAAKG

SEQ ID NO: 967 - DNA, 2529 bp, synthetic construct
  misc_feature 1..2529: note = Variant of DNA polymerase I from Thermus sp. strain 2.9
  source 1..2529: mol_type = other DNA
atgcaccatcatcatcatcatggcggtagcggcatgttaccgttgttcgaacctaaaggtcgcgtgcttctggttgatggccatcatctcgcgtatcgtaacttctttgccctgaaaggattaaccaccagccgtggcgagccggtacagggtgtctacggctttgcaaagtcgctcctgaaagctctgaaagaagacggtgatgtggtgattgttgtctttgatgcgaaagcgccaagttttcgccacgaagcgtacgaagcttacaaagccgggcgtgctccaacgccggaagactttcctcgccaattggcgcttatgaaggaattagtggatttgcttggcctcgaacgcttggaagttcccggtttcgaggcagacgacgtattagcgactctcgcaaagaaagccgaacgtgagggctatgaagtccagatcttgacagcagatcgcgatcttttccagcttttatctccgcgcatctcggtgttacacccggaagggcatcgtatcaccccggaatggctctgggagaaatatggtttgcgtcccgaacaatgggtggattttcgcgccttagcaggcgatccgagcgacaatattccgggagttaaaggtatcggcgagaagacggcgctcaagctccttaaagaatgggggtcgttggagaacttgcttaagaatttagatcaggtcaaaccagagtcagtgcgtgagaagattcttgcacacctcgaagacctcaaattaagccgcgaattgtcccgtgtacgcaccgatttgccgctcgaagttgatttccgtggccgccgcgaacctgactgggagggtcttaaagcgtttttagagcgtcttgaatttggttcgctcttgcatgaattcggccttttagaaagcccgttaccagccgaagaagcaccttggccaccgcccgaaggcgcgtttttaggttaccgtttgagtcgcccggaaccgatgtgggccgaattattggctcttgcagcgtctgcccagggacgtgtgtatcgcgcggaagaccctcatggtgcgctccgcggcctcaaagaagtccgtggactccttgccaaagacttagctgttgttgcattgcgcgaaggtcttgatttacctccgactgatgatccaatgcttcttgcgtacctcttggacccgtcaaacacgacgcccgaaggcgtagcccgtcgttacggcggcgagtggaccgaagatgcaggcgagcgcgcgttattggccgaacgtttgcacgccaatttattaggacgtttgcaaggcgaggaacgtctcctctggctttacgaagaagtggagaaaccattgagtcgcgtgctcgcgcatatggaagctaccggtgtcaaattagacgtggcgtatttggaggcactcagccttgaagttgctgccgaaatgcgccgcttggaggaagaagtattccgtttagcaggccactcctttaaccttaattctcgcgatcagttagaacgtgtgttgttcgatgaacttggtctccctcctatcggcaagacagagaagaccggtaaacgtagcacttcagcggcggttttagaagctcttcgcgaagtccatcccattgtggacaagatcttgcagtaccgcgaactcgcgaaattgaaaggcacctatattgaccctcttccggcattagtccacccgaaaacgggacgcctccatacccgcttcaaccaaacagccacggcgaccggtcgtttgtcctcctctgatccaaaccttcagaatattccagtacgtaccccattgggccagaagatccgccgcgcgtttgtagctgaggagggttggcgtttagtggccctcgattatagccaaattgaattacgtgtccttgcccatctttctggcgatgagaacctcatccgcgtgtttcaggaaggcaaagacattcacactcaaacggcaagctggatgtttggattatcagctgaagcgatcgatcctttgatgcgtcgtgcagcgaagaccatcaatttcggtgttctctacggtatgagtgcccatcgtttgtcgcaggaattaggcattccctatgaagaagctgcggcgttcattcagcgctactttcaaagctatcccaaagttaaagcatggatcgagaagactctcgaagaaggccgcacacgtggttacgtagagaccttatttggacgtcgccgctatgttcccgatttaaacgctcgcgtgaaatctgtccgtgaagccgccgaacgcatggcgttcaacatgcctgtacagggcacggcagctgacctcatgaaacttgcaatggtgcgcctttttccacaattgcgtcatgttggtgcccgcatgctcttgcaggtccacgatgaactcttgttagaagcgccaaaagagcgtgcggaagaggtggcagccctcgcgaaagaggttatggaaggcgtgtggcccttagcggtgcctcttgaagtcgaagttggtattggcgaggattggttggctgccaaaggataatga

SEQ ID NO: 968 - protein, 841 aa, synthetic construct
  REGION 1..841: note = Variant of DNA polymerase I from Thermus sp. strain 2.9
MHHHHHHGGSGMLPLFEPKGRVLLVDGHHLAYRNFFALKGLTTSRGEPVQGVYGFAKSLLKALKEDGDVVIVVFDAKAPSFRHEAYEAYKAGRAPTPEDFPRQLALMKELVDLLGLERLEVPGFEADDVLATLAKKAEREGYEVQILTADRDLFQLLSPRISVLHPEGHRITPEWLWEKYGLRPEQWVDFRALAGDPSDNIPGVKGIGEKTALKLLKEWGSLENLLKNLDQVKPESVREKILAHLEDLKLSRELSRVRTDLPLEVDFRGRREPDWEGLKAFLERLEFGSLLHEFGLLESPLPAEEAPWPPPEGAFLGYRLSRPEPMWAELLALAASAQGRVYRAEDPHGALRGLKEVRGLLAKDLAVVALREGLDLPPTDDPMLLAYLLDPSNTTPEGVARRYGGEWTEDAGERALLAERLHANLLGRLQGEERLLWLYEEVEKPLSRVLAHMEATGVKLDVAYLEALSLEVAAEMRRLEEEVFRLAGHSFNLNSRDQLERVLFDELGLPPIGKTEKTGKRSTSAAVLEALREVHPIVDKILQYRELAKLKGTYIDPLPALVHPKTGRLHTRFNQTATATGRLSSSDPNLQNIPVRTPLGQKIRRAFVAEEGWRLVALDYSQIELRVLAHLSGDENLIRVFQEGKDIHTQTASWMFGLSAEAIDPLMRRAAKTINFGVLYGMSAHRLSQELGIPYEEAAAFIQRYFQSYPKVKAWIEKTLEEGRTRGYVETLFGRRRYVPDLNARVKSVREAAERMAFNMPVQGTAADLMKLAMVRLFPQLRHVGARMLLQVHDELLLEAPKERAEEVAALAKEVMEGVWPLAVPLEVEVGIGEDWLAAKG

SEQ ID NO: 969 - DNA, 2529 bp, synthetic construct
  misc_feature 1..2529: note = Variant of DNA polymerase I from Thermus sp. strain 2.9
  source 1..2529: mol_type = other DNA
atgcaccatcatcatcatcatggcggtagcggcatgttaccgttgttcgaacctaaaggtcgcgtgcttctggttgatggccatcatctcgcgtatcgtaacttctttgccctgaaaggattaaccaccagccgtggcgagccggtacagggtgtctacggctttgcaaagtcgctcctgaaagctctgaaagaagacggtgatgtggtgattgttgtctttgatgcgaaagcgccaagttttcgccacgaagcgtacgaagcttacaaagccgggcgtgctccaacgccggaagactttcctcgccaattggcgcttatgaaggaattagtggatttgcttggcctcgaacgcttggaagttcccggtttcgaggcagacgacgtattagcgactctcgcaaagaaagccgaacgtgagggctatgaagtccagatcttgacagcagatcgcgatcttttccagcttttatctccgcgcatctcggtgttacacccggaagggcatcgtatcaccccggaatggctctgggagaaatatggtttgcgtcccgaacaatgggtggattttcgcgccttagccggcgatccgagcgacaatattccgggagttaaaggtatcggcgagaagacggcgctcaagctccttaaagaatgggggtcgttggagaacttgcttaagaatttagatcaggtcaaaccagagtcagtgcgtgagaagattcttgcacacctcgaagacctcaaattaagccgcgaattgtcccgtgtacgcaccgatttgccgctcgaagttgatttccgtggccgccgcgaacctgactgggagggtcttaaagcgtttttagagcgtcttgaatttggttcgctcttgcatgaattcggccttttagaaagcccgttaccagccgaagaagcaccttggccaccgcccgaaggcgcgtttttaggttaccgtttgagtcgcccggaaccgatgtgggccgaattattggctcttgcagcgtctgcccagggacgtgtgtatcgcgcggaagaccctcatggtgcgctccgcggcctcaaagaagtccgtggactccttgccaaagacttagctgttgttgcattgcgcgaaggtcttgatttacctccgactgatgatccaatgcttcttgcgtacctcttggacccgtcaaacacgacgcccgaaggcgtagcccgtcgttacggcggcgagtggaccgaagatgcaggcgagcgcgcgttattggccgaacgtttgcaccagaatttattaggacgtttgcaaggcgaggaacgtctcctctggctttacgaagaagtggagaaaccattgagtcgcgtgctcgctcatatggaagctaccggtgtcaaattagacgtggcgtatttggaggcactcagccttgaagttgctgccgaaatgcgccgcttggaggaagaagtattccgtttagcaggccactcctttaaccttaattctcgcgatcagttagaacgtgtgttgttcgatgaacttggtctccctcctatcggcaagacagagaagaccggtaaacgtagcacttcagcggcggttttagaagctcttcgcgaagtccatcccattgtggacaagatcttgcagtaccgcgaactcgcgaaattgaaaggcacctatattgaccgtcttccggcattagtccacccgaaaacgggacgcctccatacccgcttcaaccaaacagccacggcgaccggtcgtttgtcctcctctgatccaaaccttcagaatattccagtacgtaccccattgggccagaagatccgccgcgcgtttgtagctgaggagggttggcgtttagtggccctcgattatagccaaattgaattacgtgtccttgcccatctttctggcgatgagaacctcatccgcgtgtttcaggaaggcaaagacattcacactcaaacggcaagctggatgtttggagtgccgtcggaagcgatcgatcctttgatgcgtcgtgcagcgaagaccatcaatttcggtgttctctacggtatgagtgcccatcgtttgtcgcaggaattaggcattccctatgaagaagctgcggcgttcattcagcgctactttcaaagctatcccaaagttaaagcatggatcgagaagactctcgaagaaggccgcacacgtggttacgtagagaccttatttggacgtcgccgctatgttcccgatttaaacgctcgcgtgaaatctgtccgtgaagccgccgaacgcatggcgttcaacatgcctgtacagggcacggcagctgacctcatgaaacttgcaatggtgcgcctttttccacaattgcgtgaagttggtgcccgcatgctcttgcaggtccacgatgaactcttgttagaagcgccaaaagagcgtgcggaagaggtggcagccctcgcgaaagaggttatggaaggcgtgtggcccttagcggtgcctcttgaagtcgaagttggtattggcgaggattggttggctgccaaaggataatga

SEQ ID NO: 970 - protein, 841 aa, synthetic construct
  REGION 1..841: note = Variant of DNA polymerase I from Thermus sp. strain 2.9
MHHHHHHGGSGMLPLFEPKGRVLLVDGHHLAYRNFFALKGLTTSRGEPVQGVYGFAKSLLKALKEDGDVVIVVFDAKAPSFRHEAYEAYKAGRAPTPEDFPRQLALMKELVDLLGLERLEVPGFEADDVLATLAKKAEREGYEVQILTADRDLFQLLSPRISVLHPEGHRITPEWLWEKYGLRPEQWVDFRALAGDPSDNIPGVKGIGEKTALKLLKEWGSLENLLKNLDQVKPESVREKILAHLEDLKLSRELSRVRTDLPLEVDFRGRREPDWEGLKAFLERLEFGSLLHEFGLLESPLPAEEAPWPPPEGAFLGYRLSRPEPMWAELLALAASAQGRVYRAEDPHGALRGLKEVRGLLAKDLAVVALREGLDLPPTDDPMLLAYLLDPSNTTPEGVARRYGGEWTEDAGERALLAERLHQNLLGRLQGEERLLWLYEEVEKPLSRVLAHMEATGVKLDVAYLEALSLEVAAEMRRLEEEVFRLAGHSFNLNSRDQLERVLFDELGLPPIGKTEKTGKRSTSAAVLEALREVHPIVDKILQYRELAKLKGTYIDRLPALVHPKTGRLHTRFNQTATATGRLSSSDPNLQNIPVRTPLGQKIRRAFVAEEGWRLVALDYSQIELRVLAHLSGDENLIRVFQEGKDIHTQTASWMFGVPSEAIDPLMRRAAKTINFGVLYGMSAHRLSQELGIPYEEAAAFIQRYFQSYPKVKAWIEKTLEEGRTRGYVETLFGRRRYVPDLNARVKSVREAAERMAFNMPVQGTAADLMKLAMVRLFPQLREVGARMLLQVHDELLLEAPKERAEEVAALAKEVMEGVWPLAVPLEVEVGIGEDWLAAKG

SEQ ID NO: 971 - DNA, 2529 bp, synthetic construct
  misc_feature 1..2529: note = Variant of DNA polymerase I from Thermus sp. strain 2.9
  source 1..2529: mol_type = other DNA
atgcaccatcatcatcatcatggcggtagcggcatgttaccgttgttcgaacctaaaggtcgcgtgcttctggttgatggccatcatctcgcgtatcgtaacttctttgccctgaaaggattaaccaccagccgtggcgagccggtacagggtgtctacggctttgcaaagtcgctcctgaaagctctgaaagaagacggtgatgtggtgattgttgtctttgatgcgaaagcgccaagttttcgccacgaagcgtacgaagcttacaaagccgggcgtgctccaacgccggaagactttcctcgccaattggcgcttatgaaggaattagtggatttgcttggcctcgaacgcttggaagttcccggtttcgaggcagacgacgtattagcgactctcgcaaagaaagccgaacgtgagggctatgaagtccagatcttgacagcagatcgcgatcttttccagcttttatctccgcgcatctcggtgttacacccggaagggcatcgtatcaccccggaatggctctgggagaaatatggtttgcgtcccgaacaatgggtggattttcgcgccttagcaggcgatccgagcgacaatattccgggagttaaaggtatcggcgagaagacggcgctcaagctccttaaagaatgggggtcgttggagaacttgcttaagaatttagatcaggtcaaaccagagtcagtgcgtgagaagattcttgcacacctcgaagacctcaaattaagccgcgaattgtcccgtgtacgcaccgatttgccgctcgaagttgatttccgtggccgccgcgaacctgactgggagggtcttaaagcgtttttagagcgtcttgaatttggttcgctcttgcatgaattcggccttttagaaagcccgttaccagccgaagaagcaccttggccaccgcccgaaggcgcgtttttaggttaccgtttgagtcgcccggaaccgatgtgggccgaattattggctcttgcagcgtctgcccagggacgtgtgtatcgcgcggaagaccctcatggtgcgctccgcggcctcaaagaagtccgtggactccttgccaaagacttagctgttgttgcattgcgcgaaggtcttgatttacctccgactgatgatccaatgcttcttgcgtacctcttggacccgtcaaacacgacgcccgaaggcgtagcccgtcgttacggcggcgagtggaccgaagatgcaggcgagcgcgcgttattggccgaacgtttgcaccagaatttattaggacgtttgcaaggcgaggaacgtctcctctggctttacgaagaagtggagaaaccattgagtcgcgtgctcgcgcatatggaagctaccggtgtcaaattagacgtggcgtatttggaggcactcagccttgaagttgctgccgaaatgcgccgcttggaggaagaagtattccgtttagcaggccactcctttaaccttaattctcgcgatcagttagaacgtgtgttgttcgatgaacttggtctccctcctatcggcaagacagagaagaccggtaaacgtagcacttcagcggcggttttagaagctcttcgcgaagtccatcccattgtggacaagatcttgcagtaccgcgaactcgcgaaattgaaaggcacctatattgaccctcttccggcattagtccacccgaaaacgggacgcctccatacccgcttcaaccaaacagccacggcgaccggtcgtttgtcctcctctgatccaaaccttcagaatattccagtacgtaccccattgggccagaagatccgccgcgcgtttgtagctgaggagggttggcgtttagtggccctcgattatagccaaattgaattacgtgtccttgcccatctttctggcgatgagaacctcatccgcgtgtttcaggaaggcaaagacattcacactcaaacggcaagctggatgtttggactgtcgtcggaagcgatcgatcctttgatgcgtcgtgcagcgaagaccatcaatttcggtgttctctacggtatgagtgcccatcgtttgtcgcaggaattaggcattccctatgaagaagctgcggcgttcattcagcgctactttcaaagctatcccaaagttaaagcatggatcgagaagactctcgaagaaggccgcacacgtggttacgtagagaccttatttggacgtcgccgctatgttcccgatttaaacgctcgcgtgaaatctgtccgtgaagccgccgaacgcatggcgttcaacatgcctgtacagggcacggcagctgacctcatgaaacttgcaatggtgcgcctttttccacaattgcgtgaagttggtgcccgcatgctcttgcaggtccacgatgaactcttgttagaagcgccaaaagagcgtgcggaagaggtggcagccctcgcgaaagaggttatggaaggcgtgtggcccttagcggtgcctcttgaagtcgaagttggtattggcgaggattggttggctgccaaaggataatga

SEQ ID NO: 972 - protein, 841 aa, synthetic construct
  REGION 1..841: note = Variant of DNA polymerase I from Thermus sp. strain 2.9
MHHHHHHGGSGMLPLFEPKGRVLLVDGHHLAYRNFFALKGLTTSRGEPVQGVYGFAKSLLKALKEDGDVVIVVFDAKAPSFRHEAYEAYKAGRAPTPEDFPRQLALMKELVDLLGLERLEVPGFEADDVLATLAKKAEREGYEVQILTADRDLFQLLSPRISVLHPEGHRITPEWLWEKYGLRPEQWVDFRALAGDPSDNIPGVKGIGEKTALKLLKEWGSLENLLKNLDQVKPESVREKILAHLEDLKLSRELSRVRTDLPLEVDFRGRREPDWEGLKAFLERLEFGSLLHEFGLLESPLPAEEAPWPPPEGAFLGYRLSRPEPMWAELLALAASAQGRVYRAEDPHGALRGLKEVRGLLAKDLAVVALREGLDLPPTDDPMLLAYLLDPSNTTPEGVARRYGGEWTEDAGERALLAERLHQNLLGRLQGEERLLWLYEEVEKPLSRVLAHMEATGVKLDVAYLEALSLEVAAEMRRLEEEVFRLAGHSFNLNSRDQLERVLFDELGLPPIGKTEKTGKRSTSAAVLEALREVHPIVDKILQYRELAKLKGTYIDPLPALVHPKTGRLHTRFNQTATATGRLSSSDPNLQNIPVRTPLGQKIRRAFVAEEGWRLVALDYSQIELRVLAHLSGDENLIRVFQEGKDIHTQTASWMFGLSSEAIDPLMRRAAKTINFGVLYGMSAHRLSQELGIPYEEAAAFIQRYFQSYPKVKAWIEKTLEEGRTRGYVETLFGRRRYVPDLNARVKSVREAAERMAFNMPVQGTAADLMKLAMVRLFPQLREVGARMLLQVHDELLLEAPKERAEEVAALAKEVMEGVWPLAVPLEVEVGIGEDWLAAKG

SEQ ID NO: 973 - DNA, 2529 bp, synthetic construct
  misc_feature 1..2529: note = Variant of DNA polymerase I from Thermus sp. strain 2.9
  source 1..2529: mol_type = other DNA
atgcaccatcatcatcatcatggcggtagcggcatgttaccgttgttcgaacctaaaggtcgcgtgcttctggttgatggccatcatctcgcgtatcgtaacttctttgccctgaaaggattaaccaccagctctggcgagccggtacagggtgtctacggctttgcaaagtcgctcctgaaagctctgaaagaagacggtgatgtggtgattgttgtctttgatgcgaaagcgccaagttttcgccacgaagcgtacgaagcttacaaagccgggcgtgctccaacgccggaagactttcctcgccaattggcgcttatgaaggaattagtggatttgcttggcctcgaacgcttggaagttcccggtttcgaggcagacgacgtattagcgactctcgcaaagaaagccgaacgtgagggctatgaagtccagatcttgacagcagatcgcgatcttttccagcttttatctccgcgcatctcggtgttacacccggaagggcatcgtatcaccccggaatggctctgggagaaatatggtttgcgtcccgaacaatgggtggattttcgcgccttagcaggcgatccgagcgacaatattccgggagttaaaggtatcggcgagaagacggcgctcaagctccttaaagaatgggggtcgttggagaacttgcttaagaatttagatcaggtcaaaccagagtcagtgcgtgagaagattcttgcacacctcgaagacctcaaattaagccgcgaattgtcccgtgtacgcaccgatttgccgctcgaagttgatttccgtggccgccgcgaacctgactgggagggtcttaaagcgtttttagagcgtcttgaatttggttcgctcttgcatgaattcggccttttagaaagcccgttaccagccgaagaagcaccttggccaccgcccgaaggcgcgtttttaggttaccgtttgagtcgcccggaaccgatgtgggccgaattattggctcttgcagcgtctgcccagggacgtgtgtatcgcgcggaagaccctcatggtgcgctccgcggcctcaaagaagtccgtggactccttgccaaagacttagctgttgttgcattgcgcgaaggtcttgatttacctccgactgatgatccaatgcttcttgcgtacctcttggacccgtcaaacacgacgcccgaaggcgtagcccgtcgttacggcggcgagtggaccgaagatgcaggcgagcgcgcgttattggccgaacgtttgcacgccaatttattaggacgtttgcaaggcgaggaacgtctcctctggctttacgaagaagtggagaaaccattgagtcgcgtgctcgcgcatatggaagctaccggtgtcaaattagacgtggcgtatttggaggcactcagccttgaagttgctgccgaaatgcgccgcttggaggaagaagtattccgtttagcaggccactcctttaaccttaattctcgcgatcagttagaacgtgtgttgttcgatgaacttggtctccctcctatcggcaagacagagaagaccggtaaacgtagcacttcagcggcggttttagaagctcttcgcgaagtccatcccattgtggacaagatcttgcagtaccgcgaactcgcgaaattgaaaggcacctatattgaccctcttccggcattagtccacccgaaaacgggacgcctccatacccgcttcaaccaaacagccacggcgaccggtcgtttgtcctcctctgatccaaaccttcagaatattccagtacgtaccccattgggccagaagatccgccgcgcgtttgtagctgaggagggttggcgtttagtggccctcgattatagccaaattgaattacgtgtccttgcccatctttctggcgatgagaacctcatccgcgtgtttcaggaaggcaaagacattcacactcaaacggcaagctggatgtttggattatcagctgaagcgatcgatcctttgatgcgtcgtgcagcgaagaccatcaatttcggtgttctctacggtatgagtgcccatcgtttgtcgcaggaattaggcattccctatgaagaagctgcggcgttcattcagcgctactttcaaagctatcccaaagttaaagcatggatcgagaagactctcgaagaaggccgcacacgtggttacgtagagaccttatttggacgtcgccgctatgttcccgatttaaacgctcgcgtgaaatctgtccgtgaagccgccgaacgcatggcgttcaacatgcctgtacagggcacggcagctgacctcatgaaacttgcaatggtgcgcctttttccacaattgcgtgaagttggtgcccgcatgctcttgcaggtccacgatgaactcttgttagaagcgccaaaagagcgtgcggaagaggtggcagccctcgcgaaagaggttatggaaggcgtgtggcccttagcggtgcctcttgaagtcgaagttggtattggcgaggattggttggctgccaaaggataatga

SEQ ID NO: 974 - protein, 841 aa, synthetic construct
  REGION 1..841: note = Variant of DNA polymerase I from Thermus sp. strain 2.9
MHHHHHHGGSGMLPLFEPKGRVLLVDGHHLAYRNFFALKGLTTSSGEPVQGVYGFAKSLLKALKEDGDVVIVVFDAKAPSFRHEAYEAYKAGRAPTPEDFPRQLALMKELVDLLGLERLEVPGFEADDVLATLAKKAEREGYEVQILTADRDLFQLLSPRISVLHPEGHRITPEWLWEKYGLRPEQWVDFRALAGDPSDNIPGVKGIGEKTALKLLKEWGSLENLLKNLDQVKPESVREKILAHLEDLKLSRELSRVRTDLPLEVDFRGRREPDWEGLKAFLERLEFGSLLHEFGLLESPLPAEEAPWPPPEGAFLGYRLSRPEPMWAELLALAASAQGRVYRAEDPHGALRGLKEVRGLLAKDLAVVALREGLDLPPTDDPMLLAYLLDPSNTTPEGVARRYGGEWTEDAGERALLAERLHANLLGRLQGEERLLWLYEEVEKPLSRVLAHMEATGVKLDVAYLEALSLEVAAEMRRLEEEVFRLAGHSFNLNSRDQLERVLFDELGLPPIGKTEKTGKRSTSAAVLEALREVHPIVDKILQYRELAKLKGTYIDPLPALVHPKTGRLHTRFNQTATATGRLSSSDPNLQNIPVRTPLGQKIRRAFVAEEGWRLVALDYSQIELRVLAHLSGDENLIRVFQEGKDIHTQTASWMFGLSAEAIDPLMRRAAKTINFGVLYGMSAHRLSQELGIPYEEAAAFIQRYFQSYPKVKAWIEKTLEEGRTRGYVETLFGRRRYVPDLNARVKSVREAAERMAFNMPVQGTAADLMKLAMVRLFPQLREVGARMLLQVHDELLLEAPKERAEEVAALAKEVMEGVWPLAVPLEVEVGIGEDWLAAKG

SEQ ID NO: 975 - DNA, 2529 bp, synthetic construct
  misc_feature 1..2529: note = Variant of DNA polymerase I from Thermus sp. strain 2.9
  source 1..2529: mol_type = other DNA
atgcaccatcatcatcatcatggcggtagcggcatgttaccgttgttcgaacctaaaggtcgcgtgcttctggttgatggccatcatctcgcgtatcgtaacttctttgccctgaaaggattaaccaccagccgtggcgagccggtacagggtgtctacggctttgcaaagtcgctcctgaaagctctgaaagaagacggtgatgtggtgattgttgtctttgatgcgaaagcgccaagttttcgccacgaagcgtacgaagcttacaaagccgggcgtgctccaacgccggaagactttcctcgccaattggcgcttatgaaggaattagtggatttgcttggcctcgaacgcttggaagttcccggtttcgaggcagacgacgtattagcgactctcgcaaagaaagccgaacgtgagggctatgaagtccagatcttgacagcagatcgcgatcttttccagcttttatctccgcgcatctcggtgttacacccggaagggcatcgtatcaccccggaatggctctgggagaaatatggtttgcgtcccgaacaatgggtggattttcgcgccttagcaggcgatccgagcgacaatattccgggagttaaaggtatcggcgagaagacggcgctcaagctccttaaagaatgggggtcgttggagaacttgcttaagaatttagatcaggtcaaaccagagtcagtgcgtgagaagattcttgcacacctcgaagacctcaaattaagccgcgaattgtcccgtgtacgcaccgatttgccgctcgaagttgatttccgtggccgccgcgaacctgactgggagggtcttaaagcgtttttagagcgtcttgaatttggttcgctcttgcatgaattcggccttttagaaagcccgttaccagccgaagaagcaccttggccaccgcccgaaggcgcgtttttaggttaccgtttgagtcgcccggaaccgatgtgggccgaattattggctcttgcagcgtctgcccagggacgtgtgtatcgcgcggaagaccctcatggtgcgctccgcggcctcaaagaagtccgtggactccttgccaaagacttagctgttgttgcattgcgcgaaggtcttgatttacctccgactgatgatccaatgcttcttgcgtacctcttggacccgtcaaacacgacgcccgaaggcgtagcccgtcgttacggcggcgagtggaccgaagatgcaggcgagcgcgcgttattggccgaacgtttgcacgcaaatttattaggacgtttgcaaggcgaggaacgtctcctctggctttacgaagaagtggagaaaccattgagtcgcgtgctcgcgcatatggaagctaccggtgtcaaattagacgtggcgtatttggaggcactcagccttgaagttgctgccgaaatgcgccgcttggaggaagaagtattccgtttagcaggccactcctttaaccttaattctcgcgatcagttagaacgtgtgttgttcgatgaacttggtctccctcctatcggcaagacagagaagaccggtaaacgtagcacttcagcggcggttttagaagctcttcgcgaagtccatcccattgtggacaagatcttgcagtaccgcgaactcgcgaaattgaaaggcacctatattgaccgtcttccggcattagtccacccgaaaacgggacgcctccatacccgcttcaaccaaacagccacggcgaccggtcgtttgtcctcctctgatccaaaccttcagaatattccagtacgtaccccattgggccagaagatccgccgcgcgtttgtagctgaggagggttggcgtttagtggccctcgattatagccaaattgaattacgtgtccttgcccatctttctggcgatgagaacctcatccgcgtgtttcaggaaggcaaagacattcacactcaaacggcaagctggatgtttggactgccgtcggaagcgatcgatcctttgatgcgtcgtgcagcgaagaccatcaatttcggtgttctctacggtatgagtgcccaccgtttgtcgcaggaattaggcattccctatgaagaagctgcggcgttcattcagcgctactttcaaagctatcccaaagttaaagcatggatcgagaagactctcgaagaaggccgcacacgtggttacgtagagaccttatttggacgtcgccgctatgttcccgatttaaacgctcgcgtgaaatctgtccgtgaagccgccgaacgcatggcgttcaacatgcctgtacagggcacggcagctgacctcatgaaacttgcaatggtgcgcctttttccacaattgcgtgaagttggtgcccgcatgctcttgcaggtccacgatgaactcttgttagaagcgccaaaagagcgtgcggaagaggtggcagccctcgcgaaagaggttatggaaggcgtgtggcccttagcggtgcctcttgaagtcgaagttggtattggcgaggattggttggctgccaaaggataatga

SEQ ID NO: 976 - protein, 841 aa, synthetic construct
  REGION 1..841: note = Variant of DNA polymerase I from Thermus sp. strain 2.9
MHHHHHHGGSGMLPLFEPKGRVLLVDGHHLAYRNFFALKGLTTSRGEPVQGVYGFAKSLLKALKEDGDVVIVVFDAKAPSFRHEAYEAYKAGRAPTPEDFPRQLALMKELVDLLGLERLEVPGFEADDVLATLAKKAEREGYEVQILTADRDLFQLLSPRISVLHPEGHRITPEWLWEKYGLRPEQWVDFRALAGDPSDNIPGVKGIGEKTALKLLKEWGSLENLLKNLDQVKPESVREKILAHLEDLKLSRELSRVRTDLPLEVDFRGRREPDWEGLKAFLERLEFGSLLHEFGLLESPLPAEEAPWPPPEGAFLGYRLSRPEPMWAELLALAASAQGRVYRAEDPHGALRGLKEVRGLLAKDLAVVALREGLDLPPTDDPMLLAYLLDPSNTTPEGVARRYGGEWTEDAGERALLAERLHANLLGRLQGEERLLWLYEEVEKPLSRVLAHMEATGVKLDVAYLEALSLEVAAEMRRLEEEVFRLAGHSFNLNSRDQLERVLFDELGLPPIGKTEKTGKRSTSAAVLEALREVHPIVDKILQYRELAKLKGTYIDRLPALVHPKTGRLHTRFNQTATATGRLSSSDPNLQNIPVRTPLGQKIRRAFVAEEGWRLVALDYSQIELRVLAHLSGDENLIRVFQEGKDIHTQTASWMFGLPSEAIDPLMRRAAKTINFGVLYGMSAHRLSQELGIPYEEAAAFIQRYFQSYPKVKAWIEKTLEEGRTRGYVETLFGRRRYVPDLNARVKSVREAAERMAFNMPVQGTAADLMKLAMVRLFPQLREVGARMLLQVHDELLLEAPKERAEEVAALAKEVMEGVWPLAVPLEVEVGIGEDWLAAKG

SEQ ID NO: 977 - DNA, 2529 bp, synthetic construct
  misc_feature 1..2529: note = Variant of DNA polymerase I from Thermus sp. strain 2.9
  source 1..2529: mol_type = other DNA
atgcaccatcatcatcatcatggcggtagcggcatgttaccgttgttcgaacctaaaggtcgcgtgcttctggttgatggccatcatctcgcgtatcgtaacttctttgccctgaaaggattaaccaccagccgtggcgagccggtacagggtgtctacggctttgcaaagtcgctcctgaaagctctgaaagaagacggtgatgtggtgattgttgtctttgatgcgaaagcgccaagttttcgccacgaagcgtacgaagcttacaaagccgggcgtgctccaacgccggaagactttcctcgccaattggcgcttatgaaggaattagtggatttgcttggcctcgaacgcttggaagttcccggtttcgaggcagacgacgtattagcgactctcgcaaagaaagccgaacgtgagggctatgaagtccagatcttgacagcagatcgcgatcttttccagcttttatctccgcgcatctcggtgttacacccggaagggcatcgtatcaccccggaatggctctgggagaaatatggtttgcgtcccgaacaatgggtggattttcgcgccttagcaggcgatccgagcgacaatattccgggagttaaaggtatcggcgagaagacggcgctcaagctccttaaagaatgggggtcgttggagaacttgcttaagaatttagatcaggtcaaaccagagtcagtgcgtgagaagattcttgcacacctcgaagacctcaaattaagccgcgaattgtcccgtgtacgcaccgatttgccgctcgaagttgatttccgtggccgccgcgaacctgactgggagggtcttaaagcgtttttagagcgtcttgaatttggttcgctcttgcatgaattcggccttttagaaagcccgttaccagccgaagaagcaccttggccaccgcccgaaggcgcgtttttaggttaccgtttgagtcgcccggaaccgatgtgggccgaattattggctcttgcagcgtctgcccagggacgtgtgtatcgcgcggaagaccctcatggtgcgctccgcggcctcaaagaagtccgtggactccttgccaaagacttagctgttgttgcattgcgcgaaggtcttgatttacctccgactgatgatccaatgcttcttgcgtacctcttggacccgtcaaacacgacgcccgaaggcgtagcccgtcgttacggcggcgagtggaccgaagatgcaggcgagcgcgcgttattggccgaacgtttgcaccagaatttattaggacgtttgcaaggcgaggaacgtctcctctggctttacgaagaagtggagaaaccattgagtcgcgtgctcgcgcatatggaagctaccggtgtcaaattagacgtggcgtatttggaggcactcagccttgaagttgctgccgaaatgcgccgcttggaggaagaagtattccgtttagcaggccactcctttaaccttaattctcgcgatcagttagaacgtgtgttgttcgatgaacttggtctccctcctatcggcaagacagagaagaccggtaaacgtagcacttcagcggcggttttagaagctcttcgcgaagtccatcccattgtggacaagatcttgcagtaccgcgaactcgcgaaattgaaaggcacctatattgaccctcttccggcattagtccacccgaaaacgggacgcctccatacccgcttcaaccaaacagccacggcgaccggtcgtttgtcctcctctgatccaaaccttcagaatattccagtacgtaccccattgggccagaagatccgccgcgcgtttgtagctgaggagggttggcgtttagtggccctcgattatagccaaattgaattacgtgtccttgcccatctttctggcgatgagaacctcatccgcgtgtttcaggaaggcaaagacattcacactcaaacggcaagctggatgtttggagtgtcgtcggaagcgatcgatcctttgatgcgtcgtgcagcgaagaccatcaatttcggtgttctctacggtatgagtgcccaccgtttgtcgcaggaattaggcattccctatgaagaagctgcggcgttcattcagcgctactttcaaagctatcccaaagttaaagcatggatcgagaagactctcgaagaaggccgcacacgtggttacgtagagaccttatttggacgtcgccgctatgttcccgatttaaacgctcgcgtgaaatctgtccgtgaagccgccgaacgcatggcgttcaacatgcctgtacagggcacggcagctgacctcatgaaacttgcaatggtgcgcctttttccacaattgcgtgaagttggtgcccgcatgctcttgcaggtccacgatgaactcttgttagaagcgccaaaagagcgtgcggaagaggtggcagccctcgcgaaagaggttatggaaggcgtgtggcccttagcggtgcctcttgaagtcgaagttggtattggcgaggattggttggctgccaaaggataatga

SEQ ID NO: 978 - protein, 841 aa, synthetic construct
  REGION 1..841: note = Variant of DNA polymerase I from Thermus sp. strain 2.9
MHHHHHHGGSGMLPLFEPKGRVLLVDGHHLAYRNFFALKGLTTSRGEPVQGVYGFAKSLLKALKEDGDVVIVVFDAKAPSFRHEAYEAYKAGRAPTPEDFPRQLALMKELVDLLGLERLEVPGFEADDVLATLAKKAEREGYEVQILTADRDLFQLLSPRISVLHPEGHRITPEWLWEKYGLRPEQWVDFRALAGDPSDNIPGVKGIGEKTALKLLKEWGSLENLLKNLDQVKPESVREKILAHLEDLKLSRELSRVRTDLPLEVDFRGRREPDWEGLKAFLERLEFGSLLHEFGLLESPLPAEEAPWPPPEGAFLGYRLSRPEPMWAELLALAASAQGRVYRAEDPHGALRGLKEVRGLLAKDLAVVALREGLDLPPTDDPMLLAYLLDPSNTTPEGVARRYGGEWTEDAGERALLAERLHQNLLGRLQGEERLLWLYEEVEKPLSRVLAHMEATGVKLDVAYLEALSLEVAAEMRRLEEEVFRLAGHSFNLNSRDQLERVLFDELGLPPIGKTEKTGKRSTSAAVLEALREVHPIVDKILQYRELAKLKGTYIDPLPALVHPKTGRLHTRFNQTATATGRLSSSDPNLQNIPVRTPLGQKIRRAFVAEEGWRLVALDYSQIELRVLAHLSGDENLIRVFQEGKDIHTQTASWMFGVSSEAIDPLMRRAAKTINFGVLYGMSAHRLSQELGIPYEEAAAFIQRYFQSYPKVKAWIEKTLEEGRTRGYVETLFGRRRYVPDLNARVKSVREAAERMAFNMPVQGTAADLMKLAMVRLFPQLREVGARMLLQVHDELLLEAPKERAEEVAALAKEVMEGVWPLAVPLEVEVGIGEDWLAAKG

SEQ ID NO: 979 - DNA, 2529 bp, synthetic construct
  misc_feature 1..2529: note = Variant of DNA polymerase I from Thermus sp. strain 2.9
  source 1..2529: mol_type = other DNA
atgcaccatcatcatcatcatggcggtagcggcatgttaccgttgttcgaacctaaaggtcgcgtgcttctggttgatggccatcatctcgcgtatcgtaacttctttgccctgaaaggattaaccaccagccttggcgagccggtacagggtgtctacggctttgcaaagtcgctcctgaaagctctgaaagaagacggtgatgtggtgattgttgtctttgatgcgaaagcgccaagttttcgccacgaagcgtacgaagcttacaaagccgggcgtgctccaacgccggaagactttcctcgccaattggcgcttatgaaggaattagtggatttgcttggcctcgaacgcttggaagttcccggtttcgaggcagacgacgtattagcgactctcgcaaagaaagccgaacgtgagggctatgaagtccagatcttgacagcagatcgcgatcttttccagcttttatctccgcgcatctcggtgttacacccggaagggcatcgtatcaccccggaatggctctgggagaaatatggtttgcgtcccgaacaatgggtggattttcgcgccttagcaggcgatccgagcgacaatattccgggagttaaaggtatcggcgagaagacggcgctcaagctccttaaagaatgggggtcgttggagaacttgcttaagaatttagatcaggtcaaaccagagtcagtgcgtgagaagattcttgcacacctcgaagacctcaaattaagccgcgaattgtcccgtgtacgcaccgatttgccgctcgaagttgatttccgtggccgccgcgaacctgactgggagggtcttaaagcgtttttagagcgtcttgaatttggttcgctcttgcatgaattcggccttttagaaagcccgttaccagccgaagaagcaccttggccaccgcccgaaggcgcgtttttaggttaccgtttgagtcgcccggaaccgatgtgggccgaattattggctcttgcagcgtctgcccagggacgtgtgtatcgcgcggaagaccctcatggtgcgctccgcggcctcaaagaagtccgtggactccttgccaaagacttagctgttgttgcattgcgcgaaggtcttgatttacctccgactgatgatccaatgcttcttgcgtacctcttggacccgtcaaacacgacgcccgaaggcgtagcccgtcgttacggcggcgagtggaccgaagatgcaggcgagcgcgcgttattggccgaacgtttgcacgccaatttattaggacgtttgcaaggcgaggaacgtctcctctggctttacgaagaagtggagaaaccattgagtcgcgtgctcgcgcatatggaagctaccggtgtcaaattagacgtggcgtatttggaggcactcagccttgaagttgctgccgaaatgcgccgcttggaggaagaagtattccgtttagcaggccactcctttaaccttaattctcgcgatcagttagaacgtgtgttgttcgatgaacttggtctccctcctatcggcaagacagagaagaccggtaaacgtagcacttcagcggcggttttagaagctcttcgcgaagtccatcccattgtggacaagatcttgcagtaccgcgaactcgcgaaattgaaaggcacctatattgaccctcttccggcattagtccacccgaaaacgggacgcctccatacccgcttcaaccaaacagccacggcgaccggtcgtttgtcctcctctgatccaaaccttcagaatattccagtacgtaccccattgggccagaagatccgccgcgcgtttgtagctgaggagggttggcgtttagtggccctcgattatagccaaattgaattacgtgtccttgcccatctttctggcgatgagaacctcatccgcgtgtttcaggaaggcaaagacattcacactcaaacggcaagctggatgtttggattatcagctgaagcgatcgatcctttgatgcgtcgtgcagcgaagaccatcaatttcggtgttctctacggtatgagtgcccatcgtttgtcgcaggaattaggcattccctatgaagaagctgcggcgttcattcagcgctactttcaaagctatcccaaagttaaagcatggatcgagaagactctcgaagaaggccgcacacgtggttacgtagagaccttatttggacgtcgccgctatgttcccgatttaaacgctcgcgtgaaatctgtccgtgaagccgccgaacgcatggcgttcaacatgcctgtacagggcacggcagctgacctcatgaaacttgcaatggtgcgcctttttccacaattgcgtgaagttggtgcccgcatgctcttgcaggtccacgatgaactcttgttagaagcgccaaaagagcgtgcggaagaggtggcagccctcgcgaaagaggttatggaaggcgtgtggcccttagcggtgcctcttgaagtcgaagttggtattggcgaggattggttggctgccaaaggataatga

SEQ ID NO: 980 - protein, 841 aa, synthetic construct
  REGION 1..841: note = Variant of DNA polymerase I from Thermus sp. strain 2.9
MHHHHHHGGSGMLPLFEPKGRVLLVDGHHLAYRNFFALKGLTTSLGEPVQGVYGFAKSLLKALKEDGDVVIVVFDAKAPSFRHEAYEAYKAGRAPTPEDFPRQLALMKELVDLLGLERLEVPGFEADDVLATLAKKAEREGYEVQILTADRDLFQLLSPRISVLHPEGHRITPEWLWEKYGLRPEQWVDFRALAGDPSDNIPGVKGIGEKTALKLLKEWGSLENLLKNLDQVKPESVREKILAHLEDLKLSRELSRVRTDLPLEVDFRGRREPDWEGLKAFLERLEFGSLLHEFGLLESPLPAEEAPWPPPEGAFLGYRLSRPEPMWAELLALAASAQGRVYRAEDPHGALRGLKEVRGLLAKDLAVVALREGLDLPPTDDPMLLAYLLDPSNTTPEGVARRYGGEWTEDAGERALLAERLHANLLGRLQGEERLLWLYEEVEKPLSRVLAHMEATGVKLDVAYLEALSLEVAAEMRRLEEEVFRLAGHSFNLNSRDQLERVLFDELGLPPIGKTEKTGKRSTSAAVLEALREVHPIVDKILQYRELAKLKGTYIDPLPALVHPKTGRLHTRFNQTATATGRLSSSDPNLQNIPVRTPLGQKIRRAFVAEEGWRLVALDYSQIELRVLAHLSGDENLIRVFQEGKDIHTQTASWMFGLSAEAIDPLMRRAAKTINFGVLYGMSAHRLSQELGIPYEEAAAFIQRYFQSYPKVKAWIEKTLEEGRTRGYVETLFGRRRYVPDLNARVKSVREAAERMAFNMPVQGTAADLMKLAMVRLFPQLREVGARMLLQVHDELLLEAPKERAEEVAALAKEVMEGVWPLAVPLEVEVGIGEDWLAAKG

SEQ ID NO: 981 - DNA, 2529 bp, synthetic construct
  misc_feature 1..2529: note = Variant of DNA polymerase I from Thermus sp. strain 2.9
  source 1..2529: mol_type = other DNA
atgcaccatcatcatcatcatggcggtagcggcatgttaccgttgttcgaacctaaaggtcgcgtgcttctggttgatggccatcatctcgcgtatcgtaacttctttgccctgaaaggattaaccaccagccgtggcgagccggtacagggtgtctacggctttgcaaagtcgctcctgaaagctctgaaagaagacggtgatgtggtgattgttgtctttgatgcgaaagcgccaagttttcgccacgaagcgtacgaagcttacaaagccgggcgtgctccaacgccggaagactttcctcgccaattggcgcttatgaaggaattagtggatttgcttggcctcgaacgcttggaagttcccggtttcgaggcagacgacgtattagcgactctcgcaaagaaagccgaacgtgagggctatgaagtccagatcttgacagcagatcgcgatcttttccagcttttatctccgcgcatctcggtgttacacccggaagggcatctgatcaccccggaatggctctgggagaaatatggtttgcgtcccgaacaatgggtggattttcgcgccttagtcggcgatccgagcgacaatattccgggagttaaaggtatcggcgagaagacggcgctcaagctccttaaagaatgggggtcgttggagaacttgcttaagaatttagatcaggtcaaaccagagtcagtgcgtgagaagattcttgcacacctcgaagacctcaaattaagccgcgaattgtcccgtgtacgcaccgatttgccgctcgaagttgatttccgtggccgccgcgaacctgactgggagggtcttaaagcgtttttagagcgtcttgaatttggttcgctcttgcatgaattcggccttttagaaagcccgttaccagccgaagaagcaccttggccaccgcccgaaggcgcgtttttaggttaccgtttgagtcgcccggaaccgatgtgggccgaattattggctcttgcagcgtctgcccagggacgtgtgtatcgcgcggaagaccctcatggtgcgctccgcggcctcaaagaagtccgtggactccttgccaaagacttagctgttgttgcattgcgcgaaggtcttgatttacctccgactgatgatccaatgcttcttgcgtacctcttggacccgtcaaacacgacgcccgaaggcgtagcccgtcgttacggcggcgagtggaccgaagatgcaggcgagcgcgcgttattggccgaacgtttgcacgcaaatttattaggacgtttgcaaggcgaggaacgtctcctctggctttacgaagaagtggagaaaccattgagtcgcgtgctccaccatatggaagctaccggtgtcaaattagacgtggcgtatttggaggcactcagccttgaagttgctgccgaactgcgccgcttggaggaagaagtattccgtttagcaggccactcctttaaccttaattctcgcgatcagttagaacgtgtgttgttcgatgaacttggtctccctcctatcggcaagacagagaagaccggtaaacgtagcacttcagcggcggttttagaagctcttcgcgaagtccatcccattgtggacaagatcttgcagtaccgcgaactcgcgaaattgaaaggcacctatattgaccgtcttccggcattagtccacccgaaaacgggacgcctccatacccgcttcaaccaaacagccacggcgaccggtcgtttgtcctcctctgatccaaaccttcagaatattccagtacgtaccccattgggccagaagatccgccgcgcgtttgtagctgaggagggttggcgtttagtggccctcgattatagccaaattgaattacgtgtccttgcccatctttctggcgatgagaacctcatccgcgtgtttcaggaaggcaaagacattcacactcaaacggcaagctggatgtttggagtgtcggcggaagcgatcgatcctttgatgcgtcgtgcagcgaagaccatcaatttcggtgttctctacggtatgagtgccgctcgtttgtcgcaggaattaggcattccctatgaagaagctgcggcgttcattcagcgctactttcaaagctatcccaaagttaaagcatggatcgagaagactctcgaagaaggccgcacacgtggttacgtagagaccttatttggacgtcgccgctatgttcccgatttaaacgctcgcgtgaaatctgtccgtgaagccgccgaacgcatggcgttcaacatgcctgtacagggcacggcagctgacctcatgaaacttgcaatggtgcgcctttttccacaattgcgtgaagttggtgcccgcatgctcttgcaggtccacgatgaactcttgttagaagcgccaaaagagcgtgcggaagaggtggcagccctcgcgaaagaggttatggaaggcgtgtggcccttagcggtgcctcttgaagtcgaagttggtattggcgaggattggttggctgccaaaggataatga

SEQ ID NO: 982 - protein, 841 aa, synthetic construct
  REGION 1..841: note = Variant of DNA polymerase I from Thermus sp. strain 2.9
MHHHHHHGGSGMLPLFEPKGRVLLVDGHHLAYRNFFALKGLTTSRGEPVQGVYGFAKSLLKALKEDGDVVIVVFDAKAPSFRHEAYEAYKAGRAPTPEDFPRQLALMKELVDLLGLERLEVPGFEADDVLATLAKKAEREGYEVQILTADRDLFQLLSPRISVLHPEGHLITPEWLWEKYGLRPEQWVDFRALVGDPSDNIPGVKGIGEKTALKLLKEWGSLENLLKNLDQVKPESVREKILAHLEDLKLSRELSRVRTDLPLEVDFRGRREPDWEGLKAFLERLEFGSLLHEFGLLESPLPAEEAPWPPPEGAFLGYRLSRPEPMWAELLALAASAQGRVYRAEDPHGALRGLKEVRGLLAKDLAVVALREGLDLPPTDDPMLLAYLLDPSNTTPEGVARRYGGEWTEDAGERALLAERLHANLLGRLQGEERLLWLYEEVEKPLSRVLHHMEATGVKLDVAYLEALSLEVAAELRRLEEEVFRLAGHSFNLNSRDQLERVLFDELGLPPIGKTEKTGKRSTSAAVLEALREVHPIVDKILQYRELAKLKGTYIDRLPALVHPKTGRLHTRFNQTATATGRLSSSDPNLQNIPVRTPLGQKIRRAFVAEEGWRLVALDYSQIELRVLAHLSGDENLIRVFQEGKDIHTQTASWMFGVSAEAIDPLMRRAAKTINFGVLYGMSAARLSQELGIPYEEAAAFIQRYFQSYPKVKAWIEKTLEEGRTRGYVETLFGRRRYVPDLNARVKSVREAAERMAFNMPVQGTAADLMKLAMVRLFPQLREVGARMLLQVHDELLLEAPKERAEEVAALAKEVMEGVWPLAVPLEVEVGIGEDWLAAKG

SEQ ID NO: 983 - DNA, 2529 bp, synthetic construct
  misc_feature 1..2529: note = Variant of DNA polymerase I from Thermus sp. strain 2.9
  source 1..2529: mol_type = other DNA
atgcaccatcatcatcatcatggcggtagcggcatgttaccgttgttcgaacctaaaggtcgcgtgcttctggttgatggccatcatctcgcgtatcgtaacttctttgccctgaaaggattaaccaccagccgtggcgagccggtacagggtgtctacggctttgcaaagtcgctcctgaaagctctgaaagaagacggtgatgtggtgattgttgtctttgatgcgaaagcgccaagttttcgccacgaagcgtacgaagcttacaaagccgggcgtgctccaacgccggaagactttcctcgccaattggcgcttatgaaggaattagtggatttgcttggcctcgaacgcttggaagttcccggtttcgaggcagacgacgtattagcgactctcgcaaagaaagccgaacgtgagggctatgaagtccagatcttgacagcagatcgcgatcttttccagcttttatctccgcgcatctcggtgttacacccggaagggcatcgtatcaccccggaatggctctgggagaaatatggtttgcgtcccgaacaatgggtggattttcgcgccttagcaggcgatccgagcgacaatattccgggagttaaaggtatcggcgagaagacggcgctcaagctccttaaagaatgggggtcgttggagaacttgcttaagaatttagatcaggtcaaaccagagtcagtgcgtgagaagattcttgcacacctcgaagacctcaaattaagccgcgaattgtcccgtgtacgcaccgatttgccgctcgaagttgatttccgtggccgccgcgaacctgactgggagggtcttaaagcgtttttagagcgtcttgaatttggttcgctcttgcatgaattcggccttttagaaagcccgttaccagccgaagaagcaccttggccaccgcccgaaggcgcgtttttaggttaccgtttgagtcgcccggaaccgatgtgggccgaattattggctcttgcagcgtctgcccagggacgtgtgtatcgcgcggaagaccctcatggtgcgctccgcggcctcaaagaagtccgtggactccttgccaaagacttagctgttgttgcattgcgcgaaggtcttgatttacctccgactgatgatccaatgcttcttgcgtacctcttggacccgtcaaacacgacgcccgaaggcgtagcccgtcgttacggcggcgagtggaccgaagatgcaggcgagcgcgcgttattggccgaacgtttgcacgccaatttattaggacgtttgcaaggcgaggaacgtctcctctggctttacgaagaagtggagaaaccattgagtcgcgtgctcgcgcatatggaagctaccggtgtcaaattagacgtggcgtatttggaggcactcagccttgaagttgctgccgaaatgcgccgcttggaggaagaagtattccgtttagcaggccactcctttaaccttaattctcgcgatcagttagaacgtgtgttgttcgatgaacttggtctccctcctatcggcaagacagagaagaccggtaaacgtagcacttcagcggcggttttagaagctcttcgcgaagtccatcccattgtggacaagatcttgcagtaccgcgaactcgcggttttgaaaggcacctatattgaccctcttccggcattagtccacccgaaaacgggacgcctccatacccgcttcaaccaaacagccacggcgaccggtcgtttgtcctcctctgatccaaaccttcagaatattccagtacgtaccccattgggccagaagatccgccgcgcgtttgtagctgaggagggttggcgtttagtggccctcgattatagccaaattgaattacgtgtccttgcccatctttctggcgatgagaacctcatccgcgtgtttcaggaaggcaaagacattcacactcaaacggcaagctggatgtttggattatcagctgaagcgatcgatcctttgatgcgtcgtgcagcgaagaccatcaatttcggtgttctctacggtatgagtgcccatcgtttgtcgcaggaattaggcattccctatgaagaagctgcggcgttcattcagcgctactttcaaagctatcccaaagttaaagcatggatcgagaagactctcgaagaaggccgcacacgtggttacgtagagaccttatttggacgtcgccgctatgttcccgatttaaacgctcgcgtgaaatctgtccgtgaagccgccgaacgcatggcgttcaacatgcctgtacagggcacggcagctgacctcatgaaacttgcaatggtgcgcctttttccacaattgcgtgaagttggtgcccgcatgctcttgcaggtccacgatgaactcttgttagaagcgccaaaagagcgtgcggaagaggtggcagccctcgcgaaagaggttatggaaggcgtgtggcccttagcggtgcctcttgaagtcgaagttggtattggcgaggattggttggctgccaaaggataatga

SEQ ID NO: 984 - protein, 841 aa, synthetic construct
  REGION 1..841: note = Variant of DNA polymerase I from Thermus sp. strain 2.9
MHHHHHHGGSGMLPLFEPKGRVLLVDGHHLAYRNFFALKGLTTSRGEPVQGVYGFAKSLLKALKEDGDVVIVVFDAKAPSFRHEAYEAYKAGRAPTPEDFPRQLALMKELVDLLGLERLEVPGFEADDVLATLAKKAEREGYEVQILTADRDLFQLLSPRISVLHPEGHRITPEWLWEKYGLRPEQWVDFRALAGDPSDNIPGVKGIGEKTALKLLKEWGSLENLLKNLDQVKPESVREKILAHLEDLKLSRELSRVRTDLPLEVDFRGRREPDWEGLKAFLERLEFGSLLHEFGLLESPLPAEEAPWPPPEGAFLGYRLSRPEPMWAELLALAASAQGRVYRAEDPHGALRGLKEVRGLLAKDLAVVALREGLDLPPTDDPMLLAYLLDPSNTTPEGVARRYGGEWTEDAGERALLAERLHANLLGRLQGEERLLWLYEEVEKPLSRVLAHMEATGVKLDVAYLEALSLEVAAEMRRLEEEVFRLAGHSFNLNSRDQLERVLFDELGLPPIGKTEKTGKRSTSAAVLEALREVHPIVDKILQYRELAVLKGTYIDPLPALVHPKTGRLHTRFNQTATATGRLSSSDPNLQNIPVRTPLGQKIRRAFVAEEGWRLVALDYSQIELRVLAHLSGDENLIRVFQEGKDIHTQTASWMFGLSAEAIDPLMRRAAKTINFGVLYGMSAHRLSQELGIPYEEAAAFIQRYFQSYPKVKAWIEKTLEEGRTRGYVETLFGRRRYVPDLNARVKSVREAAERMAFNMPVQGTAADLMKLAMVRLFPQLREVGARMLLQVHDELLLEAPKERAEEVAALAKEVMEGVWPLAVPLEVEVGIGEDWLAAKG

SEQ ID NO: 985 - DNA, 2529 bp, synthetic construct
  misc_feature 1..2529: note = Variant of DNA polymerase I from Thermus sp. strain 2.9
  source 1..2529: mol_type = other DNA
atgcaccatcatcatcatcatggcggtagcggcatgttaccgttgttcgaacctaaaggtcgcgtgcttctggttgatggccatcatctcgcgtatcgtaacttctttgccctgaaaggattaaccaccagccgtggcgagccggtacagggtgtctacggctttgcaaagtcgctcctgaaagctctgaaagaagacggtgatgtggtgattgttgtctttgatgcgaaagcgccaagttttcgccacgaagcgtacgaagcttacaaagccgggcgtgctccaacgccggaagactttcctcgccaattggcgcttatgaaggaattagtggatttgcttggcctcgaacgcttggaagttcccggtttcgaggcagacgacgtattagcgactctcgcaaagaaagccgaacgtgagggctatgaagtccagatcttgacagcagatcgcgatcttttccagcttttatctccgcgcatctcggtgttacacccggaagggcatctgatcaccccggaatggctctgggagaaatatggtttgcgtcccgaacaatgggtggattttcgcgccttagcaggcgatccgagcgacaatattccgggagttaaaggtatcggcgagaagacggcgctcaagctccttaaagaatgggggtcgttggagaacttgcttaagaatttagatcaggtcaaaccagagtcagtgcgtgagaagattcttgcacacctcgaagacctcaaattaagccgcgaattgtcccgtgtacgcaccgatttgccgctcgaagttgatttccgtggccgccgcgaacctgactgggagggtcttaaagcgtttttagagcgtcttgaatttggttcgctcttgcatgaattcggccttttagaaagcccgttaccagccgaagaagcaccttggccaccgcccgaaggcgcgtttttaggttaccgtttgagtcgcccggaaccgatgtgggccgaattattggctcttgcagcgtctgcccagggacgtgtgtatcgcgcggaagaccctcatggtgcgctccgcggcctcaaagaagtccgtggactccttgccaaagacttagctgttgttgcattgcgcgaaggtcttgatttacctccgactgatgatccaatgcttcttgcgtacctcttggacccgtcaaacacgacgcccgaaggcgtagcccgtcgttacggcggcgagtggaccgaagatgcaggcgagcgcgcgttattggccgaacgtttgcaccagaatttattaggacgtttgcaaggcgaggaacgtctcctctggctttacgaagaagtggagaaaccattgagtcgcgtgctcgctcatatggaagctaccggtgtcaaattagacgtggcgtatttggaggcactcagccttgaagttgctgccgaactgcgccgcttggaggaagaagtattccgtttagcaggccactcctttaaccttaattctcgcgatcagttagaacgtgtgttgttcgatgaacttggtctccctcctatcggcaagacagagaagaccggtaaacgtagcacttcagcggcggttttagaagctcttcgcgaagtccatcccattgtggacaagatcttgcagtaccgcgaactcgcgaaattgaaaggcacctatattgaccctcttccggcattagtccacccgaaaacgggacgcctccatacccgcttcaaccaaacagccacggcgaccggtcgtttgtcctcctctgatccaaaccttcagaatattccagtacgtaccccattgggccagaagatccgccgcgcgtttgtagctgaggagggttggcgtttagtggccctcgattatagccaaattgaattacgtgtccttgcccatctttctggcgatgagaacctcatccgcgtgtttcaggaaggcaaagacattcacactcaaacggcaagctggatgtttggagtgtcggcggaagcgatcgatcctttgatgcgtcgtgcagcgaagaccatcaatttcggtgttctctacggtatgagtgccgctcgtttgtcgcaggaattaggcattccctatgaagaagctgcggcgttcattcagcgctactttcaaagctatcccaaagttaaagcatggatcgagaagactctcgaagaaggccgcacacgtggttacgtagagaccttatttggacgtcgccgctatgttcccgatttaaccgctcgcgtgaaatctgtccgtgaagccgccgaacgcatggcgttcaacatgcctgtacagggcacggcagctgacctcatgaaacttgcaatggtgcgcctttttccacaattgcgtgaagttggtgcccgcatgctcttgcaggtccacgatgaactcttgttagaagcgccaaaagagcgtgcggaagaggtggcagccctcgcgaaagaggttatggaaggcgtgtggcccttagcggtgcctcttgaagtcgaagttggtattggcgaggattggttggctgccaaaggataatga

SEQ ID NO: 986 - protein, 841 aa, synthetic construct
  REGION 1..841: note = Variant of DNA polymerase I from Thermus sp. strain 2.9
MHHHHHHGGSGMLPLFEPKGRVLLVDGHHLAYRNFFALKGLTTSRGEPVQGVYGFAKSLLKALKEDGDVVIVVFDAKAPSFRHEAYEAYKAGRAPTPEDFPRQLALMKELVDLLGLERLEVPGFEADDVLATLAKKAEREGYEVQILTADRDLFQLLSPRISVLHPEGHLITPEWLWEKYGLRPEQWVDFRALAGDPSDNIPGVKGIGEKTALKLLKEWGSLENLLKNLDQVKPESVREKILAHLEDLKLSRELSRVRTDLPLEVDFRGRREPDWEGLKAFLERLEFGSLLHEFGLLESPLPAEEAPWPPPEGAFLGYRLSRPEPMWAELLALAASAQGRVYRAEDPHGALRGLKEVRGLLAKDLAVVALREGLDLPPTDDPMLLAYLLDPSNTTPEGVARRYGGEWTEDAGERALLAERLHQNLLGRLQGEERLLWLYEEVEKPLSRVLAHMEATGVKLDVAYLEALSLEVAAELRRLEEEVFRLAGHSFNLNSRDQLERVLFDELGLPPIGKTEKTGKRSTSAAVLEALREVHPIVDKILQYRELAKLKGTYIDPLPALVHPKTGRLHTRFNQTATATGRLSSSDPNLQNIPVRTPLGQKIRRAFVAEEGWRLVALDYSQIELRVLAHLSGDENLIRVFQEGKDIHTQTASWMFGVSAEAIDPLMRRAAKTINFGVLYGMSAARLSQELGIPYEEAAAFIQRYFQSYPKVKAWIEKTLEEGRTRGYVETLFGRRRYVPDLTARVKSVREAAERMAFNMPVQGTAADLMKLAMVRLFPQLREVGARMLLQVHDELLLEAPKERAEEVAALAKEVMEGVWPLAVPLEVEVGIGEDWLAAKG

SEQ ID NO: 987 - DNA, 2529 bp, synthetic construct
  misc_feature 1..2529: note = Variant of DNA polymerase I from Thermus sp. strain 2.9
  source 1..2529: mol_type = other DNA
atgcaccatcatcatcatcatggcggtagcggcatgttaccgttgttcgaacctaaaggtcgcgtgcttctggttgatggccatcatctcgcgtatcgtaacttctttgccctgaaaggattaaccaccagccgtggcgagccggtacagggtgtctacggctttgcaaagtcgctcctgaaagctctgaaagaagacggtgatgtggtgattgttgtctttgatgcgaaagcgccaagttttcgccacgaagcgtacgaagcttacaaagccgggcgtgctccaacgccggaagactttcctcgccaattggcgcttatgaaggaattagtggatttgcttggcctcgaacgcttggaagttcccggtttcgaggcagacgacgtattagcgactctcgcaaagaaagccgaacgtgagggctatgaagtccagatcttgacagcagatcgcgatcttttccagcttttatctccgcgcatctcggtgttacacccggaagggcatcgtatcaccccggaatggctctgggagaaatatggtttgcgtcccgaacaatgggtggattttcgcgccttagcaggcgatccgagcgacaatattccgggagttaaaggtatcggcgagaagacggcgctcaagctccttaaagaatgggggtcgttggagaacttgcttaagaatttagatcaggtcaaaccagagtcagtgcgtgagaagattcttgcacacctcgaagacctcaaattaagccgcgaattgtcccgtgtacgcaccgatttgccgctcgaagttgatttccgtggccgccgcgaacctgactgggagggtcttaaagcgtttttagagcgtcttgaatttggttcgctcttgcatgaattcggccttttagaaagcccgttaccagccgaagaagcaccttggccaccgcccgaaggcgcgtttttaggttaccgtttgagtcgcccggaaccgatgtgggccgaattattggctcttgcagcgtctgcccagggacgtgtgtatcgcgcggaagaccctcatggtgcgctccgcggcctcaaagaagtccgtggactccttgccaaagacttagctgttgttgcattgcgcgaaggtcttgatttacctccgactgatgatccaatgcttcttgcgtacctcttggacccgtcaaacacgacgcccgaaggcgtagcccgtcgttacggcggcgagtggaccgaagatgcaggcgagcgcgcgttattggccgaacgtttgcacgccaatttattaggacgtttgcaaggcgaggaacgtctcctctggctttacgaagaagtggagaaaccattgagtcgcgtgctcgcgcatatggaagctaccggtgtcaaattagacgtggcgtatttggaggcactcagccttgaagttgctgccgaaatgcgccgcttggaggaagaagtattccgtttagcaggccactcctttaaccttaattctcgcgatcagttagaacgtgtgttgttcgatgaacttggtctccctcctatcggcaagacagagaagaccggtaaacgtagcacttcagcggcggttttagaagctcttcgcgaagtccatcccattgtggacaagatcttgcagtaccgcgaactcgcgaaattgaaaggcacctatattgaccctcttccggcattagtccacccgaaaacgggacgcctccatacccgcttcaaccaaacagccacggcgaccggtcgtttgtcctcctctgatccaaaccttcagaatattccagtacgtaccccattgggccagaagatccgccgcgcgtttgtagctgaggagggttggcgtttagtggccctcgattatagccaaattgaattacgtgtccttgcccatctttctggcgatgagaacctcatccgcgtgtttcaggaaggcaaagacattcacactcaaacggcaagctggatgtttggattatcagctgaagcgatcgatcctttgatgcgtcgtgcagcgaagaccatcaatttcggtgttctctacggtatgagtgcccatcgtttgtcgcaggaattaggcattccctatgaagaagctgcggcgttcattcagcgctactttcgtagctatcccaaagttaaagcatggatcgagaagactctcgaagaaggccgcacacgtggttacgtagagaccttatttggacgtcgccgctatgttcccgatttaaacgctcgcgtgaaatctgtccgtgaagccgccgaacgcatggcgttcaacatgcctgtacagggcacggcagctgacctcatgaaacttgcaatggtgcgcctttttccacaattgcgtgaagttggtgcccgcatgctcttgcaggtccacgatgaactcttgttagaagcgccaaaagagcgtgcggaagaggtggcagccctcgcgaaagaggttatggaaggcgtgtggcccttagcggtgcctcttgaagtcgaagttggtattggcgaggattggttggctgccaaaggataatga

SEQ ID NO: 988 - protein, 841 aa, synthetic construct
  REGION 1..841: note = Variant of DNA polymerase I from Thermus sp. strain 2.9
MHHHHHHGGSGMLPLFEPKGRVLLVDGHHLAYRNFFALKGLTTSRGEPVQGVYGFAKSLLKALKEDGDVVIVVFDAKAPSFRHEAYEAYKAGRAPTPEDFPRQLALMKELVDLLGLERLEVPGFEADDVLATLAKKAEREGYEVQILTADRDLFQLLSPRISVLHPEGHRITPEWLWEKYGLRPEQWVDFRALAGDPSDNIPGVKGIGEKTALKLLKEWGSLENLLKNLDQVKPESVREKILAHLEDLKLSRELSRVRTDLPLEVDFRGRREPDWEGLKAFLERLEFGSLLHEFGLLESPLPAEEAPWPPPEGAFLGYRLSRPEPMWAELLALAASAQGRVYRAEDPHGALRGLKEVRGLLAKDLAVVALREGLDLPPTDDPMLLAYLLDPSNTTPEGVARRYGGEWTEDAGERALLAERLHANLLGRLQGEERLLWLYEEVEKPLSRVLAHMEATGVKLDVAYLEALSLEVAAEMRRLEEEVFRLAGHSFNLNSRDQLERVLFDELGLPPIGKTEKTGKRSTSAAVLEALREVHPIVDKILQYRELAKLKGTYIDPLPALVHPKTGRLHTRFNQTATATGRLSSSDPNLQNIPVRTPLGQKIRRAFVAEEGWRLVALDYSQIELRVLAHLSGDENLIRVFQEGKDIHTQTASWMFGLSAEAIDPLMRRAAKTINFGVLYGMSAHRLSQELGIPYEEAAAFIQRYFRSYPKVKAWIEKTLEEGRTRGYVETLFGRRRYVPDLNARVKSVREAAERMAFNMPVQGTAADLMKLAMVRLFPQLREVGARMLLQVHDELLLEAPKERAEEVAALAKEVMEGVWPLAVPLEVEVGIGEDWLAAKG

SEQ ID NO: 989 - DNA, 2529 bp, synthetic construct
  misc_feature 1..2529: note = Variant of DNA polymerase I from Thermus sp. strain 2.9
  source 1..2529: mol_type = other DNA
atgcaccatcatcatcatcatggcggtagcggcatgttaccgttgttcgaacctaaaggtcgcgtgcttctggttgatggccatcatctcgcgtatcgtaacttctttgccctgaaaggattaaccaccagccgtggcgagccggtacagggtgtctacggctttgcaaagtcgctcctgaaagctctgaaagaagacggtgatgtggtgattgttgtctttgatgcgaaagcgccaagttttcgccacgaagcgtacgaagcttacaaagccgggcgtgctccaacgccggaagactttcctcgccaattggcgcttatgaaggaattagtggatttgcttggcctcgaacgcttggaagttcccggtttcgaggcagacgacgtattagcgactctcgcaaagaaagccgaacgtgagggctatgaagtccagatcttgacagcagatcgcgatcttttccagcttttatctccgcgcatctcggtgttacacccggaagggcatcgtatcaccccggaatggctctgggagaaatatggtttgcgtcccgaacaatgggtggattttcgcgccttagcaggcgatccgagcgacaatattccgggagttaaaggtatcggcgagaagacggcgctcaagctccttaaagaatgggggtcgttggagaacttgcttaagaatttagatcaggtcaaaccagagtcagtgcgtgagaagattcttgcacacctcgaagacctcaaattaagccgcgaattgtcccgtgtacgcaccgatttgccgctcgaagttgatttccgtggccgccgcgaacctgactgggagggtcttaaagcgtttttagagcgtcttgaatttggttcgctcttgcatgaattcggccttttagaaagcccgttaccagccgaagaagcaccttggccaccgcccgaaggcgcgtttttaggttaccgtttgagtcgcccggaaccgatgtgggccgaattattggctcttgcagcgtctgcccagggacgtgtgtatcgcgcggaagaccctcatggtgcgctccgcggcctcggggaagtccgtggactccttgccaaagacttagctgttgttgcattgcgcgaaggtcttgatttacctccgactgatgatccaatgcttcttgcgtacctcttggacccgtcaaacacgacgcccgaaggcgtagcccgtcgttacggcggcgagtggaccgaagatgcaggcgagcgcgcgttattggccgaacgtttgcacgccaatttattaggacgtttgcaaggcgaggaacgtctcctctggctttacgaagaagtggagaaaccattgagtcgcgtgctcgcgcatatggaagctaccggtgtcaaattagacgtggcgtatttggaggcactcagccttgaagttgctgccgaaatgcgccgcttggaggaagaagtattccgtttagcaggccactcctttaaccttaattctcgcgatcagttagaacgtgtgttgttcgatgaacttggtctccctcctatcggcaagacagagaagaccggtaaacgtagcacttcagcggcggttttagaagctcttcgcgaagtccatcccattgtggacaagatcttgcagtaccgcgaactcgcgaaattgaaaggcacctatattgaccctcttccggcattagtccacccgaaaacgggacgcctccatacccgcttcaaccaaacagccacggcgaccggtcgtttgtcctcctctgatccaaaccttcagaatattccagtacgtaccccattgggccagaagatccgccgcgcgtttgtagctgaggagggttggcgtttagtggccctcgattatagccaaattgaattacgtgtccttgcccatctttctggcgatgagaacctcatccgcgtgtttcaggaaggcaaagacattcacactcaaacggcaagctggatgtttggattatcagctgaagcgatcgatcctttgatgcgtcgtgcagcgaagaccatcaatttcggtgttctctacggtatgagtgcccatcgtttgtcgcaggaattaggcattccctatgaagaagctgcggcgttcattcagcgctactttcaaagctatcccaaagttaaagcatggatcgagaagactctcgaagaaggccgcacacgtggttacgtagagaccttatttggacgtcgccgctatgttcccgatttaaacgctcgcgtgaaatctgtccgtgaagccgccgaacgcatggcgttcaacatgcctgtacagggcacggcagctgacctcatgaaacttgcaatggtgcgcctttttccacaattgcgtgaagttggtgcccgcatgctcttgcaggtccacgatgaactcttgttagaagcgccaaaagagcgtgcggaagaggtggcagccctcgcgaaagaggttatggaaggcgtgtggcccttagcggtgcctcttgaagtcgaagttggtattggcgaggattggttggctgccaaaggataatga

SEQ ID NO: 990 - protein, 841 aa, synthetic construct
  REGION 1..841: note = Variant of DNA polymerase I from Thermus sp. strain 2.9
MHHHHHHGGSGMLPLFEPKGRVLLVDGHHLAYRNFFALKGLTTSRGEPVQGVYGFAKSLLKALKEDGDVVIVVFDAKAPSFRHEAYEAYKAGRAPTPEDFPRQLALMKELVDLLGLERLEVPGFEADDVLATLAKKAEREGYEVQILTADRDLFQLLSPRISVLHPEGHRITPEWLWEKYGLRPEQWVDFRALAGDPSDNIPGVKGIGEKTALKLLKEWGSLENLLKNLDQVKPESVREKILAHLEDLKLSRELSRVRTDLPLEVDFRGRREPDWEGLKAFLERLEFGSLLHEFGLLESPLPAEEAPWPPPEGAFLGYRLSRPEPMWAELLALAASAQGRVYRAEDPHGALRGLGEVRGLLAKDLAVVALREGLDLPPTDDPMLLAYLLDPSNTTPEGVARRYGGEWTEDAGERALLAERLHANLLGRLQGEERLLWLYEEVEKPLSRVLAHMEATGVKLDVAYLEALSLEVAAEMRRLEEEVFRLAGHSFNLNSRDQLERVLFDELGLPPIGKTEKTGKRSTSAAVLEALREVHPIVDKILQYRELAKLKGTYIDPLPALVHPKTGRLHTRFNQTATATGRLSSSDPNLQNIPVRTPLGQKIRRAFVAEEGWRLVALDYSQIELRVLAHLSGDENLIRVFQEGKDIHTQTASWMFGLSAEAIDPLMRRAAKTINFGVLYGMSAHRLSQELGIPYEEAAAFIQRYFQSYPKVKAWIEKTLEEGRTRGYVETLFGRRRYVPDLNARVKSVREAAERMAFNMPVQGTAADLMKLAMVRLFPQLREVGARMLLQVHDELLLEAPKERAEEVAALAKEVMEGVWPLAVPLEVEVGIGEDWLAAKG

SEQ ID NO: 991 - DNA, 2529 bp, synthetic construct
  misc_feature 1..2529: note = Variant of DNA polymerase I from Thermus sp. strain 2.9
  source 1..2529: mol_type = other DNA
atgcaccatcatcatcatcatggcggtagcggcatgttaccgttgttcgaacctaaaggtcgcgtgcttctggttgatggccatcatctcgcgtatcgtaacttctttgccctgaaaggattaaccaccagccgtggcgagccggtacagggtgtctacggctttgcaaagtcgctcctgaaagctctgaaagaagacggtgatgtggtgattgttgtctttgatgcgaaagcgccaagttttcgccacgaagcgtacgaagcttacaaagccgggcgtgctccaacgccggaagactttcctcgccaattggcgcttatgaaggaattagtggatttgcttggcctcgaacgcttggaagttcccggtttcgaggcagacgacgtattagcgactctcgcaaagaaagccgaacgtgagggctatgaagtccagatcttgacagcagatcgcgatcttttccagcttttatctccgcgcatctcggtgttacacccggaagggcatcgtatcaccccggaatggctctgggagaaatatggtttgcgtcccgaacaatgggtggattttcgcgccttagcaggcgatccgagcgacaatattccgggagttaaaggtatcggcgagaagacggcgctcaagctccttaaagaatgggggtcgttggagaacttgcttaagaatttagatcaggtcaaaccagagtcagtgcgtgagaagattcttgcacacctcgaagacctcaaattaagccgcgaattgtcccgtgtacgcaccgatttgccgctcgaagttgatttccgtggccgccgcgaacctgactgggagggtcttaaagcgtttttagagcgtcttgaatttggttcgctcttgcatgaattcggccttttagaaagcccgttaccagccgaagaagcaccttggccaccgcccgaaggcgcgtttttaggttaccgtttgagtcgcccggaaccgatgtgggccgaattattggctcttgcagcgtctgcccagggacgtgtgtatcgcgcggaagaccctcatggtgcgctccgcggcctcaaagaagtccgtggactccttgccaaagacttagctgttgttgcattgcgcgaaggtcttgatttacctccgactgatgatccaatgcttcttgcgtacctcttggacccgtcaaacacgacgcccgaaggcgtagcccgtcgttacggcggcgagtggaccgaagatgcaggcgagcgcgcgttattggccgaacgtttgcacgccaatttattaggacgtttgcaaggcgaggaacgtctcctctggctttacgaagaagtggagaaaccattgagtcgcgtgctcgcgcatatggaagctaccggtgtcaaattagacgtggcgtatttggaggcactcagccttgaagttgctgccgaaatgcgccgcttggaggaagaagtattccgtttagcaggccactcctttaaccttaattctcgcgatcagttagaacgtgtgttgttcgatgaacttggtctccctcctatcggcaagacagagaagaccggtaaacgtagcacttcagcggcggttttagaagctcttcgcgaagtccatcccattgtggacaagatcttgcagtaccgcgaactcgcgaaattgaaaggcacctatattgaccctcttccggcattagtccacccgaaaacgggacgcctccatacccgcttcaaccaaacagccacggcgaccggtcgtttgtcctcctctgatccaaaccttcagaatattccagtacgtaccccattgggccagaagatccgccgcgcgtttgtagctgaggagggttggcgtttagtggccctcgattatagccaaattgaattacgtgtccttgcccatctttctggcgatgagaacctcatccgcgtgtttcaggaaggcaaagacattcacactcaaacggcaagctggatgtttggattatcagctgaagcgatcgatcctttgatgcgtcgtgcagcgaagaccatcaatttcggtgttctctacggtatgagtgcccatcgtttgtcgcaggaattaggcattcccaaggaagaagctgcggcgttcattcagcgctactttcaaagctatcccaaagttaaagcatggatcgagaagactctcgaagaaggccgcacacgtggttacgtagagaccttatttggacgtcgccgctatgttcccgatttaaacgctcgcgtgaaatctgtccgtgaagccgccgaacgcatggcgttcaacatgcctgtacagggcacggcagctgacctcatgaaacttgcaatggtgcgcctttttccacaattgcgtgaagttggtgcccgcatgctcttgcaggtccacgatgaactcttgttagaagcgccaaaagagcgtgcggaagaggtggcagccctcgcgaaagaggttatggaaggcgtgtggcccttagcggtgcctcttgaagtcgaagttggtattggcgaggattggttggctgccaaaggataatga

SEQ ID NO: 992 - protein, 841 aa, synthetic construct
  REGION 1..841: note = Variant of DNA polymerase I from Thermus sp. strain 2.9
MHHHHHHGGSGMLPLFEPKGRVLLVDGHHLAYRNFFALKGLTTSRGEPVQGVYGFAKSLLKALKEDGDVVIVVFDAKAPSFRHEAYEAYKAGRAPTPEDFPRQLALMKELVDLLGLERLEVPGFEADDVLATLAKKAEREGYEVQILTADRDLFQLLSPRISVLHPEGHRITPEWLWEKYGLRPEQWVDFRALAGDPSDNIPGVKGIGEKTALKLLKEWGSLENLLKNLDQVKPESVREKILAHLEDLKLSRELSRVRTDLPLEVDFRGRREPDWEGLKAFLERLEFGSLLHEFGLLESPLPAEEAPWPPPEGAFLGYRLSRPEPMWAELLALAASAQGRVYRAEDPHGALRGLKEVRGLLAKDLAVVALREGLDLPPTDDPMLLAYLLDPSNTTPEGVARRYGGEWTEDAGERALLAERLHANLLGRLQGEERLLWLYEEVEKPLSRVLAHMEATGVKLDVAYLEALSLEVAAEMRRLEEEVFRLAGHSFNLNSRDQLERVLFDELGLPPIGKTEKTGKRSTSAAVLEALREVHPIVDKILQYRELAKLKGTYIDPLPALVHPKTGRLHTRFNQTATATGRLSSSDPNLQNIPVRTPLGQKIRRAFVAEEGWRLVALDYSQIELRVLAHLSGDENLIRVFQEGKDIHTQTASWMFGLSAEAIDPLMRRAAKTINFGVLYGMSAHRLSQELGIPKEEAAAFIQRYFQSYPKVKAWIEKTLEEGRTRGYVETLFGRRRYVPDLNARVKSVREAAERMAFNMPVQGTAADLMKLAMVRLFPQLREVGARMLLQVHDELLLEAPKERAEEVAALAKEVMEGVWPLAVPLEVEVGIGEDWLAAKG

SEQ ID NO: 993 - DNA, 2529 bp, synthetic construct
  misc_feature 1..2529: note = Variant of DNA polymerase I from Thermus sp. strain 2.9
  source 1..2529: mol_type = other DNA
atgcaccatcatcatcatcatggcggtagcggcatgttaccgttgttcgaacctaaaggtcgcgtgcttctggttgatggccatcatctcgcgtatcgtaacttctttgccctgaaaggattaaccaccagccgtggcgagccggtacagggtgtctacggctttgcaaagtcgctcctgaaagctctgaaagaagacggtgatgtggtgattgttgtctttgatgcgaaagcgccaagttttcgccacgaagcgtacgaagcttacaaagccgggcgtgctccaacgccggaagactttcctcgccaattggcgcttatgaaggaattagtggatttgcttggcctcgaacgcttggaagttcccggtttcgaggcagacgacgtattagcgactctcgcaaagaaagccgaacgtgagggctatgaagtccagatcttgacagcagatcgcgatcttttccagcttttatctccgcgcatctcggtgttacacccggaagggcatcgtatcaccccggaatggctctgggagaaatatggtttgcgtcccgaacaatgggtggattttcgcgccttagcaggcgatccgagcgacaatattccgggagttaaaggtatcggcgagaagacggcgctcaagctccttaaagaatgggggtcgttggagaacttgcttaagaatttagatcaggtcaaaccagagtcagtgcgtgagaagattcttgcacacctcgaagacctcaaattaagccgcgaattgtcccgtgtacgcaccgatttgccgctcgaagttgatttccgtggccgccgcgaacctgactgggagggtcttaaagcgtttttagagcgtcttgaatttggttcgctcttgcatgaattcggccttttagaaagcccgttaccagccgaagaagcaccttggccaccgcccgaaggcgcgtttttaggttaccgtttgagtcgcccggaaccgatgtgggccgaattattggctcttgcagcgtctgcccagggacgtgtgtatcgcgcggaagaccctcatggtgcgctccgcggcctcaaagaagtccgtggactccttgccaaagacttagctgttgttgcattgcgcgaaggtcttgatttacctccgactgatgatccaatgcttcttgcgtacctcttggacccgtcaaacacgacgcccgaaggcgtagcccgtcgttacggcggcgagtggaccgaagatgcaggcgagcgcgcgttattggccgaacgtttgcacgccaatttattaggacgtttgcaaggcgaggaacgtctcctctggctttacgaagaagtggagaaaccattgagtcgcgtgctcgcgcatatggaagctaccggtgtcaaattagacgtggcgtatttggaggcactcagccttgaagttgctgccgaaatgcgccgcttggaggaagaagtattccgtttagcaggccactccttttatcttaattctcgcgatcagttagaacgtgtgttgttcgatgaacttggtctccctcctatcggcaagacagagaagaccggtaaacgtagcacttcagcggcggttttagaagctcttcgcgaagtccatcccattgtggacaagatcttgcagtaccgcgaactcgcgaaattgaaaggcacctatattgaccctcttccggcattagtccacccgaaaacgggacgcctccatacccgcttcaaccaaacagccacggcgaccggtcgtttgtcctcctctgatccaaaccttcagaatattccagtacgtaccccattgggccagaagatccgccgcgcgtttgtagctgaggagggttggcgtttagtggccctcgattatagccaaattgaattacgtgtccttgcccatctttctggcgatgagaacctcatccgcgtgtttcaggaaggcaaagacattcacactcaaacggcaagctggatgtttggattatcagctgaagcgatcgatcctttgatgcgtcgtgcagcgaagaccatcaatttcggtgttctctacggtatgagtgcccatcgtttgtcgcaggaattaggcattccctatgaagaagctgcggcgttcattcagcgctactttcaaagctatcccaaagttaaagcatggatcgagaagactctcgaagaaggccgcacacgtggttacgtagagaccttatttggacgtcgccgctatgttcccgatttaaacgctcgcgtgaaatctgtccgtgaagccgccgaacgcatggcgttcaacatgcctgtacagggcacggcagctgacctcatgaaacttgcaatggtgcgcctttttccacaattgcgtgaagttggtgcccgcatgctcttgcaggtccacgatgaactcttgttagaagcgccaaaagagcgtgcggaagaggtggcagccctcgcgaaagaggttatggaaggcgtgtggcccttagcggtgcctcttgaagtcgaagttggtattggcgaggattggttggctgccaaaggataatga

SEQ ID NO: 994 - protein, 841 aa, synthetic construct
  REGION 1..841: note = Variant of DNA polymerase I from Thermus sp. strain 2.9
MHHHHHHGGSGMLPLFEPKGRVLLVDGHHLAYRNFFALKGLTTSRGEPVQGVYGFAKSLLKALKEDGDVVIVVFDAKAPSFRHEAYEAYKAGRAPTPEDFPRQLALMKELVDLLGLERLEVPGFEADDVLATLAKKAEREGYEVQILTADRDLFQLLSPRISVLHPEGHRITPEWLWEKYGLRPEQWVDFRALAGDPSDNIPGVKGIGEKTALKLLKEWGSLENLLKNLDQVKPESVREKILAHLEDLKLSRELSRVRTDLPLEVDFRGRREPDWEGLKAFLERLEFGSLLHEFGLLESPLPAEEAPWPPPEGAFLGYRLSRPEPMWAELLALAASAQGRVYRAEDPHGALRGLKEVRGLLAKDLAVVALREGLDLPPTDDPMLLAYLLDPSNTTPEGVARRYGGEWTEDAGERALLAERLHANLLGRLQGEERLLWLYEEVEKPLSRVLAHMEATGVKLDVAYLEALSLEVAAEMRRLEEEVFRLAGHSFYLNSRDQLERVLFDELGLPPIGKTEKTGKRSTSAAVLEALREVHPIVDKILQYRELAKLKGTYIDPLPALVHPKTGRLHTRFNQTATATGRLSSSDPNLQNIPVRTPLGQKIRRAFVAEEGWRLVALDYSQIELRVLAHLSGDENLIRVFQEGKDIHTQTASWMFGLSAEAIDPLMRRAAKTINFGVLYGMSAHRLSQELGIPYEEAAAFIQRYFQSYPKVKAWIEKTLEEGRTRGYVETLFGRRRYVPDLNARVKSVREAAERMAFNMPVQGTAADLMKLAMVRLFPQLREVGARMLLQVHDELLLEAPKERAEEVAALAKEVMEGVWPLAVPLEVEVGIGEDWLAAKG

SEQ ID NO: 995 - DNA, 2529 bp, synthetic construct
  misc_feature 1..2529: note = Variant of DNA polymerase I from Thermus sp. strain 2.9
  source 1..2529: mol_type = other DNA
atgcaccatcatcatcatcatggcggtagcggcatgttaccgttgttcgaacctaaaggtcgcgtgcttctggttgatggccatcatctcgcgtatcgtaacttctttgccctgaaaggattaaccaccagccgtggcgagccggtacagggtgtctacggctttgcaaagtcgctcctgaaagctctgaaagaagacggtgatgtggtgattgttgtctttgatgcgaaagcgccaagttttcgccacgaagcgtacgaagcttacaaagccgggcgtgctccaacgccggaagactttcctcgccaattggcgcttatgaaggaattagtggatttgcttggcctcgaacgcttggaagttcccggtttcgaggcagacgacgtattagcgactctcgcaaagaaagccgaacgtgagggctatgaagtccagatcttgacagcagatcgcgatcttttccagcttttatctccgcgcatctcggtgttacacccggaagggcatcgtatcaccccggaatggctctgggagaaatatggtttgcgtcccgaacaatgggtggattttcgcgccttagcaggcgatccgagcgacaatattccgggagttaaaggtatcggcgagaagacggcgctcaagctccttaaagaatgggggtcgttggagaacttgcttaagaatttagatcaggtcaaaccagagtcagtgcgtgagaagattcttgcacacctcgaagacctcaaattaagccgcgaattgtcccgtgtacgcaccgatttgccgctcgaagttgatttccgtggccgccgcgaacctgactgggagggtcttaaagcgtttttagagcgtcttgaatttggttcgctcttgcatgaattcggccttttagaaagcccgttaccagccgaagaagcaccttggccaccgcccgaaggcgcgtttttaggttaccgtttgagtcgcccggaaccgatgtgggccgaattattggctcttgcagcgtctgcccagggacgtgtgtatcgcgcggaagaccctcatggtgcgctccgcggcctcaaagaagtccgtggactccttgccaaagacttagctgttgttgcattgcgcgaaggtcttgatttacctccgactgatgatccaatgcttcttgcgtacctcttggacccgtcaaacacgacgcccgaaggcgtagcccgtcgttacggcggcgagtggaccgaagatgcaggcgagcgcgcgttattggccgaacgtttgcacgccaatttattaggacgtttgcaaggcgaggaacgtctcctctggctttacgaagaagtggagaaaccattgagtcgcgtgctcgcgcatatggaagctaccggtgtcaaattagacgtggcgtatttggaggcactcagccttgaagttgctgccgaaatgcgccgcttggaggaagaagtattccgtttagcaggccactcctttaaccttaattctcgcgatcagttagaacgtgtgttgttcgatgaacttggtctccctcctatcggcaagacagagaagaccggtaaacgtagcacttcagcggcggttttagaagctcttcgcgaagtccatcccattgtggacaagatcttgcagtaccgcgaactcgcgaaattgaaaggcacctatattgaccctcttccggcattagtccacccgaggacgggacgcctccatacccgcttcaaccaaacagccacggcgaccggtcgtttgtcctcctctgatccaaaccttcagaatattccagtacgtaccccattgggccagaagatccgccgcgcgtttgtagctgaggagggttggcgtttagtggccctcgattatagccaaattgaattacgtgtccttgcccatctttctggcgatgagaacctcatccgcgtgtttcaggaaggcaaagacattcacactcaaacggcaagctggatgtttggattatcagctgaagcgatcgatcctttgatgcgtcgtgcagcgaagaccatcaatttcggtgttctctacggtatgagtgcccatcgtttgtcgcaggaattaggcattccctatgaagaagctgcggcgttcattcagcgctactttcaaagctatcccaaagttaaagcatggatcgagaagactctcgaagaaggccgcacacgtggttacgtagagaccttatttggacgtcgccgctatgttcccgatttaaacgctcgcgtgaaatctgtccgtgaagccgccgaacgcatggcgttcaacatgcctgtacagggcacggcagctgacctcatgaaacttgcaatggtgcgcctttttccacaattgcgtgaagttggtgcccgcatgctcttgcaggtccacgatgaactcttgttagaagcgccaaaagagcgtgcggaagaggtggcagccctcgcgaaagaggttatggaaggcgtgtggcccttagcggtgcctcttgaagtcgaagttggtattggcgaggattggttggctgccaaaggataatga

SEQ ID NO: 996 - protein, 841 aa, synthetic construct
  REGION 1..841: note = Variant of DNA polymerase I from Thermus sp. strain 2.9
MHHHHHHGGSGMLPLFEPKGRVLLVDGHHLAYRNFFALKGLTTSRGEPVQGVYGFAKSLLKALKEDGDVVIVVFDAKAPSFRHEAYEAYKAGRAPTPEDFPRQLALMKELVDLLGLERLEVPGFEADDVLATLAKKAEREGYEVQILTADRDLFQLLSPRISVLHPEGHRITPEWLWEKYGLRPEQWVDFRALAGDPSDNIPGVKGIGEKTALKLLKEWGSLENLLKNLDQVKPESVREKILAHLEDLKLSRELSRVRTDLPLEVDFRGRREPDWEGLKAFLERLEFGSLLHEFGLLESPLPAEEAPWPPPEGAFLGYRLSRPEPMWAELLALAASAQGRVYRAEDPHGALRGLKEVRGLLAKDLAVVALREGLDLPPTDDPMLLAYLLDPSNTTPEGVARRYGGEWTEDAGERALLAERLHANLLGRLQGEERLLWLYEEVEKPLSRVLAHMEATGVKLDVAYLEALSLEVAAEMRRLEEEVFRLAGHSFNLNSRDQLERVLFDELGLPPIGKTEKTGKRSTSAAVLEALREVHPIVDKILQYRELAKLKGTYIDPLPALVHPRTGRLHTRFNQTATATGRLSSSDPNLQNIPVRTPLGQKIRRAFVAEEGWRLVALDYSQIELRVLAHLSGDENLIRVFQEGKDIHTQTASWMFGLSAEAIDPLMRRAAKTINFGVLYGMSAHRLSQELGIPYEEAAAFIQRYFQSYPKVKAWIEKTLEEGRTRGYVETLFGRRRYVPDLNARVKSVREAAERMAFNMPVQGTAADLMKLAMVRLFPQLREVGARMLLQVHDELLLEAPKERAEEVAALAKEVMEGVWPLAVPLEVEVGIGEDWLAAKG

SEQ ID NO: 997 - DNA, 2529 bp, synthetic construct
  misc_feature 1..2529: note = Variant of DNA polymerase I from Thermus sp. strain 2.9
  source 1..2529: mol_type = other DNA
atgcaccatcatcatcatcatggcggtagcggcatgttaccgttgttcgaacctaaaggtcgcgtgcttctggttgatggccatcatctcgcgtatcgtaacttctttgccctgaaaggattaaccaccagccgtggcgagccggtacagggtgtctacggctttgcaaagtcgctcctgaaagctctgaaagaagacggtgatgtggtgattgttgtctttgatgcgaaagcgccaagttttcgccacgaagcgtacgaagcttacaaagccgggcgtgctccaacgccggaagactttcctcgccaattggcgcttatgaaggaattagtggatttgcttggcctcgaacgcttggaagttcccggtttcgaggcagacgacgtattagcgactctcgcaaagaaagccgaagatgagggctatgaagtccagatcttgacagcagatcgcgatcttttccagcttttatctccgcgcatctcggtgttacacccggaagggcatcgtatcaccccggaatggctctgggagaaatatggtttgcgtcccgaacaatgggtggattttcgcgccttagcaggcgatccgagcgacaatattccgggagttaaaggtatcggcgagaagacggcgctcaagctccttaaagaatgggggtcgttggagaacttgcttaagaatttagatcaggtcaaaccagagtcagtgcgtgagaagattcttgcacacctcgaagacctcaaattaagccgcgaattgtcccgtgtacgcaccgatttgccgctcgaagttgatttccgtggccgccgcgaacctgactgggagggtcttaaagcgtttttagagcgtcttgaatttggttcgctcttgcatgaattcggccttttagaaagcccgttaccagccgaagaagcaccttggccaccgcccgaaggcgcgtttttaggttaccgtttgagtcgcccggaaccgatgtgggccgaattattggctcttgcagcgtctgcccagggacgtgtgtatcgcgcggaagaccctcatggtgcgctccgcggcctcaaagaagtccgtggactccttgccaaagacttagctgttgttgcattgcgcgaaggtcttgatttacctccgactgatgatccaatgcttcttgcgtacctcttggacccgtcaaacacggcgcccgaaggcgtagcccgtcgttacggcggcgagtggaccgaagatgcaggcgagcgcgcgttattggccgaacgtttgcacgccaatttattaggacgtttgcaaggcgaggaacgtctcctctggctttacgaagaagtggagaaaccattgagtcgcgtgctcgcgcatatggaagctaccggtgtcaaattagacgtggcgtatttggaggcactcagccttgaagttgctgccgaaatgcgccgcttggaggaagaagtattccgtttagcaggccactcctttaaccttaattctcgcgatcagttagaacgtgtgttgttcgatgaacttggtctccctcctatcggcaagacagagaagaccggtaaacgtagcacttcagcggcggttttagaagctcttcgcgaagtccatcccattgtggacaagatcttgcagtaccgcgaactcgcgaaattgaaaggcacctatattgaccctcttccggcattagtccacccgaaaacgggacgcctccatacccgcttcaaccaaacagccacggcgaccggtcgtttgtcctcctctgatccaaaccttcagaatattccagtacgtaccccattgggccagaagatccgccgcgcgtttgtagctgaggagggttggcgtttagtggccctcgattatagccaaattgaattacgtgtccttgcccatctttctggcgatgagaacctcatccgcgtgtttcaggaaggcaaagacattcacactcaaacggcaagctggatgtttggattatcagctgaagcgatcgatcctttgatgcgtcgtgcagcgaagaccatcaatttcggtgttctctacggtatgagtgcccatcgtttgtcgcaggaattaggcattccctatgaagaagctgcggcgttcattcagcgctactttcaaagctatcccaaagttaaagcatggatcgagaagactctcgaagaaggccgcacacgtggttacgtagagaccttatttggacgtcgccgctatgttcccgatttaaacgctcgcgtgaaatctgtccgtgaagccgccgaacgcatggcgttcaacatgcctgtacagggcacggcagctgacctcatgaaacttgcaatggtgcgcctttttccacaattgcgtgaagttggtgcccgcatgctcttgcaggtccacgatgaactcttgttagaagcgccaaaagagcgtgcggaagaggtggcagccctcgcgaaagaggttatggaaggcgtgtggcccttagcggtgcctcttgaagtcgaagttggtattggcgaggattggttggctgccaaaggataatga

SEQ ID NO: 998 - protein, 841 aa, synthetic construct
  REGION 1..841: note = Variant of DNA polymerase I from Thermus sp. strain 2.9
MHHHHHHGGSGMLPLFEPKGRVLLVDGHHLAYRNFFALKGLTTSRGEPVQGVYGFAKSLLKALKEDGDVVIVVFDAKAPSFRHEAYEAYKAGRAPTPEDFPRQLALMKELVDLLGLERLEVPGFEADDVLATLAKKAEDEGYEVQILTADRDLFQLLSPRISVLHPEGHRITPEWLWEKYGLRPEQWVDFRALAGDPSDNIPGVKGIGEKTALKLLKEWGSLENLLKNLDQVKPESVREKILAHLEDLKLSRELSRVRTDLPLEVDFRGRREPDWEGLKAFLERLEFGSLLHEFGLLESPLPAEEAPWPPPEGAFLGYRLSRPEPMWAELLALAASAQGRVYRAEDPHGALRGLKEVRGLLAKDLAVVALREGLDLPPTDDPMLLAYLLDPSNTAPEGVARRYGGEWTEDAGERALLAERLHANLLGRLQGEERLLWLYEEVEKPLSRVLAHMEATGVKLDVAYLEALSLEVAAEMRRLEEEVFRLAGHSFNLNSRDQLERVLFDELGLPPIGKTEKTGKRSTSAAVLEALREVHPIVDKILQYRELAKLKGTYIDPLPALVHPKTGRLHTRFNQTATATGRLSSSDPNLQNIPVRTPLGQKIRRAFVAEEGWRLVALDYSQIELRVLAHLSGDENLIRVFQEGKDIHTQTASWMFGLSAEAIDPLMRRAAKTINFGVLYGMSAHRLSQELGIPYEEAAAFIQRYFQSYPKVKAWIEKTLEEGRTRGYVETLFGRRRYVPDLNARVKSVREAAERMAFNMPVQGTAADLMKLAMVRLFPQLREVGARMLLQVHDELLLEAPKERAEEVAALAKEVMEGVWPLAVPLEVEVGIGEDWLAAKG

SEQ ID NO: 999 - DNA, 2529 bp, synthetic construct
  misc_feature 1..2529: note = Variant of DNA polymerase I from Thermus sp. strain 2.9
  source 1..2529: mol_type = other DNA
atgcaccatcatcatcatcatggcggtagcggcatgttaccgttgttcgaacctaaaggtcgcgtgcttctggttgatggccatcatctcgcgtatcgtaacttctttgccctgaaaggattaaccaccagccgtggcgagccggtacagggtgtctacggctttgcaaagtcgctcctgaaagctctgaaagaagacggtgatgtggtgattgttgtctttgatgcgaaagcgccaagttttcgccacgaagcgtacgaagcttacaaagccgggcgtgctccaacgccggaagactttcctcgccaattggcgcttatgaaggaattagtggatttgcttggcctcgaacgcttggaagttcccggtttcgaggcagacgacgtattagcgactctcgcaaagaaagccgaacgtgagggctatgaagtccagatcttgacagcagatcgcgatcttttccagcttttatctccgcgcatctcggtgttacacccggaagggcatcgtatcaccccggaatggctctgggagaaatatggtttgcgtcccgaacaatgggtggattttcgcgccttagcaggcgatccgagcgacaatattccgggagttaaaggtatcggcgagaagacggcgctcaagctccttaaagaatgggggtcgttggagaacttgcttaagaatttagatcaggtcaaaccagagtcagtgcgtgagaagattcttgcacacctcgaagacctcaaattaagccgcgaattgtcccgtgtacgcaccgatttgccgctcgaagttgatttccgtggccgccgcgaacctgactgggagggtcttaaagcgtttttagagcgtcttgaatttggttcgctcttgcatgaattcggccttttagaaagcccgttaccagccgaagaagcaccttggccaccgcccgaaggcgcgtttttaggttaccgtttgagtcgcccggaaccgatgtgggccgaattattggctcttgcagcgtctgcccagggacgtgtgtatcgcgcggaagaccctcatggtgcgctccgcggcctcaaagaagtccgtggactccttgccaaagacttagctgttgttgcattgcgcgaaggtcttgatttacctccgactgatgatccaatgcttcttgcgtacctcttggacccgtcaaacacgacgcccgaaggcgtagcccgtcgttacggcggcgagtggaccgaagatgcagctgagcgcgcgttattggccgaacgtttgcacgccaatttattaggacgtttgcaaggcgaggaacgtctcctctggctttacgaagaagtggagaaaccattgagtcgcgtgctcgcgcatatggaagctaccggtgtcaaattagacgtggcgtatttggaggcactcagccttgaagttgctgccgaaatgcgccgcttggaggaagaagtattccgtttagcaggccactcctttaaccttaattctcgcgatcagttagaacgtgtgttgttcgatgagcttggtctccctcctatcggcaagacagagaagaccggtaaacgtagcacttcagcggcggttttagaagctcttcgcgaagtccatcccattgtggacaagatcttgcagtaccgcgaactcgcgaaattgaaaggcacctatattgaccctcttccggcattagtccacccgaaaacgggacgcctccatacccgcttcaaccaaacagccacggcgaccggtcgtttgtcctcctctgatccaaaccttcagaatattccagtacgtaccccattgggccagaagatccgccgcgcgtttgtagctgaggagggttggcgtttagtggccctcgattatagccaaattgaattacgtgtccttgcccatctttctggcgatgagaacctcatccgcgtgtttcaggaaggcaaagacattcacactcaaacggcaagctggatgtttggattatcagctgaagcgatcgatcctttgatgcgtcgtgcagcgaagaccgttaatttcggtgttctctacggtatgagtgcccatcgtttgtcgcaggaattaggcattccctatgaagaagctgcggcgttcattcagcgctactttcaaagctatcccaaagttaaagcatggatcgagaagactctcgaagaaggccgcacacgtggttacgtagagaccttatttggacgtcgccgctatgttcccgatttaaacgctcgcgtgaaatctgtccgtgaagccgccgaacgcatggcgttcaacatgcctgtacagggcacggcagctgacctcatgaaacttgcaatggtgcgcctttttccacaattgcgtgaagttggtgcccgcatgctcttgcaggtccacgatgaactcttgttagaagcgccaaaagagcgtgcggaagaggtggcagccctcgcgaaagaggttatggaaggcgtgtggcccttagcggtgcctcttgaagtcgaagttggtattggcgaggattggttggctgccaaaggataatga

SEQ ID NO: 1000 - protein, 841 aa, synthetic construct
  REGION 1..841: note = Variant of DNA polymerase I from Thermus sp. strain 2.9
MHHHHHHGGSGMLPLFEPKGRVLLVDGHHLAYRNFFALKGLTTSRGEPVQGVYGFAKSLLKALKEDGDVVIVVFDAKAPSFRHEAYEAYKAGRAPTPEDFPRQLALMKELVDLLGLERLEVPGFEADDVLATLAKKAEREGYEVQILTADRDLFQLLSPRISVLHPEGHRITPEWLWEKYGLRPEQWVDFRALAGDPSDNIPGVKGIGEKTALKLLKEWGSLENLLKNLDQVKPESVREKILAHLEDLKLSRELSRVRTDLPLEVDFRGRREPDWEGLKAFLERLEFGSLLHEFGLLESPLPAEEAPWPPPEGAFLGYRLSRPEPMWAELLALAASAQGRVYRAEDPHGALRGLKEVRGLLAKDLAVVALREGLDLPPTDDPMLLAYLLDPSNTTPEGVARRYGGEWTEDAAERALLAERLHANLLGRLQGEERLLWLYEEVEKPLSRVLAHMEATGVKLDVAYLEALSLEVAAEMRRLEEEVFRLAGHSFNLNSRDQLERVLFDELGLPPIGKTEKTGKRSTSAAVLEALREVHPIVDKILQYRELAKLKGTYIDPLPALVHPKTGRLHTRFNQTATATGRLSSSDPNLQNIPVRTPLGQKIRRAFVAEEGWRLVALDYSQIELRVLAHLSGDENLIRVFQEGKDIHTQTASWMFGLSAEAIDPLMRRAAKTVNFGVLYGMSAHRLSQELGIPYEEAAAFIQRYFQSYPKVKAWIEKTLEEGRTRGYVETLFGRRRYVPDLNARVKSVREAAERMAFNMPVQGTAADLMKLAMVRLFPQLREVGARMLLQVHDELLLEAPKERAEEVAALAKEVMEGVWPLAVPLEVEVGIGEDWLAAKG

SEQ ID NO: 1001 - DNA, 2529 bp, synthetic construct
  misc_feature 1..2529: note = Variant of DNA polymerase I from Thermus sp. strain 2.9
  source 1..2529: mol_type = other DNA
atgcaccatcatcatcatcatggcggtagcggcatgttaccgttgttcgaacctaaaggtcgcgtgcttctggttgatggccatcatctcgcgtatcgtaacttctttgccctgaaaggattaaccaccagccgtggcgagccggtacagggtgtctacggctttgcaaagtcgctcctgaaagctctgaaagaagacggtgatgtggtgattgttgtctttgatgcgaaagcgccaagttttcgccacgaagcgtacgaagcttacaaagccgggcgtgctccaacgccggaagactttcctcgccaattggcgcttatgaaggaattagtggatttgcttggcctcgaacgcttggaagttcccggtttcgaggcagacgacgtattagcgactctcgcaaagaaagccgaacgtgagggctatgaagtccagatcttgacagcagatcgcgatcttttccagcttttatctccgcgcatctcggtgttacacccggaagggcatcgtatcaccccggaatggctctgggagaaatatggtttgcgtcccgaacaatgggtggattttcgcgccttagcaggcgatccgagcgacaatattccgggagttaaaggtatcggcgagaagacggcgctcaagctccttaaagaatgggggtcgttggagaacttgcttaagaatttagatcaggtcaaaccagagtcagtgcgtgagaagattcttgcacacctcgaagacctcaaattaagccgcgaattgtcccgtgtacgcaccgatttgccgctcgaagttgatttccgtggccgccgcgaacctgactgggagggtcttaaagcgtttttagagcgtcttgaatttggttcgctcttgcatgaattcggccttttagaaagcccgttaccagccgaagaagcaccttggccaccgcccgaaggcgcgtttttaggttaccgtttgagtcgcccggaaccgatgtgggccgaattattggctcttgcagcgtctgcccagggacgtgtgtatcgcgcggaagaccctcatggtgcgctccgcggcctcaaagaagtccgtggactccttgccaaagacttagctgttgttgcattgcgcgaaggtcttgatttacctccgactgatgatccaatgcttcttgcgtacctcttggacccgtcaaacacgacgcccgaaggcgtagcccgtcgttacggcggcgagtggaccgaagatgcaggcgagcgcgcgttattggccgaacgtttgcacgccaatttattaggacgtttgcaaggcgaggaacgtctcctctggctttacgaagaagtggagaaaccattgagtcgcgtgctcgcgcatatggaagctaccggtgtcaaattagacgtggcgtatttggaggcactcagccttgaagttgctgccgaaatgcgccgcttggaggaagaagtattccgtttagcaggccactcctttaaccttaattctcgcgatcagttagaacgtgtgttgttcgatgaacttggtctccctcctatcggcaagacagagaagaccggtaaacgtagcacttcagcggcggttttagaagctcttcgcgaagtccatcccattgtggacaagatcttgcagtaccgcgaactcgcgaaattgaaaggcacctatattgaccctcttccggcattagtccacccgaaaacgggacgcctccatacccgcttcaaccaaacagccacggcgaccggtcgtttgtcctcctctgatccaaaccttcagaatattccagtacgtaccccattgggccagaagatccgccgcgcgtttgtagctgaggagggttggcgtttagtggccctcgattatagccaaattgaattacgtgtccttgcccatctttctggcgatgagaacctcatccgcgtgtttcaggaaggcaaagacattcacactcaaacggcaagctggatgtttggattatcagctgaagcgatcgatcctttgatgcgtcgtgcagcgaagaccatcaatttcggtgttctctacggtatgagtgcccatcgtttgtcgcaggaattaggcattccccaggaagaagctgcggcgttcattcagcgctactttcaaagctatcccaaagttaaagcatggatcgagaagactctcgaagaaggccgcacacgtggttacgtagagaccttatttggacgtcgccgctatgttcccgatttaaacgctcgcgtgaaatctgtccgtgaagccgccgaacgcatggcgttcaacatgcctgtacagggcacggcagctgacctcatgaaacttgcaatggtgcgcctttttccacaattgcgtgaagttggtgcccgcatgctcttgcaggtccacgatgaactcttgttagaagcgccaaaagagcgtgcggaagaggtggcagccctcgcgaaagaggttatggaaggcgtgtggcccttagcggtgcctcttgaagtcgaagttggtattggcgaggattggttggctgccaaaggataatga

SEQ ID NO: 1002 - protein, 841 aa, synthetic construct
  REGION 1..841: note = Variant of DNA polymerase I from Thermus sp. strain 2.9
MHHHHHHGGSGMLPLFEPKGRVLLVDGHHLAYRNFFALKGLTTSRGEPVQGVYGFAKSLLKALKEDGDVVIVVFDAKAPSFRHEAYEAYKAGRAPTPEDFPRQLALMKELVDLLGLERLEVPGFEADDVLATLAKKAEREGYEVQILTADRDLFQLLSPRISVLHPEGHRITPEWLWEKYGLRPEQWVDFRALAGDPSDNIPGVKGIGEKTALKLLKEWGSLENLLKNLDQVKPESVREKILAHLEDLKLSRELSRVRTDLPLEVDFRGRREPDWEGLKAFLERLEFGSLLHEFGLLESPLPAEEAPWPPPEGAFLGYRLSRPEPMWAELLALAASAQGRVYRAEDPHGALRGLKEVRGLLAKDLAVVALREGLDLPPTDDPMLLAYLLDPSNTTPEGVARRYGGEWTEDAGERALLAERLHANLLGRLQGEERLLWLYEEVEKPLSRVLAHMEATGVKLDVAYLEALSLEVAAEMRRLEEEVFRLAGHSFNLNSRDQLERVLFDELGLPPIGKTEKTGKRSTSAAVLEALREVHPIVDKILQYRELAKLKGTYIDPLPALVHPKTGRLHTRFNQTATATGRLSSSDPNLQNIPVRTPLGQKIRRAFVAEEGWRLVALDYSQIELRVLAHLSGDENLIRVFQEGKDIHTQTASWMFGLSAEAIDPLMRRAAKTINFGVLYGMSAHRLSQELGIPQEEAAAFIQRYFQSYPKVKAWIEKTLEEGRTRGYVETLFGRRRYVPDLNARVKSVREAAERMAFNMPVQGTAADLMKLAMVRLFPQLREVGARMLLQVHDELLLEAPKERAEEVAALAKEVMEGVWPLAVPLEVEVGIGEDWLAAKG

SEQ ID NO: 1003 - DNA, 2529 bp, synthetic construct
  misc_feature 1..2529: note = Variant of DNA polymerase I from Thermus sp. strain 2.9
  source 1..2529: mol_type = other DNA
atgcaccatcatcatcatcatggcggtagcggcatgttaccgttgttcgaacctaaaggtcgcgtgcttctggttgatggccatcatctcgcgtatcgtaacttctttgccctgaaaggattaaccaccagccgtggcgagccggtacagggtgtctacggctttgcaaagtcgctcctgaaagctctgaaagaagacggtgatgtggtgattgttgtctttgatgcgaaagcgccaagttttcgccacgaagcgtacgaagcttacaaagccgggcgtgctccaacgccggaagactttcctcgccaattggcgcttatgaaggaattagtggatttgcttggcctcgaacgcttggaagttcccggtttcgaggcagacgacgtattagcgactctcgcaaagaaagccgaacgtgagggctatgaagtccagatcttgacagcagatcgcgatcttttccagcttttatctccgcgcatctcggtgttacacccggaagggcatctgatcaccccggaatggctctgggagaaatatggtttgcgtcccgaacaatgggtggattttcgcgccttagccggcgatccgagcgacaatattccgggagttaaaggtatcggcgagaagacggcgctcaagctccttaaagaatgggggtcgttggagaacttgcttaagaatttagatcaggtcaaaccagagtcagtgcgtgagaagattcttgcacacctcgaagacctcaaattaagccgcgaattgtcccgtgtacgcaccgatttgccgctcgaagttgatttccgtggccgccgcgaacctgactgggagggtcttaaagcgtttttagagcgtcttgaatttggttcgctcttgcatgaattcggccttttagaaagcccgttaccagccgaagaagcaccttggccaccgcccgaaggcgcgtttttaggttaccgtttgagtcgcccggaaccgatgtgggccgaattattggctcttgcagcgtctgcccagggacgtgtgtatcgcgcggaagaccctcatggtgcgctccgcggcctcaaagaagtccgtggactccttgccaaagacttagctgttgttgcattgcgcgaaggtcttgatttacctccgactgatgatccaatgcttcttgcgtacctcttggacccgtcaaacacgacgcccgaaggcgtagcccgtcgttacggcggcgagtggaccgaagatgcaggcgagcgcgcgttattggccgaacgtttgcaccagaatttattaggacgtttgcaaggcgaggaacgtctcctctggctttacgaagaagtggagaaaccattgagtcgcgtgctccaccatatggaagctaccggtgtcaaattagacgtggcgtatttggaggcactcagccttgaagttgctgccgaaatgcgccgcttggaggaagaagtattccgtttagcaggccactcctttaaccttaattctcgcgatcagttagaacgtgtgttgttcgatgaacttggtctccctcctatcggcaagacagagaagaccggtaaacgtagcacttcagcggcggttttagaagctcttcgcgaagtccatcccattgtggacaagatcttgcagtaccgcgaactcgcgaaattgaaaggcacctatattgaccgtcttccggcattagtccacccgaaaacgggacgcctccatacccgcttcaaccaaacagccacggcgaccggtcgtttgtcctcctctgatccaaaccttcagaatattccagtacgtaccccattgggccagaagatccgccgcgcgtttgtagctgaggagggttggcgtttagtggccctcgattatagccaaattgaattacgtgtccttgcccatctttctggcgatgagaacctcatccgcgtgtttcaggaaggcaaagacattcacactcaaacggcaagctggatgtttggactgccggcggaagcgatcgatcctttgatgcgtcgtgcagcgaagaccatcaatttcggtgttctctacggtatgagtgcccaccgtttgtcgcaggaattaggcattccctatgaagaagctgcggcgttcattcagcgctactttcaaagctatcccaaagttaaagcatggatcgagaagactctcgaagaaggccgcacacgtggttacgtagagaccttatttggacgtcgccgctatgttcccgatttaaacgctcgcgtgaaatctgtccgtgaagccgccgaacgcatggcgttcaacatgcctgtacagggcacggcagctgacctcatgaaacttgcaatggtgcgcctttttccacaattgcgtgaagttggtgcccgcatgctcttgcaggtccacgatgaactcttgttagaagcgccaaaagagcgtgcggaagaggtggcagccctcgcgaaagaggttatggaaggcgtgtggcccttagcggtgcctcttgaagtcgaagttggtattggcgaggattggttggctgccaaaggataatga

SEQ ID NO: 1004 - protein, 841 aa, synthetic construct
  REGION 1..841: note = Variant of DNA polymerase I from Thermus sp. strain 2.9
MHHHHHHGGSGMLPLFEPKGRVLLVDGHHLAYRNFFALKGLTTSRGEPVQGVYGFAKSLLKALKEDGDVVIVVFDAKAPSFRHEAYEAYKAGRAPTPEDFPRQLALMKELVDLLGLERLEVPGFEADDVLATLAKKAEREGYEVQILTADRDLFQLLSPRISVLHPEGHLITPEWLWEKYGLRPEQWVDFRALAGDPSDNIPGVKGIGEKTALKLLKEWGSLENLLKNLDQVKPESVREKILAHLEDLKLSRELSRVRTDLPLEVDFRGRREPDWEGLKAFLERLEFGSLLHEFGLLESPLPAEEAPWPPPEGAFLGYRLSRPEPMWAELLALAASAQGRVYRAEDPHGALRGLKEVRGLLAKDLAVVALREGLDLPPTDDPMLLAYLLDPSNTTPEGVARRYGGEWTEDAGERALLAERLHQNLLGRLQGEERLLWLYEEVEKPLSRVLHHMEATGVKLDVAYLEALSLEVAAEMRRLEEEVFRLAGHSFNLNSRDQLERVLFDELGLPPIGKTEKTGKRSTSAAVLEALREVHPIVDKILQYRELAKLKGTYIDRLPALVHPKTGRLHTRFNQTATATGRLSSSDPNLQNIPVRTPLGQKIRRAFVAEEGWRLVALDYSQIELRVLAHLSGDENLIRVFQEGKDIHTQTASWMFGLPAEAIDPLMRRAAKTINFGVLYGMSAHRLSQELGIPYEEAAAFIQRYFQSYPKVKAWIEKTLEEGRTRGYVETLFGRRRYVPDLNARVKSVREAAERMAFNMPVQGTAADLMKLAMVRLFPQLREVGARMLLQVHDELLLEAPKERAEEVAALAKEVMEGVWPLAVPLEVEVGIGEDWLAAKG

SEQ ID NO: 1005 - DNA, 2529 bp, synthetic construct
  misc_feature 1..2529: note = Variant of DNA polymerase I from Thermus sp. strain 2.9
  source 1..2529: mol_type = other DNA
atgcaccatcatcatcatcatggcggtagcggcatgttaccgttgttcgaacctaaaggtcgcgtgcttctggttgatggccatcacctcgcgtatcgtaacttctttgccctgaaaggattaaccaccagccgtggcgagccggtacagggtgtctacggctttgcaaagtcgctcctgaaagctctgaaagaagacggtgatgtggtgattgttgtctttgatgcgaaagcgccaagttttcgccacgaagcgtacgaagcttacaaagccgggcgtgctccaacgccggaagactttcctcgccaattggcgcttatgaaggaattagtggatttgcttggcctcgaacgcttggaagttcccggtttcgaggcagacgacgtattagcgactctcgcaaagaaagccgaatcggagggctatgaagtccagatcttgacagcagatcgcgatcttttccagcttttatctccgcgcatctcggtgttacacccggaagggcatcgtatcaccccggaatggctctgggagaaatatggtttgcgtcccgaacaatgggtggattttcgcgccttagcaggcgatccgagcgacaatattccgggagttaaaggtatcggcgagaagacggcgctcaagctccttaaagaatgggggtcgttggagaacttgcttaagaatttagatcaggtcaaaccagagtcagtgcgtgagaagattcttgcacacctcgaagacctcaaattaagccgcgaattgtcccgtgtacgcaccgatttgccgctcgaagttgatttccgtggccgccgcgaacctgactgggagggtcttaaagcgtttttagagcgtcttgaatttggttcgctcttgcatgaattcggccttttagaaagcccgttaccagccgaagaagcaccttggccaccgcccgaaggcgcgtttttaggttaccgtttgagtcgcccggaaccgatgtgggccgaattattggctcttgcagcgtctgcccagggacgtgtgtatcgcgcggaagaccctcatggtgcgctccgcggcctcaaagaagtccgtggactccttgccaaagacttagctgttgttgcattgcgcgaaggtcttgatttacctccgactgatgatccaatgcttcttgcgtacctcttggacccgtcaaacacgacgcccgaaggcgtagcccgtcgttacggcggcgagtggaccgaagatgcaggcgagcgcgcgttattggccgaacgtttgcacgccaatttattaggacgtttgcaaggcgaggaacgtctcctctggctttacgaagaagtggagaaaccattgagtcgcgtgctcgcgcatatggaagctaccggtgtcaaattagacgtggcgtatttggaggcactcagccttgaagttgctgccgaaatgcgccgcttggaggaagaagtattccgtttagcaggccactcctttaaccttaattctcgcgatcagttagaacgtgtgttgttcgatgaacttggtctccctcctatcggcaagacagagaagaccggtaaacgtagcacttcagcggcggttttagaagctcttcgcgaagtccatcccattgtggacaagatcttgcagtaccgcgaactcgcgaaattgaaaggcacctatattgaccctcttccggcattagtccacccgaaaacgggacgcctccatacccgcttcaaccaaacagccacggcgaccggtcgtttgtcctcctctgatccaaaccttcagaatattccagtacgtaccccattgggccagaagatccgccgcgcgtttgtagctgaggagggttggcgtttagtggccctcgattatagccaaattgaattacgtgtccttgcccatctttctggcgatgagaacctcatccgcgtgtttcaggaaggcaaagacattcacactcaaacggcaagctggatgtttggattatcagctgaagcgatcgatcctttgatgcgtcgtgcagcgaagaccatcaatttcggtgttctctacggtatgagtgcccatcgtttgtcgcaggaattaggcattccctatgaagaagctgcggcgttcattcagcgctactttcaaagctatcccaaagttaaagcatggatcgagaagactctcgaagaaggccgcacacgtggttacgtagagaccttatttggacgtcgccgctatgttcccgatttaaacgctcgcgtgaaatctgtccgtgaagccgccgaacgcatggcgttcaacatgcctgtacagggcacggcagctgacctcatgaaacttgcaatggtgcgcctttttccacaattgcgtgaagttggtgcccgcatgctcttgcaggtccacgatgaactcttgttagaagcgccaaaagagcgtgcggaagaggtggcagccctcgcgaaagaggttatggaaggcgtgtggcccttagcggtgcctcttgaagtcgaagttggtattggcgaggattggttggctgccaaaggataatga

SEQ ID NO: 1006 - protein, 841 aa, synthetic construct
  REGION 1..841: note = Variant of DNA polymerase I from Thermus sp. strain 2.9
MHHHHHHGGSGMLPLFEPKGRVLLVDGHHLAYRNFFALKGLTTSRGEPVQGVYGFAKSLLKALKEDGDVVIVVFDAKAPSFRHEAYEAYKAGRAPTPEDFPRQLALMKELVDLLGLERLEVPGFEADDVLATLAKKAESEGYEVQILTADRDLFQLLSPRISVLHPEGHRITPEWLWEKYGLRPEQWVDFRALAGDPSDNIPGVKGIGEKTALKLLKEWGSLENLLKNLDQVKPESVREKILAHLEDLKLSRELSRVRTDLPLEVDFRGRREPDWEGLKAFLERLEFGSLLHEFGLLESPLPAEEAPWPPPEGAFLGYRLSRPEPMWAELLALAASAQGRVYRAEDPHGALRGLKEVRGLLAKDLAVVALREGLDLPPTDDPMLLAYLLDPSNTTPEGVARRYGGEWTEDAGERALLAERLHANLLGRLQGEERLLWLYEEVEKPLSRVLAHMEATGVKLDVAYLEALSLEVAAEMRRLEEEVFRLAGHSFNLNSRDQLERVLFDELGLPPIGKTEKTGKRSTSAAVLEALREVHPIVDKILQYRELAKLKGTYIDPLPALVHPKTGRLHTRFNQTATATGRLSSSDPNLQNIPVRTPLGQKIRRAFVAEEGWRLVALDYSQIELRVLAHLSGDENLIRVFQEGKDIHTQTASWMFGLSAEAIDPLMRRAAKTINFGVLYGMSAHRLSQELGIPYEEAAAFIQRYFQSYPKVKAWIEKTLEEGRTRGYVETLFGRRRYVPDLNARVKSVREAAERMAFNMPVQGTAADLMKLAMVRLFPQLREVGARMLLQVHDELLLEAPKERAEEVAALAKEVMEGVWPLAVPLEVEVGIGEDWLAAKG

SEQ ID NO: 1007 - DNA, 2529 bp, synthetic construct
  misc_feature 1..2529: note = Variant of DNA polymerase I from Thermus sp. strain 2.9
  source 1..2529: mol_type = other DNA
atgcaccatcatcatcatcatggcggtagcggcatgttaccgttgttcgaacctaaaggtcgcgtgcttctggttgatggccatcatctcgcgtatcgtaacttctttgccctgaaaggattaaccaccagccgtggcgagccggtacagggtgtctacggctttgcaaagtcgctcctgaaagctctgaaagaagacggtgatgtggtgattgttgtctttgatgcgaaagcgccaagttttcgccacgaagcgtacgaagcttacaaagccgggcgtgctccaacgccggaagactttcctcgccaattggcgcttatgaaggaattagtggatttgcttggcctcgaacgcttggaagttcccggtttcgaggcagacgacgtattagcgactctcgcaaagaaagccgaacgtgagggctatgaagtccagatcttgacagcagatcgcgatcttttccagcttttatctccgcgcatctcggtgttacacccggaagggcatcgtatcaccccggaatggctctgggagaaatatggtttgcgtcccgaacaatgggtggattttcgcgccttagcaggcgatccgagcgacaatattccgggagttaaaggtatcggcgagaagacggcgctcaagctccttaaagaatgggggtcgttggagaacttgcttaagaatttagatcaggtcaaaccagagtcagtgcgtgagaagattcttgcacacctcgaagacctcaaattaagccgcgaattgtcccgtgtacgcaccgatttgccgctcgaagttgatttccgtggccgccgcgaacctgactgggagggtcttaaagcgtttttagagcgtcttgaatttggttcgctcttgcatgaattcggccttttagaaagcccgttaccagccgaagaagcaccttggccaccgcccgaaggcgcgtttttaggttaccgtttgagtcgcccggaaccgatgtgggccgaattattggctcttgcagcgtctgcccagggacgtgtgtatcgcgcggaagaccctcatggtgcgctccgcggcctcaaagaagtccgtggactccttgccaaagacttagctgttgttgcattgcgcgaaggtcttgatttacctccgactgatgatccaatgcttcttgcgtacctcttggacccgtcaaacacgacgcccgaaggcgtagcccgtcgttacggcggcgagtggaccgaagatgcaggcgagcgcgcgttattggccgaacgtttgcacgccaatttattaggacgtttgcaaggcgaggaacgtctcctctggctttacgaagaagtggagaaaccattgagtcgcgtgctcgcgcatatggaagctaccggtgtcaaattagacgtggcgtatttggaggcactcagccttgaagttgctgccgaaatgcgccgcttggaggaagaagtattccgtttagcaggccactcctttcggcttaattctcgcgatcagttagaacgtgtgttgttcgatgaacttggtctccctcctatcggcaagacagagaagaccggtaaacgtagcacttcagcggcggttttagaagctcttcgcgaagtccatcccattgtggacaagatcttgcagtaccgcgaactcgcgaaattgaaaggcacctatattgaccctcttccggcattagtccacccgaaaacgggacgcctccatacccgcttcaaccaaacagccacggcgaccggtcgtttgtcctcctctgatccaaaccttcagaatattccagtacgtaccccattgggccagaagatccgccgcgcgtttgtagctgaggagggttggcgtttagtggccctcgattatagccaaattgaattacgtgtccttgcccatctttctggcgatgagaacctcatccgcgtgtttcaggaaggcaaagacattcacactcaaacggcaagctggatgtttggattatcagctgaagcgatcgatcctttgatgcgtcgtgcagcgaagaccatcaatttcggtgttctctacggtatgagtgcccatcgtttgtcgcaggaattaggcattccctatgaagaagctgcggcgttcattcagcgctactttcaaagctatcccaaagttaaagcatggatcgagaagactctcgaagaaggccgcacacgtggttacgtagagaccttatttggacgtcgccgctatgttcccgatttaaacgctcgcgtgaaatctgtccgtgaagccgccgaacgcatggcgttcaacatgcctgtacagggcacggcagctgacctcatgaaacttgcaatggtgcgcctttttccacaattgcgtgaagttggtgcccgcatgctcttgcaggtccacgatgaactcttgttagaagcgccaaaagagcgtgcggaagaggtggcagccctcgcgaaagaggttatggaaggcgtgtggcccttagcggtgcctcttgaagtcgaagttggtattggcgaggattggttggctgccaaaggataatga

SEQ ID NO: 1008 - protein, 841 aa, synthetic construct
  REGION 1..841: note = Variant of DNA polymerase I from Thermus sp. strain 2.9
MHHHHHHGGSGMLPLFEPKGRVLLVDGHHLAYRNFFALKGLTTSRGEPVQGVYGFAKSLLKALKEDGDVVIVVFDAKAPSFRHEAYEAYKAGRAPTPEDFPRQLALMKELVDLLGLERLEVPGFEADDVLATLAKKAEREGYEVQILTADRDLFQLLSPRISVLHPEGHRITPEWLWEKYGLRPEQWVDFRALAGDPSDNIPGVKGIGEKTALKLLKEWGSLENLLKNLDQVKPESVREKILAHLEDLKLSRELSRVRTDLPLEVDFRGRREPDWEGLKAFLERLEFGSLLHEFGLLESPLPAEEAPWPPPEGAFLGYRLSRPEPMWAELLALAASAQGRVYRAEDPHGALRGLKEVRGLLAKDLAVVALREGLDLPPTDDPMLLAYLLDPSNTTPEGVARRYGGEWTEDAGERALLAERLHANLLGRLQGEERLLWLYEEVEKPLSRVLAHMEATGVKLDVAYLEALSLEVAAEMRRLEEEVFRLAGHSFRLNSRDQLERVLFDELGLPPIGKTEKTGKRSTSAAVLEALREVHPIVDKILQYRELAKLKGTYIDPLPALVHPKTGRLHTRFNQTATATGRLSSSDPNLQNIPVRTPLGQKIRRAFVAEEGWRLVALDYSQIELRVLAHLSGDENLIRVFQEGKDIHTQTASWMFGLSAEAIDPLMRRAAKTINFGVLYGMSAHRLSQELGIPYEEAAAFIQRYFQSYPKVKAWIEKTLEEGRTRGYVETLFGRRRYVPDLNARVKSVREAAERMAFNMPVQGTAADLMKLAMVRLFPQLREVGARMLLQVHDELLLEAPKERAEEVAALAKEVMEGVWPLAVPLEVEVGIGEDWLAAKG

SEQ ID NO: 1009 - DNA, 2529 bp, synthetic construct
  misc_feature 1..2529: note = Variant of DNA polymerase I from Thermus sp. strain 2.9
  source 1..2529: mol_type = other DNA
atgcaccatcatcatcatcatggcggtagcggcatgttaccgttgttcgaacctaaaggtcgcgtgcttctggttgatggccatcatctcgcgtatcgtaacttctttgccctgaaaggattaaccaccagccgtggcgagccggtacagggtgtctacggctttgcaaagtcgctcctgaaagctctgaaagaagacggtgatgtggtgattgttgtctttgatgcgaaagcgccaagttttcgccacgaagcgtacgaagcttacaaagccgggcgtgctccaacgccggaagactttcctcgccaattggcgcttatgaaggaattagtggatttgcttggcctcgaacgcttggaagttcccggtttcgaggcagacgacgtattagcgactctcgcaaagaaagccgaacgtgagggctatgaagtccagatcttgacagcagatcgcgatcttttccagcttttatctccgcgcatctcggtgttacacccggaagggcatcgtatcaccccggaatggctctgggagaaatatggtttgcgtcccgaacaatgggtggattttcgcgccttagcaggcgatccgagcgacaatattccgggagttaaaggtatcggcgagaagacggcgctcaagctccttaaagaatgggggtcgttggagaacttgcttaagaatttagatcaggtcaaaccagagtcagtgcgtgagaagattcttgcacacctcgaagacctcaaattaagccgcgaattgtcccgtgtacgcaccgatttgccgctcgaagttgatttccgtggccgccgcgaacctgactgggagggtcttaaagcgtttttagagcgtcttgaatttggttcgctcttgcatgaattcggccttttagaaagcccgttaccagccgaagaagcaccttggccaccgcccgaaggcgcgtttttaggttaccgtttgagtcgcccggaaccgatgtgggccgaattattggctcttgcagcgtctgcccagggacgtgtgtatcgcgcgccggaccctcatggtgcgctccgcggcctcaaagaagtccgtggactccttgccaaagacttagctgttgttgcattgcgcgaaggtcttgatttacctccgactgatgatccaatgcttcttgcgtacctcttggacccgtcaaacacgacgcccgaaggcgtagcccgtcgttacggcggcgagtggaccgaagatgcaggcgagcgcgcgttattggccgaacgtttgcacgccaatttattaggacgtttgcaaggcgaggaacgtctcctctggctttacgaagaagtggagaaaccattgagtcgcgtgctcgcgcatatggaagctaccggtgtcaaattagacgtggcgtatttggaggcactcagccttgaagttgctgccgaaatgcgccgcttggaggaagaagtattccgtttagcaggccactcctttaaccttaattctcgcgatcagttagaacgtgtgttgttcgatgaacttggtctccctcctatcggcaagacagagaagaccggtaaacgtagcacttcagcggcggttttagaagctcttcgcgaagtccatcccattgtggacaagatcttgcagtaccgcgaactcgcgaaattgaaaggcacctatattgaccctcttccggcattagtccacccgaaaacgggacgcctccatacccgcttcaaccaaacagccacggcgaccggtcgtttgtcctcctctgatccaaaccttcagaatattccagtacgtaccccattgggccagaagatccgccgcgcgtttgtagctgaggagggttggcgtttagtggccctcgattatagccaaattgaattacgtgtccttgcccatctttctggcgatgagaacctcatccgcgtgtttcaggaaggcaaagacattcacactcaaacggcaagctggatgtttggattatcagctgaagcgatcgatcctttgatgcgtcgtgcagcgaagaccatcaatttcggtgttctctacggtatgagtgcccatcgtttgtcgcaggaattaggcattccctatgaagaagctgcggcgttcattcagcgctactttcaaagctatcccaaagttaaagcatggatcgagaagactctcgaagaaggccgcacacgtggttacgtagagaccttatttggacgtcgccgctatgttcccgatttaaacgctcgcgtgaaatctgtccgtgaagccgccgaacgcatggcgttcaacatgcctgtacagggcacggcagctgacctcatgaaacttgcaatggtgcgcctttttccacaattgcgtgaagttggtgcccgcatgctcttgcaggtccacgatgaactcttgttagaagcgccaaaagagcgtgcggaagaggtggcagccctcgcgaaagaggttatggaaggcgtgtggcccttagcggtgcctcttgaagtcgaagttggtattggcgaggattggttggctgccaaaggataatga

SEQ ID NO: 1010 - protein, 841 aa, synthetic construct
  REGION 1..841: note = Variant of DNA polymerase I from Thermus sp. strain 2.9
MHHHHHHGGSGMLPLFEPKGRVLLVDGHHLAYRNFFALKGLTTSRGEPVQGVYGFAKSLLKALKEDGDVVIVVFDAKAPSFRHEAYEAYKAGRAPTPEDFPRQLALMKELVDLLGLERLEVPGFEADDVLATLAKKAEREGYEVQILTADRDLFQLLSPRISVLHPEGHRITPEWLWEKYGLRPEQWVDFRALAGDPSDNIPGVKGIGEKTALKLLKEWGSLENLLKNLDQVKPESVREKILAHLEDLKLSRELSRVRTDLPLEVDFRGRREPDWEGLKAFLERLEFGSLLHEFGLLESPLPAEEAPWPPPEGAFLGYRLSRPEPMWAELLALAASAQGRVYRAPDPHGALRGLKEVRGLLAKDLAVVALREGLDLPPTDDPMLLAYLLDPSNTTPEGVARRYGGEWTEDAGERALLAERLHANLLGRLQGEERLLWLYEEVEKPLSRVLAHMEATGVKLDVAYLEALSLEVAAEMRRLEEEVFRLAGHSFNLNSRDQLERVLFDELGLPPIGKTEKTGKRSTSAAVLEALREVHPIVDKILQYRELAKLKGTYIDPLPALVHPKTGRLHTRFNQTATATGRLSSSDPNLQNIPVRTPLGQKIRRAFVAEEGWRLVALDYSQIELRVLAHLSGDENLIRVFQEGKDIHTQTASWMFGLSAEAIDPLMRRAAKTINFGVLYGMSAHRLSQELGIPYEEAAAFIQRYFQSYPKVKAWIEKTLEEGRTRGYVETLFGRRRYVPDLNARVKSVREAAERMAFNMPVQGTAADLMKLAMVRLFPQLREVGARMLLQVHDELLLEAPKERAEEVAALAKEVMEGVWPLAVPLEVEVGIGEDWLAAKG

SEQ ID NO: 1011 - DNA, 2529 bp, synthetic construct
  misc_feature 1..2529: note = Variant of DNA polymerase I from Thermus sp. strain 2.9
  source 1..2529: mol_type = other DNA
atgcaccatcatcatcatcatggcggtagcggcatgttaccgttgttcgaacctaaaggtcgcgtgcttctggttgatggccatcatctcgcgtatcgtaacttctttgccctgaaaggattaaccaccagccgtggcgagccggtacagggtgtctacggctttgcaaagtcgctcctgaaagctctgaaagaagacggtgatgtggtgattgttgtctttgatgcgaaagcgccaagttttcgccacgaagcgtacgaagcttacaaagccgggcgtgctccaacgccggaagactttcctcgccaattggcgcttatgaaggaattagtggatttgcttggcctcgaacgcttggaagttcccggtttcgaggcagacgacgtattagcgactctcgcaaagaaagccgaacgtgagggctatgaagtccagatcttgacagcagatcgcgatcttttccagcttttatctccgcgcatctcggtgttacacccggaagggcatcgtatcaccccggaatggctctgggagaaatatggtttgcgtcccgaacaatgggtggattttcgcgccttagcaggcgatccgagcgacaatattccgggagttaaaggtatcggcgagaagacggcgctcaagctccttaaagaatgggggtcgattgagaacttgcttaagaatttagatcaggtcaaaccagagtcagtgcgtgagaagattcttgcacacctcgaagacctcaaattaagccgcgaattgtcccgtgtacgcaccgatttgccgctcgaagttgatttccgtggccgccgcgaacctgactgggagggtcttaaagcgtttttagagcgtcttgaatttggttcgctcttgcatgaattcggccttttagaaagcccgttaccagccgaagaagcaccttggccaccgcccgaaggcgcgtttttaggttaccgtttgagtcgcccggaaccgatgtgggccgaattattggctcttgcagcgtctgcccagggacgtgtgtatcgcgcggaagaccctcatggtgcgctccgcggcctcaaagaagtccgtggactccttgccaaagacttagctgttgttgcattgcgcgaaggtcttgatttacctccgactgatgatccaatgcttcttgcgtacctcttggacccgtcaaacacgacgcccgaaggcgtagcccgtcgttacggcggcgagtggaccgaagatgcaggcgagcgcgcgttattggccgaacgtttgcacgccaatttattaggacgtttgcaaggcgaggaacgtctcctctggctttacgaagaagtggagaaaccattgagtcgcgtgctcgcgcatatggaagctaccggtgtcaaattagacgtggcgtatttggaggcactcagccttgaagttgctgccgaaatgcgccgcttggaggaagaagtattccgtttagcaggccactcctttaaccttaattctcgcgatcagttagaacgtgtgttgttcgatgaacttggtctccctcctatcggcaagacagagaagaccggtaaacgtagcacttcagcggcggttttagaagctcttcgcgaagtccatcccattgtggacaagatcttgcagtaccgcgaactcgcgaaattgaaaggcacctatattgaccctcttccggcattagtccacccgaaaacgggacgcctccatacccgcttcaaccaaacagccacggcgaccggtcgtttgtcctcctctgatccaaaccttcagaatattccagtacgtaccccattgggccagaagatccgccgcgcgtttgtagctgaggagggttggcgtttagtggccctcgattatagccaaattgaattacgtgtccttgcccatctttctggcgatgagaacctcatccgcgtgtttcaggaaggcaaagacattcacactcaaacggcaagctggatgtttggattatcagctgaagcgatcgatcctttgatgcgtcgtgcagcgaagaccatcaatttcggtgttctctacggtatgagtgcccatcgtttgtcgcaggaattaggcattccctatgaagaagctgcggcgttcattcagcgctactttcaaagctatcccaaagttaaagcatggatcgagaagactctcgaagaaggccgcacacgtggttacgtagagaccttatttggacgtcgccgctatgttcccgatttaaacgctcgcgtgaaatctgtccgtgaagccgccgaacgcatggcgttcaacatgcctgtacagggcacggcagctgacctcatgaaacttgcaatggtgcgcctttttccacaattgcgtgaagttggtgcccgcatgctcttgcaggtccacgatgaactcttgttagaagcgccaaaagagcgtgcggaagaggtggcagccctcgcgaaagaggttatggaaggcgtgtggcccttagcggtgcctcttgaagtcgaagttggtattggcgaggattggttggctgccaaaggataatga

SEQ ID NO: 1012 - protein, 841 aa, synthetic construct
  REGION 1..841: note = Variant of DNA polymerase I from Thermus sp. strain 2.9
MHHHHHHGGSGMLPLFEPKGRVLLVDGHHLAYRNFFALKGLTTSRGEPVQGVYGFAKSLLKALKEDGDVVIVVFDAKAPSFRHEAYEAYKAGRAPTPEDFPRQLALMKELVDLLGLERLEVPGFEADDVLATLAKKAEREGYEVQILTADRDLFQLLSPRISVLHPEGHRITPEWLWEKYGLRPEQWVDFRALAGDPSDNIPGVKGIGEKTALKLLKEWGSIENLLKNLDQVKPESVREKILAHLEDLKLSRELSRVRTDLPLEVDFRGRREPDWEGLKAFLERLEFGSLLHEFGLLESPLPAEEAPWPPPEGAFLGYRLSRPEPMWAELLALAASAQGRVYRAEDPHGALRGLKEVRGLLAKDLAVVALREGLDLPPTDDPMLLAYLLDPSNTTPEGVARRYGGEWTEDAGERALLAERLHANLLGRLQGEERLLWLYEEVEKPLSRVLAHMEATGVKLDVAYLEALSLEVAAEMRRLEEEVFRLAGHSFNLNSRDQLERVLFDELGLPPIGKTEKTGKRSTSAAVLEALREVHPIVDKILQYRELAKLKGTYIDPLPALVHPKTGRLHTRFNQTATATGRLSSSDPNLQNIPVRTPLGQKIRRAFVAEEGWRLVALDYSQIELRVLAHLSGDENLIRVFQEGKDIHTQTASWMFGLSAEAIDPLMRRAAKTINFGVLYGMSAHRLSQELGIPYEEAAAFIQRYFQSYPKVKAWIEKTLEEGRTRGYVETLFGRRRYVPDLNARVKSVREAAERMAFNMPVQGTAADLMKLAMVRLFPQLREVGARMLLQVHDELLLEAPKERAEEVAALAKEVMEGVWPLAVPLEVEVGIGEDWLAAKG

SEQ ID NO: 1013 - DNA, 2529 bp, synthetic construct
  misc_feature 1..2529: note = Variant of DNA polymerase I from Thermus sp. strain 2.9
  source 1..2529: mol_type = other DNA
atgcaccatcatcatcatcatggcggtagcggcatgttaccgttgttcgaacctaaaggtcgcgtgcttctggttgatggccatcatctcgcgtatcgtaacttctttgccctgaaaggattaaccaccagccgtggcgagccggtacagggtgtctacggctttgcaaagtcgctcctgaaagctctgaaagaagacggtgatgtggtgattgttgtctttgatgcgaaagcgccaagttttcgccacgaagcgtacgaagcttacaaagccgggcgtgctccaacgccggaagactttcctcgccaattggcgcttatgaaggaattagtggatttgcttggcctcgaacgcttggaagttcccggtttcgaggcagacgacgtattagcgactctcgcaaagaaagccgaacgtgagggctatgaagtccagatcttgacagcagatcgcgatcttttccagcttttatctccgcgcatctcggtgttacacccggaagggcatcgtatcaccccggaatggctctgggagaaatatggtttgcgtcccgaacaatgggtggattttcgcgccttagcaggcgatccgagcgacaatattccgggagttaaaggtatcggcgagaagacggcgctcaagctccttaaagaatgggggtcgttggagaacttgcttaagaatttagatcaggtcaaaccagagtcagtgcgtgagaagattcttgcacacctcgaagacctcaaattaagccgcgaattgtcccgtgtacgcaccgatttgccgctcgaagttgatttccgtggccgccgcgaacctgactgggagggtcttaaagcgtttttagagcgtcttgaatttggttcgctcttgcatgaattcggccttttagaaagcccgttaccagccgaagaagcaccttggccaccgcccgaaggcgcgtttttaggttaccgtttgagtcgcccggaaccgatgtgggccgaattattggctcttgcagcgtctgcccagggacgtgtgtatcgcgcggaagaccctcatggtgcgctccgcggcctcaaagaagtccgtggactccttgccaaagacttagctgttgttgcattgcgcgaaggtcttgatttacctccgactgatgatccaatgcttcttgcgtacctcttggacccgtcaaacacgacgcccgaaggcgtagcccgtcgttacggcggcgagtggaccgaagatgcaggcgagcgcgcgttattggccgaacgtttgcacgccaatttattaggacgtttgcaaggcgaggaacgtctcctctggctttacgaagaagtggagaaaccattgagtcgcgtgctcgcgcatatggaagctaccggtgtcaaattagacgtggcgtatttggaggcactcagcgtggaagttgctgccgaaatgcgccgcttggaggaagaagtattccgtttagcaggccactcctttaaccttaattctcgcgatcagttagaacgtgtgttgttcgatgaacttggtctccctcctatcggcaagacagagaagaccggtaaacgtagcacttcagcggcggttttagaagctcttcgcgaagtccatcccattgtggacaagatcttgcagtaccgcgaactcgcgaaattgaaaggcacctatattgaccctcttccggcattagtccacccgaaaacgggacgcctccatacccgcttcaaccaaacagccacggcgaccggtcgtttgtcctcctctgatccaaaccttcagaatattccagtacgtaccccattgggccagaagatccgccgcgcgtttgtagctgaggagggttggcgtttagtggccctcgattatagccaaattgaattacgtgtccttgcccatctttctggcgatgagaacctcatccgcgtgtttcaggaaggcaaagacattcacactcaaacggcaagctggatgtttggattatcagctgaagcgatcgatcctttgatgcgtcgtgcagcgaagaccatcaatttcggtgttctctacggtatgagtgcccatcgtttgtcgcaggaattaggcattccctatgaagaagctgcggcgttcattcagcgctactttcaaagctatcccaaagttaaagcatggatcgagaagactctcgaagaaggccgcacacgtggttacgtagagaccttatttggacgtcgccgctatgttcccgatttaaacgctcgcgtgaaatctgtccgtgaagccgccgaacgcatggcgttcaacatgcctgtacagggcacggcagctgacctcatgaaacttgcaatggtgcgcctttttccacaattgcgtgaagttggtgcccgcatgctcttgcaggtccacgatgaactcttgttagaagcgccaaaagagcgtgcggaagaggtggcagccctcgcgaaagaggttatggaaggcgtgtggcccttagcggtgcctcttgaagtcgaagttggtattggcgaggattggttggctgccaaaggataatga

SEQ ID NO: 1014 - protein, 841 aa, synthetic construct
  REGION 1..841: note = Variant of DNA polymerase I from Thermus sp. strain 2.9
MHHHHHHGGSGMLPLFEPKGRVLLVDGHHLAYRNFFALKGLTTSRGEPVQGVYGFAKSLLKALKEDGDVVIVVFDAKAPSFRHEAYEAYKAGRAPTPEDFPRQLALMKELVDLLGLERLEVPGFEADDVLATLAKKAEREGYEVQILTADRDLFQLLSPRISVLHPEGHRITPEWLWEKYGLRPEQWVDFRALAGDPSDNIPGVKGIGEKTALKLLKEWGSLENLLKNLDQVKPESVREKILAHLEDLKLSRELSRVRTDLPLEVDFRGRREPDWEGLKAFLERLEFGSLLHEFGLLESPLPAEEAPWPPPEGAFLGYRLSRPEPMWAELLALAASAQGRVYRAEDPHGALRGLKEVRGLLAKDLAVVALREGLDLPPTDDPMLLAYLLDPSNTTPEGVARRYGGEWTEDAGERALLAERLHANLLGRLQGEERLLWLYEEVEKPLSRVLAHMEATGVKLDVAYLEALSVEVAAEMRRLEEEVFRLAGHSFNLNSRDQLERVLFDELGLPPIGKTEKTGKRSTSAAVLEALREVHPIVDKILQYRELAKLKGTYIDPLPALVHPKTGRLHTRFNQTATATGRLSSSDPNLQNIPVRTPLGQKIRRAFVAEEGWRLVALDYSQIELRVLAHLSGDENLIRVFQEGKDIHTQTASWMFGLSAEAIDPLMRRAAKTINFGVLYGMSAHRLSQELGIPYEEAAAFIQRYFQSYPKVKAWIEKTLEEGRTRGYVETLFGRRRYVPDLNARVKSVREAAERMAFNMPVQGTAADLMKLAMVRLFPQLREVGARMLLQVHDELLLEAPKERAEEVAALAKEVMEGVWPLAVPLEVEVGIGEDWLAAKG

SEQ ID NO: 1015 - DNA, 2529 bp, synthetic construct
  misc_feature 1..2529: note = Variant of DNA polymerase I from Thermus sp. strain 2.9
  source 1..2529: mol_type = other DNA
atgcaccatcatcatcatcatggcggtagcggcatgttaccgttgttcgaacctaaaggtcgcgtgcttctggttgatggccatcatctcgcgtatcgtaacttctttgccctgaaaggattaaccaccagccgtggcgagccggtacagggtgtctacggctttgcaaagtcgctcctgaaagctctgaaagaagacggtgatgtggtgattgttgtctttgatgcgaaagcgccaagttttcgccacgaagcgtacgaagcttacaaagccgggcgtgctccaacgccggaagactttcctcgccaattggcgcttatgaaggaattagtggatttgcttggcctcgaacgcttggaagttcccggtttcgaggcagacgacgtattagcgactctcgcaaagaaagccgaacgtgagggctatgaagtccagatcttgacagcagatcgcgatcttttccagcttttatctccgcgcatctcggtgttacacccggaagggcatcgtatcaccccggaatggctctgggagaaatatggtttgcgtcccgaacaatgggtggattttcgcgccttagcaggcgatccgagcgacaatattccgggagttaaaggtatcggcgagaagacggcgctcaagctccttaaagaatgggggtcgttggagaacttgcttaagaatttagatcaggtcaaaccagagtcagtgcgtgagaagattcttgcacacctcgaagacctcaaattaagccgcgaattgtcccgtgtacgcaccgatttgccgctcgaagttgatttccgtggccgccgcgaacctgactgggagggtcttaaagcgtttttagagcgtcttgaatttggttcgctcttgcatgaattcggccttttagaaagcccgttaccagccgaagaagcaccttggccaccgcccgaaggcgcgtttttaggttaccgtttgagtcgcccggaaccgatgtgggccgaattattggctcttgcagcgtctgcccagggacgtgtgtatcgcgcggaagaccctcatggtgcgctccgcggcctcaaagaagtccgtggactccttgccaaagacttagctgttgttgcattgcgcgaaggtcttgatttacctccgactgatgatccaatgcttcttgcgtacctcttggacccgtcaaacacgacgcccgaaggcgtagcccgtcgttacggcggcgagtggaccgaagatgcagctgagcgcgcgttattggccgaacgtttgcacgccaatttattaggacgtttgcaaggcgaggaacgtctcctctggctttacgaagaagtggagaaaccattgagtcgcgtgctcgcgcatatggaagctaccggtgtcaaattagacgtggcgtatttggaggctctcagccttgaagttgctgccgaaatgcgccgcttggaggaagaagtattccgtttagcaggccactcctttaaccttaattctcgcgatcagttagaacgtgtgttgttcgatgagcttggtctccctcctatcggcaagacagagaagaccggtaaacgtagcacttcagcggcggttttagaagctcttcgcgaagtccatcccattgtggacaagatcttgcagtaccgcgaactcgcgaaattgaaaggcacctatattgaccctcttccggcattagtccacccgaaaacgggacgcctccatacccgcttcaaccaaacagccacggcgaccggtcgtttgtcctcctctgatccaaaccttcagaatattccagtacgtaccccattgggccagaagatccgccgcgcgtttgtagctgaggagggttggcgtttagtggccctcgattatagccaaattgaattacgtgtccttgcccatctttctggcgatgagaacctcatccgcgtgtttcaggaaggcaaagacattcacactcaaacggcaagctggatgtttggattatcaccagaagcgatcgatcctttgatgcgtcgtgcagcgaagaccatcaatttcggtgttctctacggtatgagtgcccatcgtttgtcgcaggaattaggcattccctatgaagaagctgcggcgttcattcagcgctactttcaaagctatcccaaagttaaagcatggatcgagaagactctcgaagaaggccgcacacgtggttacgtagagaccttatttggacgtcgccgctatgttcccgatttaaacgctcgcgtgaaatctgtccgtgaagccgccgaacgcatggcgttcaacatgcctgtacagggcacggcagctgacctcatgaaacttgcaatggtgcgcctttttccacaattgcgtgaagttggtgcccgcatgctcttgcaggtccacgatgaactcttgttagaagcgccaaaagagcgtgcggaagaggtggcagccctcgcgaaagaggttatggaaggcgtgtggcccttagcggtgcctcttgaagtcgaagttggtattggcgaggattggttggctgccaaaggataatga

SEQ ID NO: 1016 - protein, 841 aa, synthetic construct
  REGION 1..841: note = Variant of DNA polymerase I from Thermus sp. strain 2.9
MHHHHHHGGSGMLPLFEPKGRVLLVDGHHLAYRNFFALKGLTTSRGEPVQGVYGFAKSLLKALKEDGDVVIVVFDAKAPSFRHEAYEAYKAGRAPTPEDFPRQLALMKELVDLLGLERLEVPGFEADDVLATLAKKAEREGYEVQILTADRDLFQLLSPRISVLHPEGHRITPEWLWEKYGLRPEQWVDFRALAGDPSDNIPGVKGIGEKTALKLLKEWGSLENLLKNLDQVKPESVREKILAHLEDLKLSRELSRVRTDLPLEVDFRGRREPDWEGLKAFLERLEFGSLLHEFGLLESPLPAEEAPWPPPEGAFLGYRLSRPEPMWAELLALAASAQGRVYRAEDPHGALRGLKEVRGLLAKDLAVVALREGLDLPPTDDPMLLAYLLDPSNTTPEGVARRYGGEWTEDAAERALLAERLHANLLGRLQGEERLLWLYEEVEKPLSRVLAHMEATGVKLDVAYLEALSLEVAAEMRRLEEEVFRLAGHSFNLNSRDQLERVLFDELGLPPIGKTEKTGKRSTSAAVLEALREVHPIVDKILQYRELAKLKGTYIDPLPALVHPKTGRLHTRFNQTATATGRLSSSDPNLQNIPVRTPLGQKIRRAFVAEEGWRLVALDYSQIELRVLAHLSGDENLIRVFQEGKDIHTQTASWMFGLSPEAIDPLMRRAAKTINFGVLYGMSAHRLSQELGIPYEEAAAFIQRYFQSYPKVKAWIEKTLEEGRTRGYVETLFGRRRYVPDLNARVKSVREAAERMAFNMPVQGTAADLMKLAMVRLFPQLREVGARMLLQVHDELLLEAPKERAEEVAALAKEVMEGVWPLAVPLEVEVGIGEDWLAAKG

SEQ ID NO: 1017 - DNA, 2529 bp, synthetic construct
  misc_feature 1..2529: note = Variant of DNA polymerase I from Thermus sp. strain 2.9
  source 1..2529: mol_type = other DNA
atgcaccatcatcatcatcatggcggtagcggcatgttaccgttgttcgaacctaaaggtcgcgtgcttctggttgatggccatcatctcgcgtatcgtaacttctttgccctgaaaggattaaccaccagccgtggcgagccggtacagggtgtctacggctttgcaaagtcgctcctgaaagctctgaaagaagacggtgatgtggtgattgttgtctttgatgcgaaagcgccaagttttcgccacgaagcgtacgaagcttacaaagccgggcgtgctccaacgccggaagactttcctcgccaattggcgcttatgaaggaattagtggatttgcttggcctcgaacgcttggaagttcccggtttcgaggcagacgacgtattagcgactctcgcaaagaaagccgaacgtgagggctatgaagtccagatcttgacagcagatcgcgatcttttccagcttttatctccgcgcatctcggtgttacacccggaagggcatcgtatcaccccggaatggctctgggagaaatatggtttgcgtcccgaacaatgggtggattttcgcgccttagcaggcgatccgagcgacaatattccgggagttaaaggtatcggcgagaagacggcgctcaagctccttaaagaatgggggtcgttggagaacttgcttaagaatttagatcaggtcaaaccagagtcagtgcgtgagaagattcttgcacacctcgaagacctcaaattaagcctggaattgtcccgtgtacgcaccgatttgccgctcgaagttgatttccgtggtcgccgcgaacctgactgggagggtcttaaagcgtttttagagcgtcttgaatttggttcgctcttgcatgaattcggccttttagaaagcccgttaccagccgaagaagcaccttggccaccgcccgaaggcgcgtttttaggttaccgtttgagtcgcccggaaccgatgtgggccgaattatcggctcttgcagcgtctgcccaggggcgtgtgtatcgcgcggaagaccctcatggtgcgctccgcggcctcaaagaagtccgtggactccttgccaaagacttagctgttgttgcattgcgcgaaggtcttgatttacctccgactgatgatccaatgcttcttgcgtacctcttggacccgtcaaacacgacgcccgaaggcgtagcccgtcgttacggcggcgagtggaccgaagatgcaggcgagcgcgcgttattggccgaacgtttgcacgccaatttattaggacgtttgcaaggcgaggaacgtctcctctggctttacgaagaagtggagaaaccattgagtcgcgtgctcgcgcatatggaagctaccggtgtcaaattagacgtggcgtatttggaggctctcagccttgaagttgctgccgaaatgcgccgcttggaggaagaagtattccgtttagcaggccactcctttaaccttaattctcgcgatcagttagaacgtgtgttgttcgatgagcttggtctccctcctatcggcaagacagagaagaccggtaaacgtagcacttcagcggcggttttagaagctcttcgcgaagtccatcccattgtggacaagatcttgcagtaccgcgaactcgcgaaattgaaaggcacctatattgaccctcttccggcattagtccacccgaaaacgggacgcctccatacccgcttcaaccaaacagccacggcgaccggtcgtttgtcctcctctgatccaaaccttcagaatattccagtacgtaccccattgggccagaagatccgccgcgcgtttgtagctgaggagggttggcgtttagtggccctcgattatagccaaattgaattacgtgtccttgcccatctttctggcgatgagaacctcatccgcgtgtttcaggaaggcaaagacattcacactcaaacggcaagctggatgtttggattatcagcagaagcgatcgatcctttgatgcgtcgtgcagcgaagaccattaatttcggtgttctctacggtatgagtgcccatcgtttgtcgcaggaattaggcattccctatgaagaagctgccgcgttcattcagcgctactttcaaagctatcccaaagttaaagcatggatcgagaagactctcgaagaaggccgcacacgtggttacgtagagaccttatttggacgtcgccgctatgttcccgatttaaacgctcgcgtgaaatctgtccgtgaagccgccgaacgcatggcgttcaacatgcctgtacagggcacggcagctgacctcatgaaacttgcaatggtgcgcctttttccacaattgcgtgaagttggtgcccgcatgctcttgcaggtccacgatgaactcttgttagaagcgccaaaagagcgtgcggaagaggtggcagccctcgcgaaagaggttatggaaggcgtgtggcccttagcggtgcctcttgaagtcgaagttggtattggcgaggattggttggctgccaaaggataatga

SEQ ID NO: 1018 - protein, 841 aa, synthetic construct
  REGION 1..841: note = Variant of DNA polymerase I from Thermus sp. strain 2.9
MHHHHHHGGSGMLPLFEPKGRVLLVDGHHLAYRNFFALKGLTTSRGEPVQGVYGFAKSLLKALKEDGDVVIVVFDAKAPSFRHEAYEAYKAGRAPTPEDFPRQLALMKELVDLLGLERLEVPGFEADDVLATLAKKAEREGYEVQILTADRDLFQLLSPRISVLHPEGHRITPEWLWEKYGLRPEQWVDFRALAGDPSDNIPGVKGIGEKTALKLLKEWGSLENLLKNLDQVKPESVREKILAHLEDLKLSLELSRVRTDLPLEVDFRGRREPDWEGLKAFLERLEFGSLLHEFGLLESPLPAEEAPWPPPEGAFLGYRLSRPEPMWAELSALAASAQGRVYRAEDPHGALRGLKEVRGLLAKDLAVVALREGLDLPPTDDPMLLAYLLDPSNTTPEGVARRYGGEWTEDAGERALLAERLHANLLGRLQGEERLLWLYEEVEKPLSRVLAHMEATGVKLDVAYLEALSLEVAAEMRRLEEEVFRLAGHSFNLNSRDQLERVLFDELGLPPIGKTEKTGKRSTSAAVLEALREVHPIVDKILQYRELAKLKGTYIDPLPALVHPKTGRLHTRFNQTATATGRLSSSDPNLQNIPVRTPLGQKIRRAFVAEEGWRLVALDYSQIELRVLAHLSGDENLIRVFQEGKDIHTQTASWMFGLSAEAIDPLMRRAAKTINFGVLYGMSAHRLSQELGIPYEEAAAFIQRYFQSYPKVKAWIEKTLEEGRTRGYVETLFGRRRYVPDLNARVKSVREAAERMAFNMPVQGTAADLMKLAMVRLFPQLREVGARMLLQVHDELLLEAPKERAEEVAALAKEVMEGVWPLAVPLEVEVGIGEDWLAAKG

SEQ ID NO: 1019 - DNA, 2529 bp, synthetic construct
  misc_feature 1..2529: note = Variant of DNA polymerase I from Thermus sp. strain 2.9
  source 1..2529: mol_type = other DNA
atgcaccatcatcatcatcatggcggtagcggcatgttaccggtgttcgaacctaaaggtcgcgtgcttctggttgatggccatcatctcgcgtatcgtaacttctttgccctgaaaggattaaccaccagccgtggcgagccggtacagggtgtctacggctttgcaaagtcgctcctgaaagctctgaaagaagacggtgatgtggtgattgttgtctttgatgcgaaagcgccaagttttcgccacgaagcgtacgaagcttacaaagccgggcgtgctccaacgccggaagactttcctcgccaattggcgcttatgaaggaattagtggatttgcttggcctcgaacgcttggaagttcccggtttcgaggcagacgacgtattagcgactctcgcaaagaaagccgaacgtgagggctatgaagtccagatcttgacagcagatcgcgatcttttccagcttttatctccgcgcatctcggtgttacacccggaagggcatcgtatcaccccggaatggctctgggagaaatatggtttgcgtcccgaacaatgggtggattttcgcgccttagcaggcgatccgagcgacaatattccgggagttaaaggtatcggcgagaagacggcgctcaagctccttaaagaatgggggtcgttggagaacttgcttaagaatttagatcaggtcaaaccagagtcagtgcgtgagaagattcttgcacacctcgaagacctcaaattaagccgcgaattgtcccgtgtacgcaccgatttgccgctcgaagttgatttccgtggccgccgcgaacctgactgggagggtcttaaagcgtttttagagcgtcttgaatttggttcgctcttgcatgaattcggccttttagaaagcccgttaccagccgaagaagcaccttggccaccgcccgaaggcgcgtttttaggttaccgtttgagtcgcccggaaccgatgtgggccgaattattggctcttgcagcgtctgcccagggacgtgtgtatcgcgcggaagaccctcatggtgcgctccgcggcctcaaagaagtccgtggactccttgccaaagacttagctgttgttgcattgcgcgaaggtcttgatttacctccgactgatgatccaatgcttcttgcgtacctcttggacccgtcaaacacgacgcccgaaggcgtagcccgtcgttacggcggcgagtggaccgaagatgcaggcgagcgcgcgttattggccgaacgtttgcacgccaatttattaggacgtttgcaaggcgaggaacgtctcctctggctttacgaagaagtggagaaaccattgagtcgcgtgctcgcgcatatggaagctaccggtgtcaaattagacgtggcgtatttggaggcactcagccttgaagttgctgccgaaatgcgccgcttggaggaagaagtattccgtttagcaggccactcctttaaccttaattctcgcgatcagttagaacgtgtgttgttcgatgaacttggtctccctcctatcggcaagacagagaagaccggtaaacgtagcacttcagcggcggttttagaagctcttcgcgaagtccatcccattgtggacaagatcttgcagtaccgcgaactcgcgaaattgaaaggcacctatattgaccctcttccggcattagtccacccgaaaacgggacgcctccatacccgcttcaaccaaacagccacggcgaccggtcgtttgtcctcctctgatccaaaccttcagaatattccagtacgtaccccattgggccagaagatccgccgcgcgtttgtagctgaggagggttggcgtttagtggccctcgattatagccaaattgaattacgtgtccttgcccatctttctggcgatgagaacctcatccgcgtgtttcaggaaggcaaagacattcacactcaaacggcaagctggatgtttggattatcagctgaagcgatcgatcctttgatgcgtcgtgcagcgaagaccatcaatttcggtgttctctacggtatgagtgcccatcgtttgtcgcaggaattaggcattccctatgaagaagctgcggcgttcattcagcgctactttcaaagctatcccaaagttaaagcatggatcgagaagactctcgaagaaggccgcacacgtggttacgtagagaccttatttggacgtcgccgctatgttcccgatttaaacgctcgcgtgaaatctgtccgtgaagccgccgaacgcatggcgttcaacatgcctgtacagggcacggcagctgacctcatgaaacttgcaatggtgcgcctttttccacaattgcgtgaagttggtgcccgcatgctcttgcaggtccacgatgaactcttgttagaagcgccaaaagagcgtgcggaagaggtggcagccctcgcgaaagaggttatggaaggcgtgtggcccttagcggtgcctcttgaagtcgaagttggtattggcgaggattggttggctgccaaaggataatga

SEQ ID NO: 1020 - protein, 841 aa, synthetic construct
  REGION 1..841: note = Variant of DNA polymerase I from Thermus sp. strain 2.9
MHHHHHHGGSGMLPVFEPKGRVLLVDGHHLAYRNFFALKGLTTSRGEPVQGVYGFAKSLLKALKEDGDVVIVVFDAKAPSFRHEAYEAYKAGRAPTPEDFPRQLALMKELVDLLGLERLEVPGFEADDVLATLAKKAEREGYEVQILTADRDLFQLLSPRISVLHPEGHRITPEWLWEKYGLRPEQWVDFRALAGDPSDNIPGVKGIGEKTALKLLKEWGSLENLLKNLDQVKPESVREKILAHLEDLKLSRELSRVRTDLPLEVDFRGRREPDWEGLKAFLERLEFGSLLHEFGLLESPLPAEEAPWPPPEGAFLGYRLSRPEPMWAELLALAASAQGRVYRAEDPHGALRGLKEVRGLLAKDLAVVALREGLDLPPTDDPMLLAYLLDPSNTTPEGVARRYGGEWTEDAGERALLAERLHANLLGRLQGEERLLWLYEEVEKPLSRVLAHMEATGVKLDVAYLEALSLEVAAEMRRLEEEVFRLAGHSFNLNSRDQLERVLFDELGLPPIGKTEKTGKRSTSAAVLEALREVHPIVDKILQYRELAKLKGTYIDPLPALVHPKTGRLHTRFNQTATATGRLSSSDPNLQNIPVRTPLGQKIRRAFVAEEGWRLVALDYSQIELRVLAHLSGDENLIRVFQEGKDIHTQTASWMFGLSAEAIDPLMRRAAKTINFGVLYGMSAHRLSQELGIPYEEAAAFIQRYFQSYPKVKAWIEKTLEEGRTRGYVETLFGRRRYVPDLNARVKSVREAAERMAFNMPVQGTAADLMKLAMVRLFPQLREVGARMLLQVHDELLLEAPKERAEEVAALAKEVMEGVWPLAVPLEVEVGIGEDWLAAKG

SEQ ID NO: 1021 - DNA, 2529 bp, synthetic construct
  misc_feature 1..2529: note = Variant of DNA polymerase I from Thermus sp. strain 2.9
  source 1..2529: mol_type = other DNA
atgcaccatcatcatcatcatggcggtagcggcatgttaccgttgttcgaacctaaaggtcgcgtgcttctggttgatggccatcatctcgcgtatcgtaacttctttgccctgaaaggattaaccaccagccgtggcgagccggtacagggtgtctacggctttgcaaagtcgctcctgaaagctctgaaagaagacggtgatgtggtgattgttgtctttgatgcgaaagcgccaagttttcgccacgaagcgtacgaagcttacaaagccgggcgtgctccaacgccggaagactttcctcgccaattggcgcttatgaaggaattagtggatttgcttggcctcgaacgcttggaagttcccggtttcgaggcagacgacgtattagcgactctcgcaaagaaagccgaacgtgagggctatgaagtccagatcttgacagcagatcgcgatcttttccagcttttatctccgcgcatctcggtgttacacccggaagggcatcgtatcaccccggaatggctctgggagaaatatggtttgcgtcccgaacaatgggtggattttcgcgccttagcaggcgatccgagcgacaatattccgggagttaaaggtatcggcgagaagacggcgctcaagctccttaaagaatgggggtcgttggagaacttgcttaagaatttagatcaggtcaaaccagagtcagtgcgtgagaagattcttgcacacctcgaagacctcaaattaagccgcgaattgtcccgtgtacgcaccgatttgccgctcgaagttgatttccgtggccgccgcgaacctgactgggagggtcttaaagcgtttttagagcgtcttgaatttggttcgctcttgcatgaattcggccttttagaaagcccgttaccagccgaagaagcaccttggccaccgcccgaaggcgcgtttttaggttaccgtttgagtcgcccggaaccgatgtgggccgaattattggctcttgcagcgtctgcccagggacgtgtgtatcgcgcggaagaccctcatggtgcgctccgcggcctcaaagaagtccgtggactccttgccaaagacttagctgttgttgcattgcgcgaaggtcttgatttacctccgactgatgatccaatgcttcttgcgtacctcttggacccgtcaaacacgacgcccgaaggcgtagcccgtcgttacggcggcgagtggaccgaagatgcaggcgagcgcgcgttattggccgaacgtttgcacgccaatttattaggacgtttgcaaggcgaggaacgtctcctctggctttacgaagaagtggagaaaccattgagtcgcgtgctcgcgcatatggaagctaccggtgtcaaattagacgtggcgtatttggaggcactcagccttgaagttgctgccgaaatgcgccgcttggaggaagaagtattccgtttagcaggccactcctttaaccttaattctcgcgatcagttagaacgtgtgttgttcgatgaacttggtctccctcctatcggcaagacagagaagaccggtaaacgtagcacttcagcggcggttttagaagctcttcgcgaagtccatcccattgtggacaagatcttgcagtaccgcgaactcgcgaaattgaaaggcacctatattgaccctcttccggcattagtccacccgaaaacgggacgcctccatacccgcttcaaccaaacagccacggcgaccggtcgtttgtcctcctctgatccaaaccttcagaatattccagtacgtaccccattgggccagaagatccgccgcgcgtttgtagctgaggagggttggcgtttagtggccctcgattatagccaaattgaattacgtgtccttgcccatctttctggcgatgagaacctcatccgcgtgtttcaggaaggcaaagacattcacactcaaacggcaagctggatgtttggattatcagctgaagcgatcgatcctttgatgcgtcgtgcagcgaagaccatcaatttcggtgttctctacggtatgagtgcccatcgtttgtcgcaggaattaggcattccctatcaggaagctgcggcgttcattcagcgctactttcaaagctatcccaaagttaaagcatggatcgagaagactctcgaagaaggccgcacacgtggttacgtagagaccttatttggacgtcgccgctatgttcccgatttaaacgctcgcgtgaaatctgtccgtgaagccgccgaacgcatggcgttcaacatgcctgtacagggcacggcagctgacctcatgaaacttgcaatggtgcgcctttttccacaattgcgtgaagttggtgcccgcatgctcttgcaggtccacgatgaactcttgttagaagcgccaaaagagcgtgcggaagaggtggcagccctcgcgaaagaggttatggaaggcgtgtggcccttagcggtgcctcttgaagtcgaagttggtattggcgaggattggttggctgccaaaggataatga

SEQ ID NO: 1022 - protein, 841 aa, synthetic construct
  REGION 1..841: note = Variant of DNA polymerase I from Thermus sp. strain 2.9
MHHHHHHGGSGMLPLFEPKGRVLLVDGHHLAYRNFFALKGLTTSRGEPVQGVYGFAKSLLKALKEDGDVVIVVFDAKAPSFRHEAYEAYKAGRAPTPEDFPRQLALMKELVDLLGLERLEVPGFEADDVLATLAKKAEREGYEVQILTADRDLFQLLSPRISVLHPEGHRITPEWLWEKYGLRPEQWVDFRALAGDPSDNIPGVKGIGEKTALKLLKEWGSLENLLKNLDQVKPESVREKILAHLEDLKLSRELSRVRTDLPLEVDFRGRREPDWEGLKAFLERLEFGSLLHEFGLLESPLPAEEAPWPPPEGAFLGYRLSRPEPMWAELLALAASAQGRVYRAEDPHGALRGLKEVRGLLAKDLAVVALREGLDLPPTDDPMLLAYLLDPSNTTPEGVARRYGGEWTEDAGERALLAERLHANLLGRLQGEERLLWLYEEVEKPLSRVLAHMEATGVKLDVAYLEALSLEVAAEMRRLEEEVFRLAGHSFNLNSRDQLERVLFDELGLPPIGKTEKTGKRSTSAAVLEALREVHPIVDKILQYRELAKLKGTYIDPLPALVHPKTGRLHTRFNQTATATGRLSSSDPNLQNIPVRTPLGQKIRRAFVAEEGWRLVALDYSQIELRVLAHLSGDENLIRVFQEGKDIHTQTASWMFGLSAEAIDPLMRRAAKTINFGVLYGMSAHRLSQELGIPYQEAAAFIQRYFQSYPKVKAWIEKTLEEGRTRGYVETLFGRRRYVPDLNARVKSVREAAERMAFNMPVQGTAADLMKLAMVRLFPQLREVGARMLLQVHDELLLEAPKERAEEVAALAKEVMEGVWPLAVPLEVEVGIGEDWLAAKG

SEQ ID NO: 1023 - DNA, 2529 bp, synthetic construct
  misc_feature 1..2529: note = Variant of DNA polymerase I from Thermus sp. strain 2.9
  source 1..2529: mol_type = other DNA
atgcaccatcatcatcatcatggcggtagcggcatgttaccgttgttcgaacctaaaggtcgcgtgcttctggttgatggccatcatctcgcgtatcgtaacttctttgccctgaaaggattaaccaccagccgtggcgagccggtacagggtgtctacggctttgcaaagtcgctcctgaaagctctgaaagaagacggtgatgtggtgattgttgtctttgatgcgaaagcgccaagttttcgccacgaagcgtacgaagcttacaaagccgggcgtgctccaacgccggaagactttcctcgccaattggcgcttatgaaggaattagtggatttgcttggcctcgaacgcttggaagttcccggtttcgaggcagacgacgtattagcgactctcgcaaagaaagccgaacgtgagggctatgaagtccagatcttgacagcagatcgcgatcttttccagcttttatctccgcgcatctcggtgttacacccggaagggcatcgtatcaccccggaatggctctgggagaaatatggtttgcgtcccgaacaatgggtggattttcgcgccttagcaggcgatccgagcgacaatattccgggagttaaaggtatcggcgagaagacggcgctcaagctccttaaagaatgggggtcgttggagaacttgcttaagaatttagatcaggtcaaaccagagtcagtgcgtgagaagattcttgcacacctcgaagacctcaaattaagccgcgaattgtcccgtgtacgcaccgatttgccgctcgaagttgatttccgtggccgccgcgaacctgactgggagggtcttaaagcgtttttagagcgtcttgaatttggttcgctcttgcatgaattcggccttttagaaagcccgttaccagccgaagaagcaccttggccaccgcccgaaggcgcgtttttaggttaccgtttgagtcgcccggaaccgatgtgggccgaattattggctcttgcagcgtctgcccagggacgtgtgtatcgcgcggaagaccctcatggtgcgctccgcggcctcaaagaagtccgtggactccttgccaaagacttagctgttgttgcattgcgcgaaggtcttgatttacctccgactgatgatccaatgcttcttgcgtacctcttggacccgtcaaacacgacgcccgaaggcgtagcccgtcgttacggcggcgagtggaccgaagatgcaggcgagcgcgcgttattggccgaacgtttgcaccagaatttattaggacgtttgcaaggcgaggaacgtctcctctggctttacgaagaagtggagaaaccattgagtcgcgtgctccaccatatggaagctaccggtgtcaaattagacgtggcgtatttggaggcactcagccttgaagttgctgccgaaatgcgccgcttggaggaagaagtattccgtttagcaggccactcctttaaccttaattctcgcgatcagttagaacgtgtgttgttcgatgaacttggtctccctcctatcggcaagacagagaagaccggtaaacgtagcacttcagcggcggttttagaagctcttcgcgaagtccatcccattgtggacaagatcttgcagtaccgcgaactcgcgaaattgaaaggcacctatattgaccgtcttccggcattagtccacccgaaaacgggacgcctccatacccgcttcaaccaaacagccacggcgaccggtcgtttgtcctcctctgatccaaaccttcagaatattccagtacgtaccccattgggccagaagatccgccgcgcgtttgtagctgaggagggttggcgtttagtggccctcgattatagccaaattgaattacgtgtccttgcccatctttctggcgatgagaacctcatccgcgtgtttcaggaaggcaaagacattcacactcaaacggcaagctggatgtttggattatcagctgaagcgatcgatcctttgatgcgtcgtgcagcgaagaccatcaatttcggtgttctctacggtatgagtgcccaccgtttgtcgcaggaattaggcattccctatgaagaagctgcggcgttcattcagcgctactttcaaagctatcccaaagttaaagcatggatcgagaagactctcgaagaaggccgcacacgtggttacgtagagaccttatttggacgtcgccgctatgttcccgatttaaacgctcgcgtgaaatctgtccgtgaagccgccgaacgcatggcgttcaacatgcctgtacagggcacggcagctgacctcatgaaacttgcaatggtgcgcctttttccacaattgcgtgaagttggtgcccgcatgctcttgcaggtccacgatgaactcttgttagaagcgccaaaagagcgtgcggaagaggtggcagccctcgcgaaagaggttatggaaggcgtgtggcccttagcggtgcctcttgaagtcgaagttggtattggcgaggattggttggctgccaaaggataatga

SEQ ID NO: 1024 - protein, 841 aa, synthetic construct
  REGION 1..841: note = Variant of DNA polymerase I from Thermus sp. strain 2.9
MHHHHHHGGSGMLPLFEPKGRVLLVDGHHLAYRNFFALKGLTTSRGEPVQGVYGFAKSLLKALKEDGDVVIVVFDAKAPSFRHEAYEAYKAGRAPTPEDFPRQLALMKELVDLLGLERLEVPGFEADDVLATLAKKAEREGYEVQILTADRDLFQLLSPRISVLHPEGHRITPEWLWEKYGLRPEQWVDFRALAGDPSDNIPGVKGIGEKTALKLLKEWGSLENLLKNLDQVKPESVREKILAHLEDLKLSRELSRVRTDLPLEVDFRGRREPDWEGLKAFLERLEFGSLLHEFGLLESPLPAEEAPWPPPEGAFLGYRLSRPEPMWAELLALAASAQGRVYRAEDPHGALRGLKEVRGLLAKDLAVVALREGLDLPPTDDPMLLAYLLDPSNTTPEGVARRYGGEWTEDAGERALLAERLHQNLLGRLQGEERLLWLYEEVEKPLSRVLHHMEATGVKLDVAYLEALSLEVAAEMRRLEEEVFRLAGHSFNLNSRDQLERVLFDELGLPPIGKTEKTGKRSTSAAVLEALREVHPIVDKILQYRELAKLKGTYIDRLPALVHPKTGRLHTRFNQTATATGRLSSSDPNLQNIPVRTPLGQKIRRAFVAEEGWRLVALDYSQIELRVLAHLSGDENLIRVFQEGKDIHTQTASWMFGLSAEAIDPLMRRAAKTINFGVLYGMSAHRLSQELGIPYEEAAAFIQRYFQSYPKVKAWIEKTLEEGRTRGYVETLFGRRRYVPDLNARVKSVREAAERMAFNMPVQGTAADLMKLAMVRLFPQLREVGARMLLQVHDELLLEAPKERAEEVAALAKEVMEGVWPLAVPLEVEVGIGEDWLAAKG

SEQ ID NO: 1025 - DNA, 2529 bp, synthetic construct
  misc_feature 1..2529: note = Variant of DNA polymerase I from Thermus sp. strain 2.9
  source 1..2529: mol_type = other DNA
atgcaccatcatcatcatcatggcggtagcggcatgttaccgttgttcgaacctaaaggtcgcgtgcttctggttgatggccatcatctcgcgtatcgtaacttctttgccctgaaaggattaaccaccagccgtggcgagccggtacagggtgtctacggctttgcaaagtcgctcctgaaagctctgaaagaagacggtgatgtggtgattgttgtctttgatgcgaaagcgccaagttttcgccacgaagcgtacgaagcttacaaagccgggcgtgctccaacgccggaagactttcctcgccaattggcgcttatgaaggaattagtggatttgcttggcctcgaacgcttggaagttcccggtttcgaggcagacgacgtattagcgactctcgcaaagaaagccgaacgtgagggctatgaagtccagatcttgacagcagatcgcgatcttttccagcttttatctccgcgcatctcggtgttacacccggaagggcatcgtatcaccccggaatggctctgggagaaatatggtttgcgtcccgaacaatgggtggattttcgcgccttagcaggcgatccgagcgacaatattccgggagttaaaggtatcggcgagaagacggcgctcaagctccttaaagaatgggggtcgttggagaacttgcttaagaatttagatcaggtcaaaccagagtcagtgcgtgagaagattcttgcacacctcgaagacctcaaattaagccgcgaattgtcccgtgtacgcaccgatttgccgctcgaagttgatttccgtggtcgccgcgaacctgactgggagggtcttaaagcgtttttagagcgtcttgaatttggttcgctcttgcatgaattcggccttttagaaagcccgttaccagccgaagaagcaccttggccaccgcccgaaggcgcgtttttaggttaccgtttgagtcgcccggaaccgatgtgggccgaattactggctcttgcagcgtctgcccagggacgtgtgtatcgcgcggaagaccctcatggtgcgctccgtggcctcaaagaagtccgtggactccttgccaaagacttagctgttgttgcattgcgcgaaggtcttgatttacctccgactgatgatccaatgcttcttgcgtacctcttggacccgtcaaacacgacgcccgaaggcgtagcccgtcgttacggcggcgagtggaccgaagatgcagctgagcgcgcgttattggccgaacgtttgcacgccaatttattaggacgtttgcaaggcgaggaacgtctcctctggctttacgaagaagtggagaaaccattgagtcgcgtgctcgcgcatatggaagctaccggtgtcaaattagacgtggcgtatttggagaacctcagccttgaagttgctgccgaaatgcgccgcttggaggaagaagtattccgtttagcaggccactcctttaaccttaattctcgcgatcagttagaacgtgtgttgttcgatgaacttggtctccctcctatcggcaagacagagaagaccggtaaacgtagcacttcagcggcggttttagaagctcttcgcgaagtccatcccattgtggacaagatcttgcagtaccgcgaactcgcgaaattgaaaggcacctatattgaccctcttccggcattagtccacccgaaaacgggacgcctccatacccgcttcaaccaaacagccacggcgaccggtcgtttgtcctcctctgatccaaaccttcagaatattccagtacgtaccccattgggccagaagatccgccgcgcgtttgtagctgaggagggttggcgtttagtggccctcgattatagccaaattgaattacgtgtccttgcccatctttctggcgatgagaacctcatccgcgtgtttcaggaaggcaaagacattcacactcaaacggcaagctggatgtttggattatcaccagaagcgatcgatcctttgatgcgtcgtgcagcgaagaccgttaatttcggtgttctctacggtatgagtgcccatcgtttgtcgcaggaattaggcattccctatgaagaagctgtcgcgttcattcagcgctactttcaaagctatcccaaagttaaagcatggatcgagaagactctcgaagaaggccgcacacgtggttacgtagagaccttatttggacgtcgccgctatgttcccgatttaaacgctcgcgtgaaatctgtccgtgaagccgccgaacgcatggcgttcaacatgcctgtacagggcacggcagctgacctcatgaaacttgcaatggtgcgcctttttccacaattgcgtgaagttggtgcccgcatgctcttgcaggtccacgatgaactcttgttagaagcgccaaaagagcgtgcggaagaggtggcagccctcgcgaaagaggttatggaaggcgtgtggcccttagcggtgcctcttgaagtcgaagttggtattggcgaggattggttggctgccaaaggataatga

SEQ ID NO: 1026 - protein, 841 aa, synthetic construct
  REGION 1..841: note = Variant of DNA polymerase I from Thermus sp. strain 2.9
MHHHHHHGGSGMLPLFEPKGRVLLVDGHHLAYRNFFALKGLTTSRGEPVQGVYGFAKSLLKALKEDGDVVIVVFDAKAPSFRHEAYEAYKAGRAPTPEDFPRQLALMKELVDLLGLERLEVPGFEADDVLATLAKKAEREGYEVQILTADRDLFQLLSPRISVLHPEGHRITPEWLWEKYGLRPEQWVDFRALAGDPSDNIPGVKGIGEKTALKLLKEWGSLENLLKNLDQVKPESVREKILAHLEDLKLSRELSRVRTDLPLEVDFRGRREPDWEGLKAFLERLEFGSLLHEFGLLESPLPAEEAPWPPPEGAFLGYRLSRPEPMWAELLALAASAQGRVYRAEDPHGALRGLKEVRGLLAKDLAVVALREGLDLPPTDDPMLLAYLLDPSNTTPEGVARRYGGEWTEDAAERALLAERLHANLLGRLQGEERLLWLYEEVEKPLSRVLAHMEATGVKLDVAYLENLSLEVAAEMRRLEEEVFRLAGHSFNLNSRDQLERVLFDELGLPPIGKTEKTGKRSTSAAVLEALREVHPIVDKILQYRELAKLKGTYIDPLPALVHPKTGRLHTRFNQTATATGRLSSSDPNLQNIPVRTPLGQKIRRAFVAEEGWRLVALDYSQIELRVLAHLSGDENLIRVFQEGKDIHTQTASWMFGLSPEAIDPLMRRAAKTVNFGVLYGMSAHRLSQELGIPYEEAVAFIQRYFQSYPKVKAWIEKTLEEGRTRGYVETLFGRRRYVPDLNARVKSVREAAERMAFNMPVQGTAADLMKLAMVRLFPQLREVGARMLLQVHDELLLEAPKERAEEVAALAKEVMEGVWPLAVPLEVEVGIGEDWLAAKG

SEQ ID NO: 1027 - DNA, 2529 bp, synthetic construct
  misc_feature 1..2529: note = Variant of DNA polymerase I from Thermus sp. strain 2.9
  source 1..2529: mol_type = other DNA
atgcaccatcatcatcatcatggcggtagcggcatgttaccgttgttcgaacctaaaggtcgcgtgcttctggttgatggccatcatctcgcgtatcgtaacttctttgccctgaaaggattaaccaccagccgtggcgagccggtacagggtgtctacggctttgcaaagtcgctcctgaaagctctgaaagaagacggtgatgtggtgattgttgtctttgatgcgaaagcgccaagttttcgccacgaagcgtacgaagcttacaaagccgggcgtgctccaacgccggaagactttcctcgccaattggcgcttatgaaggaattagtggatttgcttggcctcgaacgcttggaagttcccggtttcgaggcagacgacgtattagcgactctcgcaaagaaagccgaacgtgagggctatgaagtccagatcttgacagcagatcgcgatcttttccagcttttatctccgcgcatctcggtgttacacccggaagggcatcgtatcaccccggaatggctctgggagaaatatggtttgcgtcccgaacaatgggtggattttcgcgccttagcaggcgatccgagcgacaatattccgggagttaaaggtatcggcgagaagacggcgctcaagctccttaaagaatgggggtcgttggagaacttgcttaagaatttagatcaggtcaaaccagagtcagtgcgtgagaagattcttgcacacctcgaagacctcaaattaagcctggaattgtcccgtgtacgcaccgatttgccgctcgaagttgatttccgtggccgccgcgaacctgactgggagggtcttaaagcgtttttagagcgtcttgaatttggttcgctcttgcatgaattcggccttttagaaagcccgttaccagccgaagaagcaccttggccaccgcccgaaggcgcgtttttaggttaccgtttgagtcgcccggaaccgatgtgggccgaattactggctcttgcagcgtctgcccagggacgtgtgtatcgcgcggaagaccctcatggtgcgctccgcggcctcaaagaagtccgtggactccttgccaaagacttagctgttgttgcattgcgcgaaggtcttgatttacctccgactgatgatccaatgcttcttgcgtacctcttggacccgtcaaacacgacgcccgaaggcgtagcccgtcgttacggcggcgagtggaccgaagatgcaggcgagcgcgcgttattggccgaacgtttgcacgccaatttattaggacgtttgcaaggcgaggaacgtctcctctggctttacgaagaagtggagaaaccattgagtcgcgtgctcgcgcatatggaagctaccggtgtcaaattagacgtggcgtatttggaggcactcagccttgaagttgctgccgaaatgcgccgcttggaggaagaagtattccgtttagcaggccactcctttaaccttaattctcgcgatcagttagaacgtgtgttgttcgatgagcttggtctccctcctatcggcaagacagagaagaccggtaaacgtagcacttcagcggcggttttagaagctcttcgcgaagtccatcccattgtggacaagatcttgcagtaccgcgaactcgcgaaattgaaaggcacctatattgaccctcttccggcattagtccacccgaaaacgggacgcctccatacccgcttcaaccaaacagccacggcgaccggtcgtttgtcctcctctgatccaaaccttcagaatattccagtacgtaccccattgggccagaagatccgccgcgcgtttgtagctgaggagggttggcgtttagtggccctcgattatagccaaattgaattacgtgtccttgcccatctttctggcgatgagaacctcatccgcgtgtttcaggaaggcaaagacattcacactcaaacggcaagctggatgtttggattatcagctgaagcgatcgatcctttgatgcgtcgtgcagcgaagaccattaatttcggtgttctctacggtatgagtgcccatcgtttgtcgcaggaattaggcattccctatgaagaagctgccgcgttcattcagaagtactttcaaagctatcccaaagttaaagcatggatcgagaagactctcgaagaaggccgcacacgtggttacgtagagaccttatttggacgtcgccgctatgttcccgatttaaacgctcgcgtgaaatctgtccgtgaagccgccgaacgcatggcgttcaacatgcctgtacagggcacggcagctgacctcatgaaacttgcaatggtgcgcctttttccacaattgcgtgaagttggtgcccgcatgctcttgcaggtccacgatgaactcttgttagaagcgccaaaagagcgtgcggaagaggtggcagccctcgcgaaagaggttatggaaggcgtgtggcccttagcggtgcctcttgaagtcgaagttggtattggcgaggattggttggctgccaaaggataatga

SEQ ID NO: 1028 - protein, 841 aa, synthetic construct
  REGION 1..841: note = Variant of DNA polymerase I from Thermus sp. strain 2.9
MHHHHHHGGSGMLPLFEPKGRVLLVDGHHLAYRNFFALKGLTTSRGEPVQGVYGFAKSLLKALKEDGDVVIVVFDAKAPSFRHEAYEAYKAGRAPTPEDFPRQLALMKELVDLLGLERLEVPGFEADDVLATLAKKAEREGYEVQILTADRDLFQLLSPRISVLHPEGHRITPEWLWEKYGLRPEQWVDFRALAGDPSDNIPGVKGIGEKTALKLLKEWGSLENLLKNLDQVKPESVREKILAHLEDLKLSLELSRVRTDLPLEVDFRGRREPDWEGLKAFLERLEFGSLLHEFGLLESPLPAEEAPWPPPEGAFLGYRLSRPEPMWAELLALAASAQGRVYRAEDPHGALRGLKEVRGLLAKDLAVVALREGLDLPPTDDPMLLAYLLDPSNTTPEGVARRYGGEWTEDAGERALLAERLHANLLGRLQGEERLLWLYEEVEKPLSRVLAHMEATGVKLDVAYLEALSLEVAAEMRRLEEEVFRLAGHSFNLNSRDQLERVLFDELGLPPIGKTEKTGKRSTSAAVLEALREVHPIVDKILQYRELAKLKGTYIDPLPALVHPKTGRLHTRFNQTATATGRLSSSDPNLQNIPVRTPLGQKIRRAFVAEEGWRLVALDYSQIELRVLAHLSGDENLIRVFQEGKDIHTQTASWMFGLSAEAIDPLMRRAAKTINFGVLYGMSAHRLSQELGIPYEEAAAFIQKYFQSYPKVKAWIEKTLEEGRTRGYVETLFGRRRYVPDLNARVKSVREAAERMAFNMPVQGTAADLMKLAMVRLFPQLREVGARMLLQVHDELLLEAPKERAEEVAALAKEVMEGVWPLAVPLEVEVGIGEDWLAAKG

SEQ ID NO: 1029 - DNA, 2529 bp, synthetic construct
  misc_feature 1..2529: note = Variant of DNA polymerase I from Thermus sp. strain 2.9
  source 1..2529: mol_type = other DNA
atgcaccatcatcatcatcatggcggtagcggcatgttaccgttgttcgaacctaaaggtcgcgtgcttctggttgatggccatcatctcgcgtatcgtaacttctttgccctgaaaggattaaccaccagccgtggcgagccggtacagggtgtctacggctttgcaaagtcgctcctgaaagctctgaaagaagacggtgatgtggtgattgttgtctttgatgcgaaagcgccaagttttcgccacgaagcgtacgaagcttacaaagccgggcgtgctccaacgccggaagactttcctcgccaattggcgcttatgaaggaattagtggatttgcttggcctcgaacgcttggaagttcccggtttcgaggcagacgacgtattagcgactctcgcaaagaaagccgaacgtgagggctatgaagtccagatcttgacagcagatcgcgatcttttccagcttttatctccgcgcatctcggtgttacacccggaagggcatcgtatcaccccggaatggctctgggagaaatatggtttgcgtcccgaacaatgggtggattttcgcgccttagcaggcgatccgagcgacaatattccgggagttaaaggtatcggcgagaagacggcgctcaagctccttaaagaatgggggtcgttggagaacttgcttaagaatttagatcaggtcaaaccagagtcagtgcgtgagaagattcttgcacacctcgaagacctcaaattaagccgcgaattgtcccgtgtacgcaccgatttgccgctcgaagttgatttccgtggccgccgcgaacctgactgggagggtcttaaagcgtttttagagcgtcttgaatttggttcgctcttgcatgaattcggccttttagaaagcccgttaccagccgaagaagcaccttggccaccgcccgaaggcgcgtttttaggttaccgtttgagtcgcccggaaccgatgtgggccgaattattggctcttgcagcgtctgcccagggacgtgtgtatcgcgcggaagaccctcatggtgcgctccgcggcctcaaagaagtccgtggactccttgccaaagacttagctgttgttgcattgcgcgaaggtcttgatttacctccgactgatgatccaatgcttcttgcgtacctcttggacccgtcaaacacgacgcccgaaggcgtagcccgtcgttacggcggcgagtggaccgaagatgcaggcgagcgcgcgttattggccgaacgtttgcacgccaatttattaggacgtttgcaaggcgaggaacgtctcctctggctttacgaagaagtggagaaaccattgagtcgcgtgctcgcgcatatggaagctaccggtgtcaaattagacgtggcgtatttggaggcactcagccttgaagttgctgccgaaatgcgccgcttggaggaagaagtattccgtttagcaggccactcctttaaccttaattctcgcgatcagttagaacgtgtgttgttcgatgaacttggtctccctcctatcggcaagacagagaagaccggtaaacgtagcacttcagcggcggttttagaagctcttcgcgaagtccatcccattgtggacaagatcttgcagtaccgcgaactcgcgaaattgaaaggcacctatattgaccctcttccggcattagtccacccgaaaacgggacgcctccatacccgcttcaaccaaacagccacggcgaccggtcgtttgtcctcctctgatccaaaccttcagaatattccagtacgtaccccattgggccagaagatccgccgcgcgtttgtagctgaggagggttggcgtttagtggccctcgattatagccaaattgaattacgtgtccttgcccatctttctggcgatgagaacctcatccgcgtgtttcaggaaggcaaagacattcacactcaaacggcaagctggatgtttggattatcagctgaagcgatcgatcctttgatgcgtcgtgcagcgaagaccatcaatttcggtgttctctacggtatgagtgcccatcgtttgtcggatgaattaggcattccctatgaagaagctgcggcgttcattcagcgctactttcaaagctatcccaaagttaaagcatggatcgagaagactctcgaagaaggccgcacacgtggttacgtagagaccttatttggacgtcgccgctatgttcccgatttaaacgctcgcgtgaaatctgtccgtgaagccgccgaacgcatggcgttcaacatgcctgtacagggcacggcagctgacctcatgaaacttgcaatggtgcgcctttttccacaattgcgtgaagttggtgcccgcatgctcttgcaggtccacgatgaactcttgttagaagcgccaaaagagcgtgcggaagaggtggcagccctcgcgaaagaggttatggaaggcgtgtggcccttagcggtgcctcttgaagtcgaagttggtattggcgaggattggttggctgccaaaggataatga

SEQ ID NO: 1030 - protein, 841 aa, synthetic construct
  REGION 1..841: note = Variant of DNA polymerase I from Thermus sp. strain 2.9
MHHHHHHGGSGMLPLFEPKGRVLLVDGHHLAYRNFFALKGLTTSRGEPVQGVYGFAKSLLKALKEDGDVVIVVFDAKAPSFRHEAYEAYKAGRAPTPEDFPRQLALMKELVDLLGLERLEVPGFEADDVLATLAKKAEREGYEVQILTADRDLFQLLSPRISVLHPEGHRITPEWLWEKYGLRPEQWVDFRALAGDPSDNIPGVKGIGEKTALKLLKEWGSLENLLKNLDQVKPESVREKILAHLEDLKLSRELSRVRTDLPLEVDFRGRREPDWEGLKAFLERLEFGSLLHEFGLLESPLPAEEAPWPPPEGAFLGYRLSRPEPMWAELLALAASAQGRVYRAEDPHGALRGLKEVRGLLAKDLAVVALREGLDLPPTDDPMLLAYLLDPSNTTPEGVARRYGGEWTEDAGERALLAERLHANLLGRLQGEERLLWLYEEVEKPLSRVLAHMEATGVKLDVAYLEALSLEVAAEMRRLEEEVFRLAGHSFNLNSRDQLERVLFDELGLPPIGKTEKTGKRSTSAAVLEALREVHPIVDKILQYRELAKLKGTYIDPLPALVHPKTGRLHTRFNQTATATGRLSSSDPNLQNIPVRTPLGQKIRRAFVAEEGWRLVALDYSQIELRVLAHLSGDENLIRVFQEGKDIHTQTASWMFGLSAEAIDPLMRRAAKTINFGVLYGMSAHRLSDELGIPYEEAAAFIQRYFQSYPKVKAWIEKTLEEGRTRGYVETLFGRRRYVPDLNARVKSVREAAERMAFNMPVQGTAADLMKLAMVRLFPQLREVGARMLLQVHDELLLEAPKERAEEVAALAKEVMEGVWPLAVPLEVEVGIGEDWLAAKG

SEQ ID NO: 1031 - DNA, 2529 bp, synthetic construct
  misc_feature 1..2529: note = Variant of DNA polymerase I from Thermus sp. strain 2.9
  source 1..2529: mol_type = other DNA
atgcaccatcatcatcatcatggcggtagcggcatgttaccgttgttcgaacctaaaggtcgcgtgcttctggttgatggccatcatctcgcgtatcgtaacttctttgccctgaaaggattaaccaccagccgtggcgagccggtacagggtgtctacggctttgcaaagtcgctcctgaaagctctgaaagaagacggtgatgtggtgattgttgtctttgatgcgaaagcgccaagttttcgccacgaagcgtacgaagcttacaaagccgggcgtgctccaacgccggaagactttcctcgccaattggcgcttatgaaggaattagtggatttgcttggcctcgaacgcttggaagttcccggtttcgaggcagacgacgtattagcgactctcgcaaagaaagccgaacgtgagggctatgaagtccagatcttgacagcagatcgcgatcttttccagcttttatctccgcgcatctcggtgttacacccggaagggcatcgtatcaccccggaatggctctgggagaaatatggtttgcgtcccgaacaatgggtggattttcgcgccttagcaggcgatccgagcgacaatattccgggagttaaaggtatcggcgagaagacggcgctcaagctccttaaagaatgggggtcgttggagaacttgcttaagaatttagatcaggtcaaaccagagtcagtgcgtgagaagattcttgcacacctcgaagacctcaaattaagccgcgaattgtcccgtgtacgcaccgatttgccgctcgaagttgatttccgtggccgccgcgaacctgactgggagggtcttaaagcgtttttagagcgtcttgaatttggttcgctcttgcatgaattcggccttttagaaagcccgttaccagccgaagaagcaccttggccaccgcccgaaggcgcgtttttaggttaccgtttgagtcgcccggaaccgatgtgggccgaattattggctcttgcagcgtctgcccagggacgtgtgtatcgcgcggaagaccctcatggtgcgctccgcggcctcaaagaagtccgtggactccttgccaaagacttagctgttgttgcattgcgcgaaggtcttgatttacctccgactgatgatccaatgcttcttgcgtacctcttggacccgtcaaacacgacgcccgaaggcgtagcccgtcgttacggcggcgagtggaccgaagatgcaggcgagcgcgcgttattggccgaacgtttgcacgccaatttattaggacgtttgcaaggcgaggtgcgtctcctctggctttacgaagaagtggagaaaccattgagtcgcgtgctcgcgcatatggaagctaccggtgtcaaattagacgtggcgtatttggaggcactcagccttgaagttgctgccgaaatgcgccgcttggaggaagaagtattccgtttagcaggccactcctttaaccttaattctcgcgatcagttagaacgtgtgttgttcgatgaacttggtctccctcctatcggcaagacagagaagaccggtaaacgtagcacttcagcggcggttttagaagctcttcgcgaagtccatcccattgtggacaagatcttgcagtaccgcgaactcgcgaaattgaaaggcacctatattgaccctcttccggcattagtccacccgaaaacgggacgcctccatacccgcttcaaccaaacagccacggcgaccggtcgtttgtcctcctctgatccaaaccttcagaatattccagtacgtaccccattgggccagaagatccgccgcgcgtttgtagctgaggagggttggcgtttagtggccctcgattatagccaaattgaattacgtgtccttgcccatctttctggcgatgagaacctcatccgcgtgtttcaggaaggcaaagacattcacactcaaacggcaagctggatgtttggattatcagctgaagcgatcgatcctttgatgcgtcgtgcagcgaagaccatcaatttcggtgttctctacggtatgagtgcccatcgtttgtcgcaggaattaggcattccctatgaagaagctgcggcgttcattcagcgctactttcaaagctatcccaaagttaaagcatggatcgagaagactctcgaagaaggccgcacacgtggttacgtagagaccttatttggacgtcgccgctatgttcccgatttaaacgctcgcgtgaaatctgtccgtgaagccgccgaacgcatggcgttcaacatgcctgtacagggcacggcagctgacctcatgaaacttgcaatggtgcgcctttttccacaattgcgtgaagttggtgcccgcatgctcttgcaggtccacgatgaactcttgttagaagcgccaaaagagcgtgcggaagaggtggcagccctcgcgaaagaggttatggaaggcgtgtggcccttagcggtgcctcttgaagtcgaagttggtattggcgaggattggttggctgccaaaggataatga

SEQ ID NO: 1032 - protein, 841 aa, synthetic construct
  REGION 1..841: note = Variant of DNA polymerase I from Thermus sp. strain 2.9
MHHHHHHGGSGMLPLFEPKGRVLLVDGHHLAYRNFFALKGLTTSRGEPVQGVYGFAKSLLKALKEDGDVVIVVFDAKAPSFRHEAYEAYKAGRAPTPEDFPRQLALMKELVDLLGLERLEVPGFEADDVLATLAKKAEREGYEVQILTADRDLFQLLSPRISVLHPEGHRITPEWLWEKYGLRPEQWVDFRALAGDPSDNIPGVKGIGEKTALKLLKEWGSLENLLKNLDQVKPESVREKILAHLEDLKLSRELSRVRTDLPLEVDFRGRREPDWEGLKAFLERLEFGSLLHEFGLLESPLPAEEAPWPPPEGAFLGYRLSRPEPMWAELLALAASAQGRVYRAEDPHGALRGLKEVRGLLAKDLAVVALREGLDLPPTDDPMLLAYLLDPSNTTPEGVARRYGGEWTEDAGERALLAERLHANLLGRLQGEVRLLWLYEEVEKPLSRVLAHMEATGVKLDVAYLEALSLEVAAEMRRLEEEVFRLAGHSFNLNSRDQLERVLFDELGLPPIGKTEKTGKRSTSAAVLEALREVHPIVDKILQYRELAKLKGTYIDPLPALVHPKTGRLHTRFNQTATATGRLSSSDPNLQNIPVRTPLGQKIRRAFVAEEGWRLVALDYSQIELRVLAHLSGDENLIRVFQEGKDIHTQTASWMFGLSAEAIDPLMRRAAKTINFGVLYGMSAHRLSQELGIPYEEAAAFIQRYFQSYPKVKAWIEKTLEEGRTRGYVETLFGRRRYVPDLNARVKSVREAAERMAFNMPVQGTAADLMKLAMVRLFPQLREVGARMLLQVHDELLLEAPKERAEEVAALAKEVMEGVWPLAVPLEVEVGIGEDWLAAKG

SEQ ID NO: 1033 - DNA, 2529 bp, synthetic construct
  misc_feature 1..2529: note = Variant of DNA polymerase I from Thermus sp. strain 2.9
  source 1..2529: mol_type = other DNA
atgcaccatcatcatcatcatggcggtagcggcatgttaccgttgttcgaacctaaaggtcgcgtgcttctggttgatggccatcatctcgcgtatcgtaacttctttgccctgaaaggattaaccaccagccgtggcgagccggtacagggtgtctacggctttgcaaagtcgctcctgaaagctctgaaagaagacggtgatgtggtgattgttgtctttgatgcgaaagcgccaagttttcgccacgaagcgtacgaagcttacaaagccgggcgtgctccaacgccggaagactttcctcgccaattggcgcttatgaaggaattagtggatttgcttggcctcgaacgcttggaagttcccggtttcgaggcagacgacgtattagcgactctcgcaaagaaagccgaacgtgagggctatgaagtccagatcttgacagcagatcgcgatcttttccagcttttatctccgcgcatctcggtgttacacccggaagggcatcgtatcaccccggaatggctctgggagaaatatggtttgcgtcccgaacaatgggtggattttcgcgccttagcaggcgatccgagcgacaatattccgggagttaaaggtatcggcgagaagacggcgctcaagctccttaaagaatgggggtcgttggagaacttgcttaagaatttagatcaggtcaaaccagagtcagtgcgtgagaagattcttgcacacctcgaagacctcaaattaagccgcgaattgtcccgtgtacgcaccgatttgccgctcgaagttgatttccgtggccgccgcgaacctgactgggagggtcttaaagcgtttttagagcgtcttgaatttggttcgctcttgcatgaattcggccttttagaaagcccgttaccagccgaagaagcaccttggccaccgcccgaaggcgcgtttttaggttaccgtttgagtcgcccggaaccgatgtgggccgaattattggctcttgcagcgtctgcccagggacgtgtgtatcgcgcggaagaccctcatggtgcgctccgcggcctcaaagaagtccgtggactccttgccaaagacttagctgttgttgcattgcgcgaaggtcttgatttacctccgactgatgatccaatgcttcttgcgtacctcttggacccgtcaaacacgacgcccgaaggcgtagcccgtcgttacggcggcgagtggaccgaagatgcaggcgagcgcgcgttattggccgaacgtttgcacgcaaatttattaggacgtttgcaaggcgaggaacgtctcctctggctttacgaagaagtggagaaaccattgagtcgcgtgctcgcgcatatggaagctaccggtgtcaaattagacgtggcgtatttggaggcactcagccttgaagttgctgccgaaatgcgccgcttggaggaagaagtattccgtttagcaggccactcctttaaccttaattctcgcgatcagttagaacgtgtgttgttcgatgaacttggtctccctcctatcggcaagacagagaagaccggtaaacgtagcacttcagcggcggttttagaagctcttcgcgaagtccatcccattgtggacaagatcttgcagtaccgcgaactcgcgaaattgaaaggcacctatattgaccctcttccggcattagtccacccgaaaacgggacgcctccatacccgcttcaaccaaacagccacggcgaccggtcgtttgtcctcctctgatccaaaccttcagaatattccagtacgtaccccattgggccagaagatccgccgcgcgtttgtagctgaggagggttggcgtttagtggccctcgattatagccaaattgaattacgtgtccttgcccatctttctggcgatgagaacctcatccgcgtgtttcaggaaggcaaagacattcacactcaaacggcaagctggatgtttggagtgtcggcggaagcgatcgatcctttgatgcgtcgtgcagcgaagaccatcaatttcggtgttctctacggtatgagtgcccaccgtttgtcgcaggaattaggcattccctatgaagaagctgcggcgttcattcagcgctactttcaaagctatcccaaagttaaagcatggatcgagaagactctcgaagaaggccgcacacgtggttacgtagagaccttatttggacgtcgccgctatgttcccgatttaaacgctcgcgtgaaatctgtccgtgaagccgccgaacgcatggcgttcaacatgcctgtacagggcacggcagctgacctcatgaaacttgcaatggtgcgcctttttccacaattgcgtgaagttggtgcccgcatgctcttgcaggtccacgatgaactcttgttagaagcgccaaaagagcgtgcggaagaggtggcagccctcgcgaaagaggttatggaaggcgtgtggcccttagcggtgcctcttgaagtcgaagttggtattggcgaggattggttggctgccaaaggataatga

SEQ ID NO: 1034 - protein, 841 aa, synthetic construct
  REGION 1..841: note = Variant of DNA polymerase I from Thermus sp. strain 2.9
MHHHHHHGGSGMLPLFEPKGRVLLVDGHHLAYRNFFALKGLTTSRGEPVQGVYGFAKSLLKALKEDGDVVIVVFDAKAPSFRHEAYEAYKAGRAPTPEDFPRQLALMKELVDLLGLERLEVPGFEADDVLATLAKKAEREGYEVQILTADRDLFQLLSPRISVLHPEGHRITPEWLWEKYGLRPEQWVDFRALAGDPSDNIPGVKGIGEKTALKLLKEWGSLENLLKNLDQVKPESVREKILAHLEDLKLSRELSRVRTDLPLEVDFRGRREPDWEGLKAFLERLEFGSLLHEFGLLESPLPAEEAPWPPPEGAFLGYRLSRPEPMWAELLALAASAQGRVYRAEDPHGALRGLKEVRGLLAKDLAVVALREGLDLPPTDDPMLLAYLLDPSNTTPEGVARRYGGEWTEDAGERALLAERLHANLLGRLQGEERLLWLYEEVEKPLSRVLAHMEATGVKLDVAYLEALSLEVAAEMRRLEEEVFRLAGHSFNLNSRDQLERVLFDELGLPPIGKTEKTGKRSTSAAVLEALREVHPIVDKILQYRELAKLKGTYIDPLPALVHPKTGRLHTRFNQTATATGRLSSSDPNLQNIPVRTPLGQKIRRAFVAEEGWRLVALDYSQIELRVLAHLSGDENLIRVFQEGKDIHTQTASWMFGVSAEAIDPLMRRAAKTINFGVLYGMSAHRLSQELGIPYEEAAAFIQRYFQSYPKVKAWIEKTLEEGRTRGYVETLFGRRRYVPDLNARVKSVREAAERMAFNMPVQGTAADLMKLAMVRLFPQLREVGARMLLQVHDELLLEAPKERAEEVAALAKEVMEGVWPLAVPLEVEVGIGEDWLAAKG

SEQ ID NO: 1035 - DNA, 2529 bp, synthetic construct
  misc_feature 1..2529: note = Variant of DNA polymerase I from Thermus sp. strain 2.9
  source 1..2529: mol_type = other DNA
atgcaccatcatcatcatcatggcggtagcggcatgttaccgttgttcgaacctagtggtcgcgtgcttctggttgatggccatcatctcgcgtatcgtaacttctttgccctgaaaggattaaccaccagccgtggcgagccggtacagggtgtctacggctttgcaaagtcgctcctgaaagctctgaaagaagacggtgatgtggtgattgttgtctttgatgcgaaagcgccaagttttcgccacgaagcgtacgaagcttacaaagccgggcgtgctccaacgccggaagactttcctcgccaattggcgcttatgaaggaattagtggatttgcttggcctcgaacgcttggaagttcccggtttcgaggcagacgacgtattagcgactctcgcaaagaaagccgaacgtgagggctatgaagtccagatcttgacagcagatcgcgatcttttccagcttttatctccgcgcatctcggtgttacacccggaagggcatcgtatcaccccggaatggctctgggagaaatatggtttgcgtcccgaacaatgggtggattttcgcgccttagcaggcgatccgagcgacaatattccgggagttaaaggtatcggcgagaagacggcgctcaagctccttaaagaatgggggtcgttggagaacttgcttaagaatttagatcaggtcaaaccagagtcagtgcgtgagaagattcttgcacacctcgaagacctcaaattaagccgcgaattgtcccgtgtacgcaccgatttgccgctcgaagttgatttccgtggccgccgcgaacctgactgggagggtcttaaagcgtttttagagcgtcttgaatttggttcgctcttgcatgaattcggccttttagaaagcccgttaccagccgaagaagcaccttggccaccgcccgaaggcgcgtttttaggttaccgtttgagtcgcccggaaccgatgtgggccgaattattggctcttgcagcgtctgcccagggacgtgtgtatcgcgcggaagaccctcatggtgcgctccgcggcctcaaagaagtccgtggactccttgccaaagacttagctgttgttgcattgcgcgaaggtcttgatttacctccgactgatgatccaatgcttcttgcgtacctcttggacccgtcaaacacgacgcccgaaggcgtagcccgtcgttacggcggcgagtggaccgaagatgcaggcgagcgcgcgttattggccgaacgtttgcacgccaatttattaggacgtttgcaaggcgaggaacgtctcctctggctttacgaagaagtggagaaaccattgagtcgcgtgctcgcgcatatggaagctaccggtgtcaaattagacgtggcgtatttggaggcactcagccttgaagttgctgccgaaatgcgccgcttggaggaagaagtattccgtttagcaggccactcctttaaccttaattctcgcgatcagttagaacgtgtgttgttcgatgaacttggtctccctcctatcggcaagacagagaagaccggtaaacgtagcacttcagcggcggttttagaagctcttcgcgaagtccatcccattgtggacaagatcttgcagtaccgcgaactcgcgaaattgaaaggcacctatattgaccctcttccggcattagtccacccgaaaacgggacgcctccatacccgcttcaaccaaacagccacggcgaccggtcgtttgtcctcctctgatccaaaccttcagaatattccagtacgtaccccattgggccagaagatccgccgcgcgtttgtagctgaggagggttggcgtttagtggccctcgattatagccaaattgaattacgtgtccttgcccatctttctggcgatgagaacctcatccgcgtgtttcaggaaggcaaagacattcacactcaaacggcaagctggatgtttggattatcagctgaagcgatcgatcctttgatgcgtcgtgcagcgaagaccatcaatttcggtgttctctacggtatgagtgcccatcgtttgtcgcaggaattaggcattccctatgaagaagctgcggcgttcattcagcgctactttcaaagctatcccaaagttaaagcatggatcgagaagactctcgaagaaggccgcacacgtggttacgtagagaccttatttggacgtcgccgctatgttcccgatttaaacgctcgcgtgaaatctgtccgtgaagccgccgaacgcatggcgttcaacatgcctgtacagggcacggcagctgacctcatgaaacttgcaatggtgcgcctttttccacaattgcgtgaagttggtgcccgcatgctcttgcaggtccacgatgaactcttgttagaagcgccaaaagagcgtgcggaagaggtggcagccctcgcgaaagaggttatggaaggcgtgtggcccttagcggtgcctcttgaagtcgaagttggtattggcgaggattggttggctgccaaaggataatga

SEQ ID NO: 1036 - protein, 841 aa, synthetic construct
  REGION 1..841: note = Variant of DNA polymerase I from Thermus sp. strain 2.9
MHHHHHHGGSGMLPLFEPSGRVLLVDGHHLAYRNFFALKGLTTSRGEPVQGVYGFAKSLLKALKEDGDVVIVVFDAKAPSFRHEAYEAYKAGRAPTPEDFPRQLALMKELVDLLGLERLEVPGFEADDVLATLAKKAEREGYEVQILTADRDLFQLLSPRISVLHPEGHRITPEWLWEKYGLRPEQWVDFRALAGDPSDNIPGVKGIGEKTALKLLKEWGSLENLLKNLDQVKPESVREKILAHLEDLKLSRELSRVRTDLPLEVDFRGRREPDWEGLKAFLERLEFGSLLHEFGLLESPLPAEEAPWPPPEGAFLGYRLSRPEPMWAELLALAASAQGRVYRAEDPHGALRGLKEVRGLLAKDLAVVALREGLDLPPTDDPMLLAYLLDPSNTTPEGVARRYGGEWTEDAGERALLAERLHANLLGRLQGEERLLWLYEEVEKPLSRVLAHMEATGVKLDVAYLEALSLEVAAEMRRLEEEVFRLAGHSFNLNSRDQLERVLFDELGLPPIGKTEKTGKRSTSAAVLEALREVHPIVDKILQYRELAKLKGTYIDPLPALVHPKTGRLHTRFNQTATATGRLSSSDPNLQNIPVRTPLGQKIRRAFVAEEGWRLVALDYSQIELRVLAHLSGDENLIRVFQEGKDIHTQTASWMFGLSAEAIDPLMRRAAKTINFGVLYGMSAHRLSQELGIPYEEAAAFIQRYFQSYPKVKAWIEKTLEEGRTRGYVETLFGRRRYVPDLNARVKSVREAAERMAFNMPVQGTAADLMKLAMVRLFPQLREVGARMLLQVHDELLLEAPKERAEEVAALAKEVMEGVWPLAVPLEVEVGIGEDWLAAKG

SEQ ID NO: 1037 - DNA, 2529 bp, synthetic construct
  misc_feature 1..2529: note = Variant of DNA polymerase I from Thermus sp. strain 2.9
  source 1..2529: mol_type = other DNA
atgcaccatcatcatcatcatggcggtagcggcatgttaccgttgttcgaacctaaaggtcgcgtgcttctggttgatggccatcatctcgcgtatcgtaacttctttgccctgaaaggattaaccaccagccgtggcgagccggtacagggtgtctacggctttgcaaagtcgctcctgaaagctctgaaagaagacggtgatgtggtgattgttgtctttgatgcgaaagcgccaagttttcgccacgaagcgtacgaagcttacaaagccgggcgtgctccaacgccggaagactttcctcgccaattggcgcttatgaaggaattagtggatttgcttggcctcgaacgcttggaagttcccggtttcgaggcagacgacgtattagcgactctcgcaaagaaagccgaacgtgagggctatgaagtccagatcttgacagcagatcgcgatcttttccagcttttatctccgcgcatctcggtgttacacccggaagggcatcgtatcaccccggaatggctctgggagaaatatggtttgcgtcccgaacaatgggtggattttcgcgccttagcaggcgatccgagcgacaatattccgggagttaaaggtatcggcgagaagacggcgctcaagctccttaaagaatgggggtcgttggagaacttgcttaagaatttagatcaggtcaaaccagagtcagtgcgtgagaagattcttgcacacctcgaagacctcaaattaagccgcgaattgtcccgtgtacgcaccgatttgccgctcgaagttgatttccgtggtcgccgcgaacctgactgggagggtcttaaagcgtttttagagcgtcttgaatttggttcgctcttgcatgaattcggccttttagaaagcccgttaccagccgaagaagcaccttggccaccgcccgaaggcgcgtttttaggttaccgtttgagtcgcccggaaccgatgtgggccgaattatcggctcttgcagcgtctgcccagggacgtgtgtatcgcgcggaagaccctcatggtgcgctccgtggcctcaaagaagtccgtggactccttgccaaagacttagctgttgttgcattgcgcgaaggtcttgatttacctccgactgatgatccaatgcttcttgcgtacctcttggacccgtcaaacacgacgcccgaaggcgtagcccgtcgttacggcggcgagtggaccgaagatgcaggcgagcgcgcgttattggccgaacgtttgcacgccaatttattaggacgtttgcaaggcgaggaacgtctcctctggctttacgaagaagtggagaaaccattgagtcgcgtgctcgcgcatatggaagctaccggtgtcaaattagacgtggcgtatttggaggctctcagccttgaagttgctgccgaaatgcgccgcttggaggaagaagtattccgtttagcaggccactcctttaaccttaattctcgcgatcagttagaacgtgtgttgttcgatgaacttggtctccctcctatcggcaagacagagaagaccggtaaacgtagcacttcagcggcggttttagaagctcttcgcgaagtccatcccattgtggacaagatcttgcagtaccgcgaactcgcgaaattgaaaggcacctatattgaccctcttccggcattagtccacccgaaaacgggacgcctccatacccgcttcaaccaaacagccacggcgaccggtcgtttgtcctcctctgatccaaaccttcagaatattccagtacgtaccccattgggccagaagatccgccgcgcgtttgtagctgaggagggttggcgtttagtggccctcgattatagccaaattgaattacgtgtccttgcccatctttctggcgatgagaacctcatccgcgtgtttcaggaaggcaaagacattcacactcaaacggcaagctggatgtttggattatcagcagaagcgatcgatcctttgatgcgtcgtgcagcgaagaccgttaatttcggtgttctctacggtatgagtgcccatcgtttgtcgcaggaattaggcattccctatgaagaagctgcggcgttcattcagcgctactttcaaagctatcccaaagttaaagcatggatcgagaagactctcgaagaaggccgcacacgtggttacgtagagaccttatttggacgtcgccgctatgttcccgatttaaacgctcgcgtgaaatctgtccgtgaagccgccgaacgcatggcgttcaacatgcctgtacagggcacggcagctgacctcatgaaacttgcaatggtgcgcctttttccacaattgcgtgaagttggtgcccgcatgctcttgcaggtccacgatgaactcttgttagaagcgccaaaagagcgtgcggaagaggtggcagccctcgcgaaagaggttatggaaggcgtgtggcccttagcggtgcctcttgaagtcgaagttggtattggcgaggattggttggctgccaaaggataatga

SEQ ID NO: 1038 - protein, 841 aa, synthetic construct
  REGION 1..841: note = Variant of DNA polymerase I from Thermus sp. strain 2.9
MHHHHHHGGSGMLPLFEPKGRVLLVDGHHLAYRNFFALKGLTTSRGEPVQGVYGFAKSLLKALKEDGDVVIVVFDAKAPSFRHEAYEAYKAGRAPTPEDFPRQLALMKELVDLLGLERLEVPGFEADDVLATLAKKAEREGYEVQILTADRDLFQLLSPRISVLHPEGHRITPEWLWEKYGLRPEQWVDFRALAGDPSDNIPGVKGIGEKTALKLLKEWGSLENLLKNLDQVKPESVREKILAHLEDLKLSRELSRVRTDLPLEVDFRGRREPDWEGLKAFLERLEFGSLLHEFGLLESPLPAEEAPWPPPEGAFLGYRLSRPEPMWAELSALAASAQGRVYRAEDPHGALRGLKEVRGLLAKDLAVVALREGLDLPPTDDPMLLAYLLDPSNTTPEGVARRYGGEWTEDAGERALLAERLHANLLGRLQGEERLLWLYEEVEKPLSRVLAHMEATGVKLDVAYLEALSLEVAAEMRRLEEEVFRLAGHSFNLNSRDQLERVLFDELGLPPIGKTEKTGKRSTSAAVLEALREVHPIVDKILQYRELAKLKGTYIDPLPALVHPKTGRLHTRFNQTATATGRLSSSDPNLQNIPVRTPLGQKIRRAFVAEEGWRLVALDYSQIELRVLAHLSGDENLIRVFQEGKDIHTQTASWMFGLSAEAIDPLMRRAAKTVNFGVLYGMSAHRLSQELGIPYEEAAAFIQRYFQSYPKVKAWIEKTLEEGRTRGYVETLFGRRRYVPDLNARVKSVREAAERMAFNMPVQGTAADLMKLAMVRLFPQLREVGARMLLQVHDELLLEAPKERAEEVAALAKEVMEGVWPLAVPLEVEVGIGEDWLAAKG

SEQ ID NO: 1039 - DNA, 2529 bp, synthetic construct
  misc_feature 1..2529: note = Variant of DNA polymerase I from Thermus sp. strain 2.9
  source 1..2529: mol_type = other DNA
atgcaccatcatcatcatcatggcggtagcggcatgttaccgttgttcgaacctaaaggtcgcgtgcttctggttgatggccatcatctcgcgtatcgtaacttctttgccctgaaaggattaaccaccagccgtggcgagccggtacagggtgtctacggctttgcaaagtcgctcctgaaagctctgaaagaagacggtgatgtggtgattgttgtctttgatgcgaaagcgccaagttttcgccacgaagcgtacgaagcttacaaagccgggcgtgctccaacgccggaagactttcctcgccaattggcgcttatgaaggaattagtggatttgcttggcctcgaacgcttggaagttcccggtttcgaggcagacgacgtattagcgactctcgcaaagaaagccgaacgtgagggctatgaagtccagatcttgacagcagatcgcgatcttttccagcttttatctccgcgcatctcggtgttacacccggaagggcatcgtatcaccccggaatggctctgggagaaatatggtttgcgtcccgaacaatgggtggattttcgcgccttagcaggcgatccgagcgacaatattccgggagttaaaggtatcggcgagaagacggcgctcaagctccttaaagaatgggggtcgttggagaacttgcttaagaatttagatcaggtcaaaccagagtcagtgcgtgagaagattcttgcacacctcgaagacctcaaattaagccgcgaattgtcccgtgtacgcaccgatttgccgctcgaagttgatttccgtcgtcgccgcgaacctgactgggagggtcttaaagcgtttttagagcgtcttgaatttggttcgctcttgcatgaattcggccttttagaaagcccgttaccagccgaagaagcaccttggccaccgcccgaaggcgcgtttttaggttaccgtttgagtcgcccggaaccgatgtgggccgaattattggctcttgcagcgtctgcccagggacgtgtgtatcgcgcggaagaccctcatggtgcgctccgtggcctcaaagaagtccgtggactccttgccaaagacttagctgttgttgcattgcgcgaaggtcttgatttacctccgactgatgatccaatgcttcttgcgtacctcttggacccgtcaaacacgacgcccgaaggcgtagcccgtcgttacggcggcgagtggaccgaagatgcaggcgagcgcgcgttattggccgaacgtttgcacgccaatttattaggacgtttgcaaggcgaggaacgtctcctctggctttacgaagaagtggagaaaccattgagtcgcgtgctcgcgcatatggaagctaccggtgtcaaattagacgtggcgtatttggaggcactcagccttgaagttgctgccgaaatgcgccgcttggaggaagaagtattccgtttagcaggccactcctttaaccttaattctcgcgatcagttagaacgtgtgttgttcgatgaacttggtctccctcctatcggcaagacagagaagaccggtaaacgtagcacttcagcggcggttttagaagctcttcgcgaagtccatcccattgtggacaagatcttgcagtaccgcgaactcgcgaaattgaaaggcacctatattgaccctcttccggcattagtccacccgaaaacgggacgcctccatacccgcttcaaccaaacagccacggcgaccggtcgtttgtcctcctctgatccaaaccttcagaatattccagtacgtaccccattgggccagaagatccgccgcgcgtttgtagctgaggagggttggcgtttagtggccctcgattatagccaaattgaattacgtgtccttgcccatctttctggcgatgagaacctcatccgcgtgtttcaggaaggcaaagacattcacactcaaacggcaagctggatgtttggattatcagctgaagcgatcgatcctttgatgcgtcgtgcagcgaagaccattaatttcggtgttctctacggtatgagtgcccatcgtttgtcgcaggaattaggcattccctatgaagaagctgcggcgttcattcagcgctactttcaaagctatcccaaagttaaagcatggatcgagaagactctcgaagaaggccgcacacgtggttacgtagagaccttatttggacgtcgccgctatgttcccgatttaaacgctcgcgtgaaatctgtccgtgaagccgccgaacgcatggcgttcaacatgcctgtacagggcacggcagctgacctcatgaaacttgcaatggtgcgcctttttccacaattgcgtgaagttggtgcccgcatgctcttgcaggtccacgatgaactcttgttagaagcgccaaaagagcgtgcggaagaggtggcagccctcgcgaaagaggttatggaaggcgtgtggcccttagcggtgcctcttgaagtcgaagttggtattggcgaggattggttggctgccaaaggataatga

SEQ ID NO: 1040 - protein, 841 aa, synthetic construct
  REGION 1..841: note = Variant of DNA polymerase I from Thermus sp. strain 2.9
MHHHHHHGGSGMLPLFEPKGRVLLVDGHHLAYRNFFALKGLTTSRGEPVQGVYGFAKSLLKALKEDGDVVIVVFDAKAPSFRHEAYEAYKAGRAPTPEDFPRQLALMKELVDLLGLERLEVPGFEADDVLATLAKKAEREGYEVQILTADRDLFQLLSPRISVLHPEGHRITPEWLWEKYGLRPEQWVDFRALAGDPSDNIPGVKGIGEKTALKLLKEWGSLENLLKNLDQVKPESVREKILAHLEDLKLSRELSRVRTDLPLEVDFRRRREPDWEGLKAFLERLEFGSLLHEFGLLESPLPAEEAPWPPPEGAFLGYRLSRPEPMWAELLALAASAQGRVYRAEDPHGALRGLKEVRGLLAKDLAVVALREGLDLPPTDDPMLLAYLLDPSNTTPEGVARRYGGEWTEDAGERALLAERLHANLLGRLQGEERLLWLYEEVEKPLSRVLAHMEATGVKLDVAYLEALSLEVAAEMRRLEEEVFRLAGHSFNLNSRDQLERVLFDELGLPPIGKTEKTGKRSTSAAVLEALREVHPIVDKILQYRELAKLKGTYIDPLPALVHPKTGRLHTRFNQTATATGRLSSSDPNLQNIPVRTPLGQKIRRAFVAEEGWRLVALDYSQIELRVLAHLSGDENLIRVFQEGKDIHTQTASWMFGLSAEAIDPLMRRAAKTINFGVLYGMSAHRLSQELGIPYEEAAAFIQRYFQSYPKVKAWIEKTLEEGRTRGYVETLFGRRRYVPDLNARVKSVREAAERMAFNMPVQGTAADLMKLAMVRLFPQLREVGARMLLQVHDELLLEAPKERAEEVAALAKEVMEGVWPLAVPLEVEVGIGEDWLAAKG

SEQ ID NO: 1041 - DNA, 2529 bp, synthetic construct
  misc_feature 1..2529: note = Variant of DNA polymerase I from Thermus sp. strain 2.9
  source 1..2529: mol_type = other DNA
atgcaccatcatcatcatcatggcggtagcggcatgttaccgttgttcgaacctaaaggtcgcgtgcttctggttgatggccatcatctcgcgtatcgtaacttctttgccctgaaaggattaaccaccagccgtggcgagccggtacagggtgtctacggctttgcaaagtcgctcctgaaagctctgaaagaagacggtgatgtggtgattgttgtctttgatgcgaaagcgccaagttttcgccacgaagcgtacgaagcttacaaagccgggcgtgctccaacgccggaagactttcctcgccaattggcgcttatgaaggaattagtggatttgcttggcctcgaacgcttggaagttcccggtttcgaggcagacgacgtattagcgactctcgcaaagaaagccgaacgtgagggctatgaagtccagatcttgacagcagatcgcgatcttttccagcttttatctccgcgcatctcggtgttacacccggaagggcatcgtatcaccccggaatggctctgggagaaatatggtttgcgtcccgaacaatgggtggattttcgcgccttagcaggcgatccgagcgacaatattccgggagttaaaggtatcggcgagaagacggcgctcaagctccttaaagaatgggggtcgttggagaacttgcttaagaatttagatcaggtcaaaccagagtcagtgcgtgagaagattcttgcacacctcgaagacctcaaattaagccgcgaattgtcccgtgtacgcaccgatttgccgctcgaagttgatttccgtggccgccgcgaacctgactgggagggtcttaaagcgtttttagagcgtcttgaatttggttcgctcttgcatgaattcggccttttagaaagcccgttaccagccgaagaagcaccttggccaccgcccgaaggcgcgtttttaggttaccgtttgagtcgcccggaaccgatgtgggccgaattattggctcttgcagcgtctgcccagggacgtgtgtatcgcgcggaagaccctcatggtgcgctccgcggcctcaaagaagtccgtggactccttgccaaagacttagctgttgttgcattgcgcgaaggtcttgatttacctccgactgatgatccaatgcttcttgcgtacctcttggacccgtcaaacacgacgcccgaaggcgtagcccgtcgttacggcggcgagtggaccgaagatgcaggcgagcgcgcgttattggccgaacgtttgcacgccaatttattaggacgtttgcaaggcgagtctcgtctcctctggctttacgaagaagtggagaaaccattgagtcgcgtgctcgcgcatatggaagctaccggtgtcaaattagacgtggcgtatttggaggcactcagccttgaagttgctgccgaaatgcgccgcttggaggaagaagtattccgtttagcaggccactcctttaaccttaattctcgcgatcagttagaacgtgtgttgttcgatgaacttggtctccctcctatcggcaagacagagaagaccggtaaacgtagcacttcagcggcggttttagaagctcttcgcgaagtccatcccattgtggacaagatcttgcagtaccgcgaactcgcgaaattgaaaggcacctatattgaccctcttccggcattagtccacccgaaaacgggacgcctccatacccgcttcaaccaaacagccacggcgaccggtcgtttgtcctcctctgatccaaaccttcagaatattccagtacgtaccccattgggccagaagatccgccgcgcgtttgtagctgaggagggttggcgtttagtggccctcgattatagccaaattgaattacgtgtccttgcccatctttctggcgatgagaacctcatccgcgtgtttcaggaaggcaaagacattcacactcaaacggcaagctggatgtttggattatcagctgaagcgatcgatcctttgatgcgtcgtgcagcgaagaccatcaatttcggtgttctctacggtatgagtgcccatcgtttgtcgcaggaattaggcattccctatgaagaagctgcggcgttcattcagcgctactttcaaagctatcccaaagttaaagcatggatcgagaagactctcgaagaaggccgcacacgtggttacgtagagaccttatttggacgtcgccgctatgttcccgatttaaacgctcgcgtgaaatctgtccgtgaagccgccgaacgcatggcgttcaacatgcctgtacagggcacggcagctgacctcatgaaacttgcaatggtgcgcctttttccacaattgcgtgaagttggtgcccgcatgctcttgcaggtccacgatgaactcttgttagaagcgccaaaagagcgtgcggaagaggtggcagccctcgcgaaagaggttatggaaggcgtgtggcccttagcggtgcctcttgaagtcgaagttggtattggcgaggattggttggctgccaaaggataatga

SEQ ID NO: 1042 - protein, 841 aa, synthetic construct
  REGION 1..841: note = Variant of DNA polymerase I from Thermus sp. strain 2.9
MHHHHHHGGSGMLPLFEPKGRVLLVDGHHLAYRNFFALKGLTTSRGEPVQGVYGFAKSLLKALKEDGDVVIVVFDAKAPSFRHEAYEAYKAGRAPTPEDFPRQLALMKELVDLLGLERLEVPGFEADDVLATLAKKAEREGYEVQILTADRDLFQLLSPRISVLHPEGHRITPEWLWEKYGLRPEQWVDFRALAGDPSDNIPGVKGIGEKTALKLLKEWGSLENLLKNLDQVKPESVREKILAHLEDLKLSRELSRVRTDLPLEVDFRGRREPDWEGLKAFLERLEFGSLLHEFGLLESPLPAEEAPWPPPEGAFLGYRLSRPEPMWAELLALAASAQGRVYRAEDPHGALRGLKEVRGLLAKDLAVVALREGLDLPPTDDPMLLAYLLDPSNTTPEGVARRYGGEWTEDAGERALLAERLHANLLGRLQGESRLLWLYEEVEKPLSRVLAHMEATGVKLDVAYLEALSLEVAAEMRRLEEEVFRLAGHSFNLNSRDQLERVLFDELGLPPIGKTEKTGKRSTSAAVLEALREVHPIVDKILQYRELAKLKGTYIDPLPALVHPKTGRLHTRFNQTATATGRLSSSDPNLQNIPVRTPLGQKIRRAFVAEEGWRLVALDYSQIELRVLAHLSGDENLIRVFQEGKDIHTQTASWMFGLSAEAIDPLMRRAAKTINFGVLYGMSAHRLSQELGIPYEEAAAFIQRYFQSYPKVKAWIEKTLEEGRTRGYVETLFGRRRYVPDLNARVKSVREAAERMAFNMPVQGTAADLMKLAMVRLFPQLREVGARMLLQVHDELLLEAPKERAEEVAALAKEVMEGVWPLAVPLEVEVGIGEDWLAAKG

SEQ ID NO: 1043 - DNA, 2529 bp, synthetic construct
  misc_feature 1..2529: note = Variant of DNA polymerase I from Thermus sp. strain 2.9
  source 1..2529: mol_type = other DNA
atgcaccatcatcatcatcatggcggtagcggcatgttagttttgttcgaacctaaaggtcgcgtgcttctggttgatggccatcatctcgcgtatcgtaacttctttgccctgaaaggattaaccaccagccgtggcgagccggtacagggtgtctacggctttgcaaagtcgctcctgaaagctctgaaagaagacggtgatgtggtgattgttgtctttgatgcgaaagcgccaagttttcgccacgaagcgtacgaagcttacaaagccgggcgtgctccaacgccggaagactttcctcgccaattggcgcttatgaaggaattagtggatttgcttggcctcgaacgcttggaagttcccggtttcgaggcagacgacgtattagcgactctcgcaaagaaagccgaacgtgagggctatgaagtccagatcttgacagcagatcgcgatcttttccagcttttatctccgcgcatctcggtgttacacccggaagggcatcgtatcaccccggaatggctctgggagaaatatggtttgcgtcccgaacaatgggtggattttcgcgccttagcaggcgatccgagcgacaatattccgggagttaaaggtatcggcgagaagacggcgctcaagctccttaaagaatgggggtcgttggagaacttgcttaagaatttagatcaggtcaaaccagagtcagtgcgtgagaagattcttgcacacctcgaagacctcaaattaagccgcgaattgtcccgtgtacgcaccgatttgccgctcgaagttgatttccgtggccgccgcgaacctgactgggagggtcttaaagcgtttttagagcgtcttgaatttggttcgctcttgcatgaattcggccttttagaaagcccgttaccagccgaagaagcaccttggccaccgcccgaaggcgcgtttttaggttaccgtttgagtcgcccggaaccgatgtgggccgaattattggctcttgcagcgtctgcccagggacgtgtgtatcgcgcggaagaccctcatggtgcgctccgcggcctcaaagaagtccgtggactccttgccaaagacttagctgttgttgcattgcgcgaaggtcttgatttacctccgactgatgatccaatgcttcttgcgtacctcttggacccgtcaaacacgacgcccgaaggcgtagcccgtcgttacggcggcgagtggaccgaagatgcaggcgagcgcgcgttattggccgaacgtttgcacgccaatttattaggacgtttgcaaggcgaggaacgtctcctctggctttacgaagaagtggagaaaccattgagtcgcgtgctcgcgcatatggaagctaccggtgtcaaattagacgtggcgtatttggaggcactcagccttgaagttgctgccgaaatgcgccgcttggaggaagaagtattccgtttagcaggccactcctttaaccttaattctcgcgatcagttagaacgtgtgttgttcgatgaacttggtctccctcctatcggcaagacagagaagaccggtaaacgtagcacttcagcggcggttttagaagctcttcgcgaagtccatcccattgtggacaagatcttgcagtaccgcgaactcgcgaaattgaaaggcacctatattgaccctcttccggcattagtccacccgaaaacgggacgcctccatacccgcttcaaccaaacagccacggcgaccggtcgtttgtcctcctctgatccaaaccttcagaatattccagtacgtaccccattgggccagaagatccgccgcgcgtttgtagctgaggagggttggcgtttagtggccctcgattatagccaaattgaattacgtgtccttgcccatctttctggcgatgagaacctcatccgcgtgtttcaggaaggcaaagacattcacactcaaacggcaagctggatgtttggattatcagctgaagcgatcgatcctttgatgcgtcgtgcagcgaagaccatcaatttcggtgttctctacggtatgagtgcccatcgtttgtcgcaggaattaggcattccctatgaagaagctgcggcgttcattcagcgctactttcaaagctatcccaaagttaaagcatggatcgagaagactctcgaagaaggccgcacacgtggttacgtagagaccttatttggacgtcgccgctatgttcccgatttaaacgctcgcgtgaaatctgtccgtgaagccgccgaacgcatggcgttcaacatgcctgtacagggcacggcagctgacctcatgaaacttgcaatggtgcgcctttttccacaattgcgtgaagttggtgcccgcatgctcttgcaggtccacgatgaactcttgttagaagcgccaaaagagcgtgcggaagaggtggcagccctcgcgaaagaggttatggaaggcgtgtggcccttagcggtgcctcttgaagtcgaagttggtattggcgaggattggttggctgccaaaggataatga

SEQ ID NO: 1044 - protein, 841 aa, synthetic construct
  REGION 1..841: note = Variant of DNA polymerase I from Thermus sp. strain 2.9
MHHHHHHGGSGMLVLFEPKGRVLLVDGHHLAYRNFFALKGLTTSRGEPVQGVYGFAKSLLKALKEDGDVVIVVFDAKAPSFRHEAYEAYKAGRAPTPEDFPRQLALMKELVDLLGLERLEVPGFEADDVLATLAKKAEREGYEVQILTADRDLFQLLSPRISVLHPEGHRITPEWLWEKYGLRPEQWVDFRALAGDPSDNIPGVKGIGEKTALKLLKEWGSLENLLKNLDQVKPESVREKILAHLEDLKLSRELSRVRTDLPLEVDFRGRREPDWEGLKAFLERLEFGSLLHEFGLLESPLPAEEAPWPPPEGAFLGYRLSRPEPMWAELLALAASAQGRVYRAEDPHGALRGLKEVRGLLAKDLAVVALREGLDLPPTDDPMLLAYLLDPSNTTPEGVARRYGGEWTEDAGERALLAERLHANLLGRLQGEERLLWLYEEVEKPLSRVLAHMEATGVKLDVAYLEALSLEVAAEMRRLEEEVFRLAGHSFNLNSRDQLERVLFDELGLPPIGKTEKTGKRSTSAAVLEALREVHPIVDKILQYRELAKLKGTYIDPLPALVHPKTGRLHTRFNQTATATGRLSSSDPNLQNIPVRTPLGQKIRRAFVAEEGWRLVALDYSQIELRVLAHLSGDENLIRVFQEGKDIHTQTASWMFGLSAEAIDPLMRRAAKTINFGVLYGMSAHRLSQELGIPYEEAAAFIQRYFQSYPKVKAWIEKTLEEGRTRGYVETLFGRRRYVPDLNARVKSVREAAERMAFNMPVQGTAADLMKLAMVRLFPQLREVGARMLLQVHDELLLEAPKERAEEVAALAKEVMEGVWPLAVPLEVEVGIGEDWLAAKG

SEQ ID NO: 1045 - DNA, 2529 bp, synthetic construct
  misc_feature 1..2529: note = Variant of DNA polymerase I from Thermus sp. strain 2.9
  source 1..2529: mol_type = other DNA
atgcaccatcatcatcatcatggcggtagcggcatgttaccgttgttcgaacctaaaggtcgcgtgcttctggttgatggccatcatctcgcgtatcgtaacttctttgccctgaaaggattaaccaccagccgtggcgagccggtacagggtgtctacggctttgcaaagtcgctcctgaaagctctgaaagaagacggtgatgtggtgattgttgtctttgatgcgaaagcgccaagttttcgccacgaagcgtacgaagcttacaaagccgggcgtgctccaacgccggaagactttcctcgccaattggcgcttatgaaggaattagtggatttgcttggcctcgaacgcttggaagttcccggtttcgaggcagacgacgtattagcgactctcgcaaagaaagccgaacgtgagggctatgaagtccagatcttgacagcagatcgcgatcttttccagcttttatctccgcgcatctcggtgttacacccggaagggcatcgtatcaccccggaatggctctgggagaaatatggtttgcgtcccgaacaatgggtggattttcgcgccttagcaggcgatccgagcgacaatattccgggagttaaaggtatcggcgagaagacggcgctcaagctccttaaagaatgggggtcgttggagaacttgcttaagaatttagatcaggtcaaaccagagtcagtgcgtgagaagattcttgcacacctcgaagacctcaaattaagccgcgaattgtcccgtgtacgcaccgatttgccgctcgaagttgatttccgtggccgccgcgaacctgactgggagggtcttaaagcgtttttagagcgtcttgaatttggttcgctcttgcatgaattcggccttttagaaagcccgttaccagccgaagaagcaccttggccaccgcccgaaggcgcgtttttaggttaccgtttgagtcgcccggaaccgatgtgggccgaattattggctcttgcagcgtctgcccagggacgtgtgtatcgcgcggaagaccctcatggtgcgctccgcggcctcaaagaagtccgtggactccttgccaaagacttagctgttgttgcattgcgcgaaggtcttgatttacctccgactgatgatccaatgcttcttgcgtacctcttggacccgtcaaacacgacgcccgaaggcgtagcccgtcgttacggcggcgagtggaccgaagatgcaggcgagcgcgcgttattggccgaacgtttgcacgccaatttattaggacgtttgcaaggcgaggaacgtctcctctggctttacgaagaagtggagaaaccattgagtcgcgtgctcgcgcatatggaagctaccggtgtcaaattagacgtggcgtatttggaggcactcagccttgaagttgctgccgaaatgcgcggtttggaggaagaagtattccgtttagcaggccactcctttaaccttaattctcgcgatcagttagaacgtgtgttgttcgatgaacttggtctccctcctatcggcaagacagagaagaccggtaaacgtagcacttcagcggcggttttagaagctcttcgcgaagtccatcccattgtggacaagatcttgcagtaccgcgaactcgcgaaattgaaaggcacctatattgaccctcttccggcattagtccacccgaaaacgggacgcctccatacccgcttcaaccaaacagccacggcgaccggtcgtttgtcctcctctgatccaaaccttcagaatattccagtacgtaccccattgggccagaagatccgccgcgcgtttgtagctgaggagggttggcgtttagtggccctcgattatagccaaattgaattacgtgtccttgcccatctttctggcgatgagaacctcatccgcgtgtttcaggaaggcaaagacattcacactcaaacggcaagctggatgtttggattatcagctgaagcgatcgatcctttgatgcgtcgtgcagcgaagaccatcaatttcggtgttctctacggtatgagtgcccatcgtttgtcgcaggaattaggcattccctatgaagaagctgcggcgttcattcagcgctactttcaaagctatcccaaagttaaagcatggatcgagaagactctcgaagaaggccgcacacgtggttacgtagagaccttatttggacgtcgccgctatgttcccgatttaaacgctcgcgtgaaatctgtccgtgaagccgccgaacgcatggcgttcaacatgcctgtacagggcacggcagctgacctcatgaaacttgcaatggtgcgcctttttccacaattgcgtgaagttggtgcccgcatgctcttgcaggtccacgatgaactcttgttagaagcgccaaaagagcgtgcggaagaggtggcagccctcgcgaaagaggttatggaaggcgtgtggcccttagcggtgcctcttgaagtcgaagttggtattggcgaggattggttggctgccaaaggataatga

SEQ ID NO: 1046 - protein, 841 aa, synthetic construct
  REGION 1..841: note = Variant of DNA polymerase I from Thermus sp. strain 2.9
MHHHHHHGGSGMLPLFEPKGRVLLVDGHHLAYRNFFALKGLTTSRGEPVQGVYGFAKSLLKALKEDGDVVIVVFDAKAPSFRHEAYEAYKAGRAPTPEDFPRQLALMKELVDLLGLERLEVPGFEADDVLATLAKKAEREGYEVQILTADRDLFQLLSPRISVLHPEGHRITPEWLWEKYGLRPEQWVDFRALAGDPSDNIPGVKGIGEKTALKLLKEWGSLENLLKNLDQVKPESVREKILAHLEDLKLSRELSRVRTDLPLEVDFRGRREPDWEGLKAFLERLEFGSLLHEFGLLESPLPAEEAPWPPPEGAFLGYRLSRPEPMWAELLALAASAQGRVYRAEDPHGALRGLKEVRGLLAKDLAVVALREGLDLPPTDDPMLLAYLLDPSNTTPEGVARRYGGEWTEDAGERALLAERLHANLLGRLQGEERLLWLYEEVEKPLSRVLAHMEATGVKLDVAYLEALSLEVAAEMRGLEEEVFRLAGHSFNLNSRDQLERVLFDELGLPPIGKTEKTGKRSTSAAVLEALREVHPIVDKILQYRELAKLKGTYIDPLPALVHPKTGRLHTRFNQTATATGRLSSSDPNLQNIPVRTPLGQKIRRAFVAEEGWRLVALDYSQIELRVLAHLSGDENLIRVFQEGKDIHTQTASWMFGLSAEAIDPLMRRAAKTINFGVLYGMSAHRLSQELGIPYEEAAAFIQRYFQSYPKVKAWIEKTLEEGRTRGYVETLFGRRRYVPDLNARVKSVREAAERMAFNMPVQGTAADLMKLAMVRLFPQLREVGARMLLQVHDELLLEAPKERAEEVAALAKEVMEGVWPLAVPLEVEVGIGEDWLAAKG

SEQ ID NO: 1047 - DNA, 2529 bp, synthetic construct
  misc_feature 1..2529: note = Variant of DNA polymerase I from Thermus sp. strain 2.9
  source 1..2529: mol_type = other DNA
atgcaccatcatcatcatcatggcggtagcggcatgttaccgttgttcgaacctaaaggtcgcgtgcttctggttgatggccatcatctcgcgtatcgtaacttctttgccctgaaaggattaaccaccagccgtggcgagccggtacagggtgtctacggctttgcaaagtcgctcctgaaagctctgaaagaagacggtgatgtggtgattgttgtctttgatgcgaaagcgccaagttttcgccacgaagcgtacgaagcttacaaagccgggcgtgctccaacgccggaagactttcctcgccaattggcgcttatgaaggaattagtggatttgcttggcctcgaacgcttggaagttcccggtttcgaggcagacgacgtattagcgactctcgcaaagaaagccgaacgtgagggctatgaagtccagatcttgacagcagatcgcgatcttttccagcttttatctccgcgcatctcggtgttacacccggaagggcatcgtatcaccccggaatggctctgggagaaatatggtttgcgtcccgaacaatgggtggattttcgcgccttagcaggcgatccgagcgacaatattccgggagttaaaggtatcggcgagaagacggcgctcaagctccttaaagaatgggggtcgttggagaacttgcttaagaatttagatcaggtcaaaccagagtcagtgcgtgagaagattcttgcacacctcgaagacctcaaattaagccgcgaattgtcccgtgtacgcaccgatttgccgctcgaagttgatttccgtggccgccgcgaacctgactgggagggtcttaaagcgtttttagagcgtcttgaatttggttcgctcttgcatgaattcggccttttagaaagcccgttaccagccgaagaagcaccttggccaccgcccgaaggcgcgtttttaggttaccgtttgagtcgcccggaaccgatgtgggccgaattattggctcttgcagcgtctgcccagggacgtgtgtatcgcgcggaagaccctcatggtgcgctccgcggcctcaaagaagtccgtggactccttgccaaagacttagctgttgttgcattgcgcgaaggtcttgatttacctccgactgatgatccaatgcttcttgcgtacctcttggacccgtcaaacacgacgcccgaaggcgtagcccgtcgttacggcggcgagtggaccgaagatgcaggcgagcgcgcgttattggccgaacgtttgcacgccaatttattaggacgtttgcaaggcgaggaacgtctcctctggctttacgaagaagtggagaaaccattgagtcgcgtgctcgcgcatatggaagctaccggtgtcaaattagacgtggcgtatttggaggcactcagccttgaagttgctgccgaaatgcgccgcttggaggaagaagtattccgtttagcaggccactcctttaaccttaattctcgcgatcagttagaacgtgtgttgttcgatgaacttggtctccctcctatcggcaagacagagaagaccggtaaacgtagcacttcagcggcggttttagaagctcttcgcgaagtccatcccattgtggacaagatcttgcagtaccgcgaactcgcgaaattgaaaggcacctatattgaccctcttccggcattagtccacccgaaaacgggacgcctccatacccgcttcaaccaaacagccacggcgaccggtcgtttgtcctcctctgatccaaaccttcagaatattccagtacgtaccggtttgggccagaagatccgccgcgcgtttgtagctgaggagggttggcgtttagtggccctcgattatagccaaattgaattacgtgtccttgcccatctttctggcgatgagaacctcatccgcgtgtttcaggaaggcaaagacattcacactcaaacggcaagctggatgtttggattatcagctgaagcgatcgatcctttgatgcgtcgtgcagcgaagaccatcaatttcggtgttctctacggtatgagtgcccatcgtttgtcgcaggaattaggcattccctatgaagaagctgcggcgttcattcagcgctactttcaaagctatcccaaagttaaagcatggatcgagaagactctcgaagaaggccgcacacgtggttacgtagagaccttatttggacgtcgccgctatgttcccgatttaaacgctcgcgtgaaatctgtccgtgaagccgccgaacgcatggcgttcaacatgcctgtacagggcacggcagctgacctcatgaaacttgcaatggtgcgcctttttccacaattgcgtgaagttggtgcccgcatgctcttgcaggtccacgatgaactcttgttagaagcgccaaaagagcgtgcggaagaggtggcagccctcgcgaaagaggttatggaaggcgtgtggcccttagcggtgcctcttgaagtcgaagttggtattggcgaggattggttggctgccaaaggataatga

SEQ ID NO: 1048 - protein, 841 aa, synthetic construct
  REGION 1..841: note = Variant of DNA polymerase I from Thermus sp. strain 2.9
MHHHHHHGGSGMLPLFEPKGRVLLVDGHHLAYRNFFALKGLTTSRGEPVQGVYGFAKSLLKALKEDGDVVIVVFDAKAPSFRHEAYEAYKAGRAPTPEDFPRQLALMKELVDLLGLERLEVPGFEADDVLATLAKKAEREGYEVQILTADRDLFQLLSPRISVLHPEGHRITPEWLWEKYGLRPEQWVDFRALAGDPSDNIPGVKGIGEKTALKLLKEWGSLENLLKNLDQVKPESVREKILAHLEDLKLSRELSRVRTDLPLEVDFRGRREPDWEGLKAFLERLEFGSLLHEFGLLESPLPAEEAPWPPPEGAFLGYRLSRPEPMWAELLALAASAQGRVYRAEDPHGALRGLKEVRGLLAKDLAVVALREGLDLPPTDDPMLLAYLLDPSNTTPEGVARRYGGEWTEDAGERALLAERLHANLLGRLQGEERLLWLYEEVEKPLSRVLAHMEATGVKLDVAYLEALSLEVAAEMRRLEEEVFRLAGHSFNLNSRDQLERVLFDELGLPPIGKTEKTGKRSTSAAVLEALREVHPIVDKILQYRELAKLKGTYIDPLPALVHPKTGRLHTRFNQTATATGRLSSSDPNLQNIPVRTGLGQKIRRAFVAEEGWRLVALDYSQIELRVLAHLSGDENLIRVFQEGKDIHTQTASWMFGLSAEAIDPLMRRAAKTINFGVLYGMSAHRLSQELGIPYEEAAAFIQRYFQSYPKVKAWIEKTLEEGRTRGYVETLFGRRRYVPDLNARVKSVREAAERMAFNMPVQGTAADLMKLAMVRLFPQLREVGARMLLQVHDELLLEAPKERAEEVAALAKEVMEGVWPLAVPLEVEVGIGEDWLAAKG

SEQ ID NO: 1049 - DNA, 2529 bp, synthetic construct
  misc_feature 1..2529: note = Variant of DNA polymerase I from Thermus sp. strain 2.9
  source 1..2529: mol_type = other DNA
atgcaccatcatcatcatcatggcggtagcggcatgttaccgttgttcgaacctaaaggtcgcgtgcttctggttgatggccatcatctcgcgtatcgtaacttctttgccctgaaaggattaaccaccagccgtggcgagccggtacagggtgtctacggctttgcaaagtcgctcctgaaagctctgaaagaagacggtgatgtggtgattgttgtctttgatgcgaaagcgccaagttttcgccacgaagcgtacgaagcttacaaagccgggcgtgctccaacgccggaagactttcctcgccaattggcgcttatgaaggaattagtggatttgcttggcctcgaacgcttggaagttcccggtttcgaggcagacgacgtattagcgactctcgcaaagaaagccgaacgtgagggctatgaagtccagatcttgacagcagatcgcgatcttttccagcttttatctccgcgcatctcggtgttacacccggaagggcatcgtatcaccccggaatggctctgggagaaatatggtttgcgtcccgaacaatgggtggattttcgcgccttagcaggcgatccgagcgacaatattccgggagttaaaggtatcggcgagaagacggcgctcaagctccttaaagaatgggggtcgttggagaacttgcttaagaatttagatcaggtcaaaccagagtcagtgcgtgagaagattcttgcacacctcgaagacctcaaattaagccgcgaattgtcccgtgtacgcaccgatttgccgctcgaagttgatttccgtggccgccgcgaacctgactgggagggtcttaaagcgtttttagagcgtcttgaatttggttcgctcttgcatgaattcggccttttagaaagcccgttaccagccgaagaagcaccttggccaccgcccgaaggcgcgtttttaggttaccgtttgagtcgcccggaaccgatgtgggccgaattattggctcttgcagcgtctgcccagggacgtgtgtatcgcgcggaagaccctcatggtgcgctccgcggcctcaaagaagtccgtggactccttgccaaagacttagctgttgttgcattgcgcgaaggtcttgatttacctccgactgatgatccaatgcttcttgcgtacctcttggacccgtcaaacacgacgcccgaaggcgtagcccgtcgttacggcggcgagtggaccgaagatgcaggcgagcgcgcgttattggccgaacgtttgcacgccaatttattaggacgtttgcaaggcgaggaacgtctcctctggctttacgaagaagtggagaaaccattgagtcgcgtgctcgcgcatatggaagctaccggtgtcaaattagacgtggcgtatttggaggcactcagccttgaagttgctgccgaaatgcgccgcttggaggaagaagtattccgtttagcaggccactcctttatgcttaattctcgcgatcagttagaacgtgtgttgttcgatgaacttggtctccctcctatcggcaagacagagaagaccggtaaacgtagcacttcagcggcggttttagaagctcttcgcgaagtccatcccattgtggacaagatcttgcagtaccgcgaactcgcgaaattgaaaggcacctatattgaccctcttccggcattagtccacccgaaaacgggacgcctccatacccgcttcaaccaaacagccacggcgaccggtcgtttgtcctcctctgatccaaaccttcagaatattccagtacgtaccccattgggccagaagatccgccgcgcgtttgtagctgaggagggttggcgtttagtggccctcgattatagccaaattgaattacgtgtccttgcccatctttctggcgatgagaacctcatccgcgtgtttcaggaaggcaaagacattcacactcaaacggcaagctggatgtttggattatcagctgaagcgatcgatcctttgatgcgtcgtgcagcgaagaccatcaatttcggtgttctctacggtatgagtgcccatcgtttgtcgcaggaattaggcattccctatgaagaagctgcggcgttcattcagcgctactttcaaagctatcccaaagttaaagcatggatcgagaagactctcgaagaaggccgcacacgtggttacgtagagaccttatttggacgtcgccgctatgttcccgatttaaacgctcgcgtgaaatctgtccgtgaagccgccgaacgcatggcgttcaacatgcctgtacagggcacggcagctgacctcatgaaacttgcaatggtgcgcctttttccacaattgcgtgaagttggtgcccgcatgctcttgcaggtccacgatgaactcttgttagaagcgccaaaagagcgtgcggaagaggtggcagccctcgcgaaagaggttatggaaggcgtgtggcccttagcggtgcctcttgaagtcgaagttggtattggcgaggattggttggctgccaaaggataatga

SEQ ID NO: 1050 - protein, 841 aa, synthetic construct
  REGION 1..841: note = Variant of DNA polymerase I from Thermus sp. strain 2.9
MHHHHHHGGSGMLPLFEPKGRVLLVDGHHLAYRNFFALKGLTTSRGEPVQGVYGFAKSLLKALKEDGDVVIVVFDAKAPSFRHEAYEAYKAGRAPTPEDFPRQLALMKELVDLLGLERLEVPGFEADDVLATLAKKAEREGYEVQILTADRDLFQLLSPRISVLHPEGHRITPEWLWEKYGLRPEQWVDFRALAGDPSDNIPGVKGIGEKTALKLLKEWGSLENLLKNLDQVKPESVREKILAHLEDLKLSRELSRVRTDLPLEVDFRGRREPDWEGLKAFLERLEFGSLLHEFGLLESPLPAEEAPWPPPEGAFLGYRLSRPEPMWAELLALAASAQGRVYRAEDPHGALRGLKEVRGLLAKDLAVVALREGLDLPPTDDPMLLAYLLDPSNTTPEGVARRYGGEWTEDAGERALLAERLHANLLGRLQGEERLLWLYEEVEKPLSRVLAHMEATGVKLDVAYLEALSLEVAAEMRRLEEEVFRLAGHSFMLNSRDQLERVLFDELGLPPIGKTEKTGKRSTSAAVLEALREVHPIVDKILQYRELAKLKGTYIDPLPALVHPKTGRLHTRFNQTATATGRLSSSDPNLQNIPVRTPLGQKIRRAFVAEEGWRLVALDYSQIELRVLAHLSGDENLIRVFQEGKDIHTQTASWMFGLSAEAIDPLMRRAAKTINFGVLYGMSAHRLSQELGIPYEEAAAFIQRYFQSYPKVKAWIEKTLEEGRTRGYVETLFGRRRYVPDLNARVKSVREAAERMAFNMPVQGTAADLMKLAMVRLFPQLREVGARMLLQVHDELLLEAPKERAEEVAALAKEVMEGVWPLAVPLEVEVGIGEDWLAAKG

SEQ ID NO: 1051 - DNA, 2529 bp, synthetic construct
  misc_feature 1..2529: note = Variant of DNA polymerase I from Thermus sp. strain 2.9
  source 1..2529: mol_type = other DNA
atgcaccatcatcatcatcatggcggtagcggcatgttaccgttgttcgaacctaaaggtcgcgtgcttctggttgatggccatcatctcgcgtatcgtaacttctttgccctgaaaggattaaccaccagccgtggcgagccggtacagggtgtctacggctttgcaaagtcgctcctgaaagctctgaaagaagacggtgatgtggtgattgttgtctttgatgcgaaagcgccaagttttcgccacgaagcgtacgaagcttacaaagccgggcgtgctccaacgccggaagactttcctcgccaattggcgcttatgaaggaattagtggatttgcttggcctcgaacgcttggaagttcccggtttcgaggcagacgacgtattagcgactctcgcaaagaaagccgaacgtgagggctatgaagtccagatcttgacagcagatcgcgatcttttccagcttttatctccgcgcatctcggtgttacacccggaagggcatcgtatcaccccggaatggctctgggagaaatatggtttgcgtcccgaacaatgggtggattttcgcgccttagcaggcgatccgagcgacaatattccgggagttaaaggtatcggcgagaagacggcgctcaagctccttaaagaatgggggtcgttggagaacttgcttaagaatttagatcaggtcaaaccagagtcagtgcgtgagaagattcttgcacacctcgaagacctcaaattaagccgcgaattgtcccgtgtacgcaccgatttgccgctcgaagttgatttccgtggccgccgcgaacctgactgggagggtcttaaagcgtttttagagcgtcttgaatttggttcgctcttgcatgaattcggccttttagaaagcccgttaccagccgaagaagcaccttggccaccgcccgaaggcgcgtttttaggttaccgtttgagtcgcccggaaccgatgtgggccgaattattggctcttgcagcgtctgcccagggacgtgtgtatcgcgcggaagaccctcatggtgcgctccgcggcctcaaagaagtccgtggactccttgccaaagacttagctgttgttgcattgcgcgaaggtcttgatttacctccgactgatgatccaatgcttcttgcgtacctcttggacccgtcaaacacgacgcccgaaggcgtagcccgtcgttacggcggcgagtggaccgaagatgcaggcgagcgcgcgttattggccgaacgtttgcacgccaatttattaggacgtttgcaaggcgaggaacgtctcctctggctttacgaagaagtggagaaaccattgagtcgcgtgctcgcgcatatggaagctaccggtgtcaaattagacgtggcgtatttggaggcactcagccttgaagttgctgccgaaatgcgccgcttggaggaagaagtattcgagttagcaggccactcctttaaccttaattctcgcgatcagttagaacgtgtgttgttcgatgaacttggtctccctcctatcggcaagacagagaagaccggtaaacgtagcacttcagcggcggttttagaagctcttcgcgaagtccatcccattgtggacaagatcttgcagtaccgcgaactcgcgaaattgaaaggcacctatattgaccctcttccggcattagtccacccgaaaacgggacgcctccatacccgcttcaaccaaacagccacggcgaccggtcgtttgtcctcctctgatccaaaccttcagaatattccagtacgtaccccattgggccagaagatccgccgcgcgtttgtagctgaggagggttggcgtttagtggccctcgattatagccaaattgaattacgtgtccttgcccatctttctggcgatgagaacctcatccgcgtgtttcaggaaggcaaagacattcacactcaaacggcaagctggatgtttggattatcagctgaagcgatcgatcctttgatgcgtcgtgcagcgaagaccatcaatttcggtgttctctacggtatgagtgcccatcgtttgtcgcaggaattaggcattccctatgaagaagctgcggcgttcattcagcgctactttcaaagctatcccaaagttaaagcatggatcgagaagactctcgaagaaggccgcacacgtggttacgtagagaccttatttggacgtcgccgctatgttcccgatttaaacgctcgcgtgaaatctgtccgtgaagccgccgaacgcatggcgttcaacatgcctgtacagggcacggcagctgacctcatgaaacttgcaatggtgcgcctttttccacaattgcgtgaagttggtgcccgcatgctcttgcaggtccacgatgaactcttgttagaagcgccaaaagagcgtgcggaagaggtggcagccctcgcgaaagaggttatggaaggcgtgtggcccttagcggtgcctcttgaagtcgaagttggtattggcgaggattggttggctgccaaaggataatga

SEQ ID NO: 1052 - protein, 841 aa, synthetic construct
  REGION 1..841: note = Variant of DNA polymerase I from Thermus sp. strain 2.9
MHHHHHHGGSGMLPLFEPKGRVLLVDGHHLAYRNFFALKGLTTSRGEPVQGVYGFAKSLLKALKEDGDVVIVVFDAKAPSFRHEAYEAYKAGRAPTPEDFPRQLALMKELVDLLGLERLEVPGFEADDVLATLAKKAEREGYEVQILTADRDLFQLLSPRISVLHPEGHRITPEWLWEKYGLRPEQWVDFRALAGDPSDNIPGVKGIGEKTALKLLKEWGSLENLLKNLDQVKPESVREKILAHLEDLKLSRELSRVRTDLPLEVDFRGRREPDWEGLKAFLERLEFGSLLHEFGLLESPLPAEEAPWPPPEGAFLGYRLSRPEPMWAELLALAASAQGRVYRAEDPHGALRGLKEVRGLLAKDLAVVALREGLDLPPTDDPMLLAYLLDPSNTTPEGVARRYGGEWTEDAGERALLAERLHANLLGRLQGEERLLWLYEEVEKPLSRVLAHMEATGVKLDVAYLEALSLEVAAEMRRLEEEVFELAGHSFNLNSRDQLERVLFDELGLPPIGKTEKTGKRSTSAAVLEALREVHPIVDKILQYRELAKLKGTYIDPLPALVHPKTGRLHTRFNQTATATGRLSSSDPNLQNIPVRTPLGQKIRRAFVAEEGWRLVALDYSQIELRVLAHLSGDENLIRVFQEGKDIHTQTASWMFGLSAEAIDPLMRRAAKTINFGVLYGMSAHRLSQELGIPYEEAAAFIQRYFQSYPKVKAWIEKTLEEGRTRGYVETLFGRRRYVPDLNARVKSVREAAERMAFNMPVQGTAADLMKLAMVRLFPQLREVGARMLLQVHDELLLEAPKERAEEVAALAKEVMEGVWPLAVPLEVEVGIGEDWLAAKG

SEQ ID NO: 1053 - DNA, 2529 bp, synthetic construct
  misc_feature 1..2529: note = Variant of DNA polymerase I from Thermus sp. strain 2.9
  source 1..2529: mol_type = other DNA
atgcaccatcatcatcatcatggcggtagcggcatgttaccgttgttcgaacctaaaggtcgcgtgcttctggttgatggccatcatctcgcgtatcgtaacttctttgccctgaaaggattaaccaccagccgtggcgagccggtacagggtgtctacggctttgcaaagtcgctcctgaaagctctgaaagaagacggtgatgtggtgattgttgtctttgatgcgaaagcgccaagttttcgccacgaagcgtacgaagcttacaaagccgggcgtgctccaacgccggaagactttcctcgccaattggcgcttatgaaggaattagtggatttgcttggcctcgaacgcttggaagttcccggtttcgaggcagacgacgtattagcgactctcgcaaagaaagccgaacgtgagggctatgaagtccagatcttgacagcagatcgcgatcttttccagcttttatctccgcgcatctcggtgttacacccggaagggcatcgtatcaccccggaatggctctgggagaaatatggtttgcgtcccgaacaatgggtggattttcgcgccttagcaggcgatccgagcgacaatattccgggagttaaaggtatcggcgagaagacggcgctcaagctccttaaagaatgggggtcgttggagaacttgcttaagaatttagatcaggtcaaaccagagtcagtgcgtgagaagattcttgcacacctcgaagacctcaaattaagccgcgaattgtcccgtgtacgcaccgatttgccgctcgaagttgatttccgtggtcgccgcgaacctgactgggagggtcttaaagcgtttttagagcgtcttgaatttggttcgctcttgcatgaattcggccttttagaaagcccgttaccagccgaagaagcaccttggccaccgcccgaaggcgcgtttttaggttaccgtttgagtcgcccggaaccgatgtgggccgaattatcggctcttgcagcgtctgcccagggacgtgtgtatcgcgcggaagaccctcatggtgcgctccgcggcctcaaagaagtccgtggactccttgccaaagacttagctgttgttgcattgcgcgaaggtcttgatttacctccgactgatgatccaatgcttcttgcgtacctcttggacccgtcaaacacgacgcccgaaggcgtagcccgtcgttacggcggcgagtggaccgaagatgcagctgagcgcgcgttattggccgaacgtttgcacgccaatttattaggacgtttgcaaggcgaggaacgtctcctctggctttacgaagaagtggagaaaccattgagtcgcgtgctcgcgcatatggaagctaccggtgtcaaattagacgtggcgtatttggagaacctcagccttgaagttgctgccgaaatgcgccgcttggaggaagaagtattccgtttagcaggccactcctttaaccttaattctcgcgatcagttagaacgtgtgttgttcgatgaacttggtctccctcctatcggcaagacagagaagaccggtaaacgtagcacttcagcggcggttttagaagctcttcgcgaagtccatcccattgtggacaagatcttgcagtaccgcgaactcgcgaaattgaaaggcacctatattgaccctcttccggcattagtccacccgaaaacgggacgcctccatacccgcttcaaccaaacagccacggcgaccggtcgtttgtcctcctctgatccaaaccttcagaatattccagtacgtaccccattgggccagaagatccgccgcgcgtttgtagctgaggagggttggcgtttagtggccctcgattatagccaaattgaattacgtgtccttgcccatctttctggcgatgagaacctcatccgcgtgtttcaggaaggcaaagacattcacactcaaacggcaagctggatgtttggattatcagctgaagcgatcgatcctttgatgcgtcgtgcagcgaagaccgttaatttcggtgttctctacggtatgagtgcccatcgtttgtcgcaggaattaggcattccctatgaagaagctgccgcgttcattcagaagtactttcaaagctatcccaaagttaaagcatggatcgagaagactctcgaagaaggccgcacacgtggttacgtagagaccttatttggacgtcgccgctatgttcccgatttaaacgctcgcgtgaaatctgtccgtgaagccgccgaacgcatggcgttcaacatgcctgtacagggcacggcagctgacctcatgaaacttgcaatggtgcgcctttttccacaattgcgtgaagttggtgcccgcatgctcttgcaggtccacgatgaactcttgttagaagcgccaaaagagcgtgcggaagaggtggcagccctcgcgaaagaggttatggaaggcgtgtggcccttagcggtgcctcttgaagtcgaagttggtattggcgaggattggttggctgccaaaggataatga

SEQ ID NO: 1054 - protein, 841 aa, synthetic construct
  REGION 1..841: note = Variant of DNA polymerase I from Thermus sp. strain 2.9
MHHHHHHGGSGMLPLFEPKGRVLLVDGHHLAYRNFFALKGLTTSRGEPVQGVYGFAKSLLKALKEDGDVVIVVFDAKAPSFRHEAYEAYKAGRAPTPEDFPRQLALMKELVDLLGLERLEVPGFEADDVLATLAKKAEREGYEVQILTADRDLFQLLSPRISVLHPEGHRITPEWLWEKYGLRPEQWVDFRALAGDPSDNIPGVKGIGEKTALKLLKEWGSLENLLKNLDQVKPESVREKILAHLEDLKLSRELSRVRTDLPLEVDFRGRREPDWEGLKAFLERLEFGSLLHEFGLLESPLPAEEAPWPPPEGAFLGYRLSRPEPMWAELSALAASAQGRVYRAEDPHGALRGLKEVRGLLAKDLAVVALREGLDLPPTDDPMLLAYLLDPSNTTPEGVARRYGGEWTEDAAERALLAERLHANLLGRLQGEERLLWLYEEVEKPLSRVLAHMEATGVKLDVAYLENLSLEVAAEMRRLEEEVFRLAGHSFNLNSRDQLERVLFDELGLPPIGKTEKTGKRSTSAAVLEALREVHPIVDKILQYRELAKLKGTYIDPLPALVHPKTGRLHTRFNQTATATGRLSSSDPNLQNIPVRTPLGQKIRRAFVAEEGWRLVALDYSQIELRVLAHLSGDENLIRVFQEGKDIHTQTASWMFGLSAEAIDPLMRRAAKTVNFGVLYGMSAHRLSQELGIPYEEAAAFIQKYFQSYPKVKAWIEKTLEEGRTRGYVETLFGRRRYVPDLNARVKSVREAAERMAFNMPVQGTAADLMKLAMVRLFPQLREVGARMLLQVHDELLLEAPKERAEEVAALAKEVMEGVWPLAVPLEVEVGIGEDWLAAKG

SEQ ID NO: 1055 - DNA, 2529 bp, synthetic construct
  misc_feature 1..2529: note = Variant of DNA polymerase I from Thermus sp. strain 2.9
  source 1..2529: mol_type = other DNA
atgcaccatcatcatcatcatggcggtagcggcatgttaccgttgttcgaacctaaaggtcgcgtgcttctggttgatggccatcatctcgcgtatcgtaacttctttgccctgaaaggattaaccaccagccgtggcgagccggtacagggtgtctacggctttgcaaagtcgctcctgaaagctctgaaagaagacggtgatgtggtgattgttgtctttgatgcgaaagcgccaagttttcgccacgaagcgggggaagcttacaaagccgggcgtgctccaacgccggaagactttcctcgccaattggcgcttatgaaggaattagtggatttgcttggcctcgaacgcttggaagttcccggtttcgaggcagacgacgtattagcgactctcgcaaagaaagccgaacgtgagggctatgaagtccagatcttgacagcagatcgcgatcttttccagcttttatctccgcgcatctcggtgttacacccggaagggcatcgtatcaccccggaatggctctgggagaaatatggtttgcgtcccgaacaatgggtggattttcgcgccttagcaggcgatccgagcgacaatattccgggagttaaaggtatcggcgagaagacggcgctcaagctccttaaagaatgggggtcgttggagaacttgcttaagaatttagatcaggtcaaaccagagtcagtgcgtgagaagattcttgcacacctcgaagacctcaaattaagccgcgaattgtcccgtgtacgcaccgatttgccgctcgaagttgatttccgtggccgccgcgaacctgactgggagggtcttaaagcgtttttagagcgtcttgaatttggttcgctcttgcatgaattcggccttttagaaagcccgttaccagccgaagaagcaccttggccaccgcccgaaggcgcgtttttaggttaccgtttgagtcgcccggaaccgatgtgggccgaattattggctcttgcagcgtctgcccagggacgtgtgtatcgcgcggaagaccctcatggtgcgctccgcggcctcaaagaagtccgtggactccttgccaaagacttagctgttgttgcattgcgcgaaggtcttgatttacctccgactgatgatccaatgcttcttgcgtacctcttggacccgtcaaacacgacgcccgaaggcgtagcccgtcgttacggcggcgagtggaccgaagatgcaggcgagcgcgcgttattggccgaacgtttgcacgccaatttattaggacgtttgcaaggcgaggaacgtctcctctggctttacgaagaagtggagaaaccattgagtcgcgtgctcgcgcatatggaagctaccggtgtcaaattagacgtggcgtatttggaggcactcagccttgaagttgctgccgaaatgcgccgcttggaggaagaagtattccgtttagcaggccactcctttaaccttaattctcgcgatcagttagaacgtgtgttgttcgatgaacttggtctccctcctatcggcaagacagagaagaccggtaaacgtagcacttcagcggcggttttagaagctcttcgcgaagtccatcccattgtggacaagatcttgcagtaccgcgaactcgcgaaattgaaaggcacctatattgaccctcttccggcattagtccacccgaaaacgggacgcctccatacccgcttcaaccaaacagccacggcgaccggtcgtttgtcctcctctgatccaaaccttcagaatattccagtacgtaccccattgggccagaagatccgccgcgcgtttgtagctgaggagggttggcgtttagtggccctcgattatagccaaattgaattacgtgtccttgcccatctttctggcgatgagaacctcatccgcgtgtttcaggaaggcaaagacattcacactcaaacggcaagctggatgtttggattatcagctgaagcgatcgatcctttgatgcgtcgtgcagcgaagaccatcaatttcggtgttctctacggtatgagtgcccatcgtttgtcgcaggaattaggcattccctatgaagaagctgcggcgttcattcagcgctactttcaaagctatcccaaagttaaagcatggatcgagaagactctcgaagaaggccgcacacgtggttacgtagagaccttatttggacgtcgccgctatgttcccgatttaaacgctcgcgtgaaatctgtccgtgaagccgccgaacgcatggcgttcaacatgcctgtacagggcacggcagctgacctcatgaaacttgcaatggtgcgcctttttccacaattgcgtgaagttggtgcccgcatgctcttgcaggtccacgatgaactcttgttagaagcgccaaaagagcgtgcggaagaggtggcagccctcgcgaaagaggttatggaaggcgtgtggcccttagcggtgcctcttgaagtcgaagttggtattggcgaggattggttggctgccaaaggataatga

SEQ ID NO: 1056 - protein, 841 aa, synthetic construct
  REGION 1..841: note = Variant of DNA polymerase I from Thermus sp. strain 2.9
MHHHHHHGGSGMLPLFEPKGRVLLVDGHHLAYRNFFALKGLTTSRGEPVQGVYGFAKSLLKALKEDGDVVIVVFDAKAPSFRHEAGEAYKAGRAPTPEDFPRQLALMKELVDLLGLERLEVPGFEADDVLATLAKKAEREGYEVQILTADRDLFQLLSPRISVLHPEGHRITPEWLWEKYGLRPEQWVDFRALAGDPSDNIPGVKGIGEKTALKLLKEWGSLENLLKNLDQVKPESVREKILAHLEDLKLSRELSRVRTDLPLEVDFRGRREPDWEGLKAFLERLEFGSLLHEFGLLESPLPAEEAPWPPPEGAFLGYRLSRPEPMWAELLALAASAQGRVYRAEDPHGALRGLKEVRGLLAKDLAVVALREGLDLPPTDDPMLLAYLLDPSNTTPEGVARRYGGEWTEDAGERALLAERLHANLLGRLQGEERLLWLYEEVEKPLSRVLAHMEATGVKLDVAYLEALSLEVAAEMRRLEEEVFRLAGHSFNLNSRDQLERVLFDELGLPPIGKTEKTGKRSTSAAVLEALREVHPIVDKILQYRELAKLKGTYIDPLPALVHPKTGRLHTRFNQTATATGRLSSSDPNLQNIPVRTPLGQKIRRAFVAEEGWRLVALDYSQIELRVLAHLSGDENLIRVFQEGKDIHTQTASWMFGLSAEAIDPLMRRAAKTINFGVLYGMSAHRLSQELGIPYEEAAAFIQRYFQSYPKVKAWIEKTLEEGRTRGYVETLFGRRRYVPDLNARVKSVREAAERMAFNMPVQGTAADLMKLAMVRLFPQLREVGARMLLQVHDELLLEAPKERAEEVAALAKEVMEGVWPLAVPLEVEVGIGEDWLAAKG

SEQ ID NO: 1057 - DNA, 2529 bp, synthetic construct
  misc_feature 1..2529: note = Variant of DNA polymerase I from Thermus sp. strain 2.9
  source 1..2529: mol_type = other DNA
atgcaccatcatcatcatcatggcggtagcggcatgttaccgttgttcgaacctaaaggtcgcgtgcttctggttgatggccatcatctcgcgtatcgtaacttctttgccctgaaaggattaaccaccagccgtggcgagccggtacagggtgtctacggctttgcaaagtcgctcctgaaagctctgaaagaagacggtgatgtggtgattgttgtctttgatgcgaaagcgccaagttttcgccacgaagcgtacgaagcttacaaagccgggcgtgctgatacgccggaagactttcctcgccaattggcgcttatgaaggaattagtggatttgcttggcctcgaacgcttggaagttcccggtttcgaggcagacgacgtattagcgactctcgcaaagaaagccgaacgtgagggctatgaagtccagatcttgacagcagatcgcgatcttttccagcttttatctccgcgcatctcggtgttacacccggaagggcatcgtatcaccccggaatggctctgggagaaatatggtttgcgtcccgaacaatgggtggattttcgcgccttagcaggcgatccgagcgacaatattccgggagttaaaggtatcggcgagaagacggcgctcaagctccttaaagaatgggggtcgttggagaacttgcttaagaatttagatcaggtcaaaccagagtcagtgcgtgagaagattcttgcacacctcgaagacctcaaattaagccgcgaattgtcccgtgtacgcaccgatttgccgctcgaagttgatttccgtggccgccgcgaacctgactgggagggtcttaaagcgtttttagagcgtcttgaatttggttcgctcttgcatgaattcggccttttagaaagcccgttaccagccgaagaagcaccttggccaccgcccgaaggcgcgtttttaggttaccgtttgagtcgcccggaaccgatgtgggccgaattattggctcttgcagcgtctgcccagggacgtgtgtatcgcgcggaagaccctcatggtgcgctccgcggcctcaaagaagtccgtggactccttgccaaagacttagctgttgttgcattgcgcgaaggtcttgatttacctccgactgatgatccaatgcttcttgcgtacctcttggacccgtcaaacacgacgcccgaaggcgtagcccgtcgttacggcggcgagtggaccgaagatgcaggcgagcgcgcgttattggccgaacgtttgcacgccaatttattaggacgtttgcaaggcgaggaacgtctcctctggctttacgaagaagtggagaaaccattgagtcgcgtgctcgcgcatatggaagctaccggtgtcaaattagacgtggcgtatttggaggcactcagccttgaagttgctgccgaaatgcgccgcttggaggaagaagtattccgtttagcaggccactcctttaaccttaattctcgcgatcagttagaacgtgtgttgttcgatgaacttggtctccctcctatcggcaagacagagaagaccggtaaacgtagcacttcagcggcggttttagaagctcttcgcgaagtccatcccattgtggacaagatcttgcagtaccgcgaactcgcgaaattgaaaggcacctatattgaccctcttccggcattagtccacccgaaaacgggacgcctccatacccgcttcaaccaaacagccacggcgaccggtcgtttgtcctcctctgatccaaaccttcagaatattccagtacgtaccccattgggccagaagatccgccgcgcgtttgtagctgaggagggttggcgtttagtggccctcgattatagccaaattgaattacgtgtccttgcccatctttctggcgatgagaacctcatccgcgtgtttcaggaaggcaaagacattcacactcaaacggcaagctggatgtttggattatcagctgaagcgatcgatcctttgatgcgtcgtgcagcgaagaccatcaatttcggtgttctctacggtatgagtgcccatcgtttgtcgcaggaattaggcattccctatgaagaagctgcggcgttcattcagcgctactttcaaagctatcccaaagttaaagcatggatcgagaagactctcgaagaaggccgcacacgtggttacgtagagaccttatttggacgtcgccgctatgttcccgatttaaacgctcgcgtgaaatctgtccgtgaagccgccgaacgcatggcgttcaacatgcctgtacagggcacggcagctgacctcatgaaacttgcaatggtgcgcctttttccacaattgcgtgaagttggtgcccgcatgctcttgcaggtccacgatgaactcttgttagaagcgccaaaagagcgtgcggaagaggtggcagccctcgcgaaagaggttatggaaggcgtgtggcccttagcggtgcctcttgaagtcgaagttggtattggcgaggattggttggctgccaaaggataatga

SEQ ID NO: 1058 - protein, 841 aa, synthetic construct
  REGION 1..841: note = Variant of DNA polymerase I from Thermus sp. strain 2.9
MHHHHHHGGSGMLPLFEPKGRVLLVDGHHLAYRNFFALKGLTTSRGEPVQGVYGFAKSLLKALKEDGDVVIVVFDAKAPSFRHEAYEAYKAGRADTPEDFPRQLALMKELVDLLGLERLEVPGFEADDVLATLAKKAEREGYEVQILTADRDLFQLLSPRISVLHPEGHRITPEWLWEKYGLRPEQWVDFRALAGDPSDNIPGVKGIGEKTALKLLKEWGSLENLLKNLDQVKPESVREKILAHLEDLKLSRELSRVRTDLPLEVDFRGRREPDWEGLKAFLERLEFGSLLHEFGLLESPLPAEEAPWPPPEGAFLGYRLSRPEPMWAELLALAASAQGRVYRAEDPHGALRGLKEVRGLLAKDLAVVALREGLDLPPTDDPMLLAYLLDPSNTTPEGVARRYGGEWTEDAGERALLAERLHANLLGRLQGEERLLWLYEEVEKPLSRVLAHMEATGVKLDVAYLEALSLEVAAEMRRLEEEVFRLAGHSFNLNSRDQLERVLFDELGLPPIGKTEKTGKRSTSAAVLEALREVHPIVDKILQYRELAKLKGTYIDPLPALVHPKTGRLHTRFNQTATATGRLSSSDPNLQNIPVRTPLGQKIRRAFVAEEGWRLVALDYSQIELRVLAHLSGDENLIRVFQEGKDIHTQTASWMFGLSAEAIDPLMRRAAKTINFGVLYGMSAHRLSQELGIPYEEAAAFIQRYFQSYPKVKAWIEKTLEEGRTRGYVETLFGRRRYVPDLNARVKSVREAAERMAFNMPVQGTAADLMKLAMVRLFPQLREVGARMLLQVHDELLLEAPKERAEEVAALAKEVMEGVWPLAVPLEVEVGIGEDWLAAKG

SEQ ID NO: 1059 - DNA, 2529 bp, synthetic construct
  misc_feature 1..2529: note = Variant of DNA polymerase I from Thermus sp. strain 2.9
  source 1..2529: mol_type = other DNA
atgcaccatcatcatcatcatggcggtagcggcatgttaccgttgttcgaacctaaaggtcgcgtgcttctggttgatggccatcatctcgcgtatcgtaacttctttgccctgaaaggattaaccaccagccgtggcgagccggtacagggtgtctacggctttgcaaagtcgctcctgaaagctctgaaagaagacggtgatgtggtgattgttgtctttgatgcgaaagcgccaagttttcgccacgaagcgtacgaagcttacaaagccgggcgtgctccaacgccggaagactttcctcgccaattggcgcttatgaaggaattagtggatttgcttggcctcgaacgcttggaagttcccggtttcgaggcagacgacgtattagcgactctcgcaaagaaagccgaacgtgagggctatgaagtccagatcttgacagcagatcgcgatcttttccagcttttatctccgcgcatctcggtgttacacccggaagggcatcgtatcaccccggaatggctctgggagaaatatggtttgcgtcccgaacaatgggtggattttcgcgccttagcaggcgatccgagcgacaatattccgggagttaaaggtatcggcgagaagacggcgctcaagctccttaaagaatgggggtcgttggagaacttgcttaagaatttagatcaggtcaaaccagagtcagtgcgtgagaagattcttgcacacctcgaagacctcaaattaagccgcgaattgtcccgtgtacgcaccgatttgccgctcgaagttgatttccgtggccgccgcgaacctgactgggagggtcttaaagcgtttttagagcgtcttgaatttggttcgctcttgcatgaattcggccttttagaaagcccgttaccagccgaagaagcaccttggccaccgcccgaaggcgcgtttttaggttaccgtttgagtcgcccggaaccgatgtgggccgaattattggctcttgcagcgtctgcccagggacgtgtgtatcgcgcggaagaccctcatggtgcgctccgcggcctcaaagaagtccgtggactccttgccaaagacttagctgttgttgcattgcgcgaaggtcttgatttacctccgactgatgatccaatgcttcttgcgtacctcttggacccgtcaaacacgacgcccgaaggcgtagcccgtcgttacggcggcgagtggaccgaagatgcaggcgagcgcgcgttattggccgaacgtttgcacgccaatttattaggacgtttgcaaggcgaggaacgtctcctctggctttacgaagaagtggagaaaccattgagtcgcgtgctcgcgcatatggaagctaccggtgtcaaattagacgtggcgtatttggaggcactcagccttgaagttgctgccgaaatgcgccgcttggaggaagaagtattccgtttagcaggccactcctttaaccttaattctcgcgatcagttagaacgtgtgttgttcgatgaacttggtctccctcctatcggcaagacagagaagaccggtaaacgtagcacttcagcggcggttttagaagctcttcgcgaagtccatcccattgtggacaagatcttgcagtaccgcgaactcgcgaaattgaaaggcacctatattgaccctcttccggcattagtccacccgaaaacgggacgcctccatacccgcttcaaccaaacagccacggcgaccggtcgtttgtcctcctctgatccaaaccttcagaatattccagtacgtaccccattgggccagaagatccgccgcgcgtttgtagctgaggagggttggcgtttagtggccctcgattatagccaaattgaattacgtgtccttgcccatctttctggcgatgagaacctcatccgcgtgtttcaggaaggcaaagacattcacactcaaacggcaagctggatgtttggattatcagctgaagcgatcgatcctttgatgcgtcgtgcagcgaagaccatcaatttcggtgttctctacggtatgagtgcccatcgtttgtcgcaggaattaggcattccctatgctgaagctgcggcgttcattcagcgctactttcaaagctatcccaaagttaaagcatggatcgagaagactctcgaagaaggccgcacacgtggttacgtagagaccttatttggacgtcgccgctatgttcccgatttaaacgctcgcgtgaaatctgtccgtgaagccgccgaacgcatggcgttcaacatgcctgtacagggcacggcagctgacctcatgaaacttgcaatggtgcgcctttttccacaattgcgtgaagttggtgcccgcatgctcttgcaggtccacgatgaactcttgttagaagcgccaaaagagcgtgcggaagaggtggcagccctcgcgaaagaggttatggaaggcgtgtggcccttagcggtgcctcttgaagtcgaagttggtattggcgaggattggttggctgccaaaggataatga

SEQ ID NO: 1060 - protein, 841 aa, synthetic construct
  REGION 1..841: note = Variant of DNA polymerase I from Thermus sp. strain 2.9
MHHHHHHGGSGMLPLFEPKGRVLLVDGHHLAYRNFFALKGLTTSRGEPVQGVYGFAKSLLKALKEDGDVVIVVFDAKAPSFRHEAYEAYKAGRAPTPEDFPRQLALMKELVDLLGLERLEVPGFEADDVLATLAKKAEREGYEVQILTADRDLFQLLSPRISVLHPEGHRITPEWLWEKYGLRPEQWVDFRALAGDPSDNIPGVKGIGEKTALKLLKEWGSLENLLKNLDQVKPESVREKILAHLEDLKLSRELSRVRTDLPLEVDFRGRREPDWEGLKAFLERLEFGSLLHEFGLLESPLPAEEAPWPPPEGAFLGYRLSRPEPMWAELLALAASAQGRVYRAEDPHGALRGLKEVRGLLAKDLAVVALREGLDLPPTDDPMLLAYLLDPSNTTPEGVARRYGGEWTEDAGERALLAERLHANLLGRLQGEERLLWLYEEVEKPLSRVLAHMEATGVKLDVAYLEALSLEVAAEMRRLEEEVFRLAGHSFNLNSRDQLERVLFDELGLPPIGKTEKTGKRSTSAAVLEALREVHPIVDKILQYRELAKLKGTYIDPLPALVHPKTGRLHTRFNQTATATGRLSSSDPNLQNIPVRTPLGQKIRRAFVAEEGWRLVALDYSQIELRVLAHLSGDENLIRVFQEGKDIHTQTASWMFGLSAEAIDPLMRRAAKTINFGVLYGMSAHRLSQELGIPYAEAAAFIQRYFQSYPKVKAWIEKTLEEGRTRGYVETLFGRRRYVPDLNARVKSVREAAERMAFNMPVQGTAADLMKLAMVRLFPQLREVGARMLLQVHDELLLEAPKERAEEVAALAKEVMEGVWPLAVPLEVEVGIGEDWLAAKG

SEQ ID NO: 1061 - DNA, 2529 bp, synthetic construct
  misc_feature 1..2529: note = Variant of DNA polymerase I from Thermus sp. strain 2.9
  source 1..2529: mol_type = other DNA
atgcaccatcatcatcatcatggcggtagcggcatgttaccgttgttcgaacctaaaggtcgcgtgcttctggttgatggccatcatctcgcgtatcgtaacttctttgccctgaaaggattaaccaccagccgtggcgagccggtacagggtgtctacggctttgcaaagtcgctcctgaaagctctgaaagaagacggtgatgtggtgattgttgtctttgatgcgaaagcgccaagttttcgccacgaagcgtacgaagcttacaaagccgggcgtgctccaacgccggaagactttcctcgccaattggcgcttatgaaggaattagtggatttgcttggcctcgaacgcttggaagttcccggtttcgaggcagacgacgtattagcgactctcgcaaagaaagccgaacgtgagggctatgaagtccagatcttgacagcagatcgcgatcttttccagcttttatctccgcgcatctcggtgttacacccggaagggcatcgtatcaccccggaatggctctgggagaaatatggtttgcgtcccgaacaatgggtggattttcgcgccttagcaggcgatccgagcgacaatattccgggagttaaaggtatcggcgagaagacggcgctcaagctccttaaagaatgggggtcgttggagaacttgcttaagaatttagatcaggtcaaaccagagtcagtgcgtgagaagattcttgcacacctcgaagacctcaaattaagcctggaattgtcccgtgtacgcaccgatttgccgctcgaagttgatttccgtggccgccgcgaacctgactgggagggtcttaaagcgtttttagagcgtcttgaatttggttcgctcttgcatgaattcggccttttagaaagcccgttaccagccgaagaagcaccttggccaccgcccgaaggcgcgtttttaggttaccgtttgagtcgcccggaaccgatgtgggccgaattatcggctcttgcagcgtctgcccagggacgtgtgtatcgcgcggaagaccctcatggtgcgctcaagggcctcaaagaagtccgtggactccttgccaaagacttagctgttgttgcattgcgcgaaggtcttgatttacctccgactgatgatccaatgcttcttgcgtacctcttggacccgtcaaacacgacgcccgaaggcgtagcccgtcgttacggcggcgagtggaccgaagatgcagctaagcgcgcgttattggccgaacgtttgcacgccaatttattaggacgtttgcaaggcgaggaacgtctcctctggctttacgaagaagtggagaaaccattgagtcgcgtgctcgcgcatatggaagctaccggtgtcaaattagacgtggcgtatttggagaacctcagccttgaagttgctgccgaaatgcgccgcttggaggaagaagtattccgtttagcaggccactcctttaaccttaattctcgcgatcagttagaacgtgtgttgttcgatgagcttggtctccctcctatcggcaagacagagaagaccggtaaacgtagcacttcagcggcggttttagaagctcttcgcgaagtccatcccattgtggacaagatcttgcagtaccgcgaactcgcgaaattgaaaggcacctatattgaccctcttccggcattagtccacccgaaaacgggacgcctccatacccgcttcaaccaaacagccacggcgaccggtcgtttgtcctcctctgatccaaaccttcagaatattccagtacgtaccccattgggccagaagatccgccgcgcgtttgtagctgaggagggttggcgtttagtggccctcgattatagccaaattgaattacgtgtccttgcccatctttctggcgatgagaacctcatccgcgtgtttcaggaaggcaaagacattcacactcaaacggcaagctggatgtttggattatcaccagaagcgatcgatcctttgatgcgtcgtgcagcgaagaccattaatttcggtgttctctacggtatgagtgcccatcgtttgtcgcaggaattaggcattccctatgaagaagctgccgcgttcattcagaagtactttcaaagctatcccaaagttaaagcatggatcgagaagactctcgaagaaggccgcacacgtggttacgtagagaccttatttggacgtcgccgctatgttcccgatttaaacgctcgcgtgaaatctgtccgtgaagccgccgaacgcatggcgttcaacatgcctgtacagggcacggcagctgacctcatgaaacttgcaatggtgcgcctttttccacaattgcgtgaagttggtgcccgcatgctcttgcaggtccacgatgaactcttgttagaagcgccaaaagagcgtgcggaagaggtggcagccctcgcgaaagaggttatggaaggcgtgtggcccttagcggtgcctcttgaagtcgaagttggtattggcgaggattggttggctgccaaaggataatga

SEQ ID NO: 1062 - protein, 841 aa, synthetic construct
  REGION 1..841: note = Variant of DNA polymerase I from Thermus sp. strain 2.9
MHHHHHHGGSGMLPLFEPKGRVLLVDGHHLAYRNFFALKGLTTSRGEPVQGVYGFAKSLLKALKEDGDVVIVVFDAKAPSFRHEAYEAYKAGRAPTPEDFPRQLALMKELVDLLGLERLEVPGFEADDVLATLAKKAEREGYEVQILTADRDLFQLLSPRISVLHPEGHRITPEWLWEKYGLRPEQWVDFRALAGDPSDNIPGVKGIGEKTALKLLKEWGSLENLLKNLDQVKPESVREKILAHLEDLKLSLELSRVRTDLPLEVDFRGRREPDWEGLKAFLERLEFGSLLHEFGLLESPLPAEEAPWPPPEGAFLGYRLSRPEPMWAELSALAASAQGRVYRAEDPHGALKGLKEVRGLLAKDLAVVALREGLDLPPTDDPMLLAYLLDPSNTTPEGVARRYGGEWTEDAAKRALLAERLHANLLGRLQGEERLLWLYEEVEKPLSRVLAHMEATGVKLDVAYLENLSLEVAAEMRRLEEEVFRLAGHSFNLNSRDQLERVLFDELGLPPIGKTEKTGKRSTSAAVLEALREVHPIVDKILQYRELAKLKGTYIDPLPALVHPKTGRLHTRFNQTATATGRLSSSDPNLQNIPVRTPLGQKIRRAFVAEEGWRLVALDYSQIELRVLAHLSGDENLIRVFQEGKDIHTQTASWMFGLSPEAIDPLMRRAAKTINFGVLYGMSAHRLSQELGIPYEEAAAFIQKYFQSYPKVKAWIEKTLEEGRTRGYVETLFGRRRYVPDLNARVKSVREAAERMAFNMPVQGTAADLMKLAMVRLFPQLREVGARMLLQVHDELLLEAPKERAEEVAALAKEVMEGVWPLAVPLEVEVGIGEDWLAAKG

SEQ ID NO: 1063 - DNA, 2529 bp, synthetic construct
  misc_feature 1..2529: note = Variant of DNA polymerase I from Thermus sp. strain 2.9
  source 1..2529: mol_type = other DNA
atgcaccatcatcatcatcatggcggtagcggcatgttaccgttgttcgaacctaaaggtcgcgtgcttctggttgatggccatcatctcgcgtatcgtaacttctttgccctgaaaggattaaccaccagccgtggcgagccggtacagggtgtctacggctttgcaaagtcgctcctgaaagctctgaaagaagacggtgatgtggtgattgttgtctttgatgcgaaagcgccaagttttcgccacgaagcgtacgaagcttacaaagccgggcgtgctccaacgccggaagactttcctcgccaattggcgcttatgaaggaattagtggatttgcttggcctcgaacgcttggaagttcccggtttcgaggcagacgacgtattagcgactctcgcaaagaaagccgaacgtgagggctatgaagtccagatcttgacagcagatcgcgatcttttccagcttttatctccgcgcatctcggtgttacacccggaagggcatcgtatcaccccggaatggctctgggagaaatatggtttgcgtcccgaacaatgggtggattttcgcgccttagcaggcgatccgagcgacaatattccgggagttaaaggtatcggcgagaagacggcgctcaagctccttaaagaatgggggtcgttggagaacttgcttaagaatttagatcaggtcaaaccagagtcagtgcgtgagaagattcttgcacacctcgaagacctcaaattaagcctggaattgtcccgtgtacgcaccgatttgccgctcgaagttgatttccgtggtcgccgcgaacctgactgggagggtcttaaagcgtttttagagcgtcttgaatttggttcgctcttgcatgaattcggccttttagaaagcccgttaccagccgaagaagcaccttggccaccgcccgaaggcgcgtttttaggttaccgtttgagtcgcccggaaccgatgtgggccgaattatcggctcttgcagcgtctgcccagggacgtgtgtatcgcgcggaagaccctcatggtgcgctccgcggcctcaaagaagtccgtggactccttgccaaagacttagctgttgttgcattgcgcgaaggtcttgatttacctccgactgatgatccaatgcttcttgcgtacctcttggacccgtcaaacacgacgcccgaaggcgtagcccgtcgttacggcggcgagtggaccgaagatgcaggcgagcgcgcgttattggccgaacgtttgcacgccaatttattaggacgtttgcaaggcgaggaacgtctcctctggctttacgaagaagtggagaaaccattgagtcgcgtgctcgcgcatatggaagctaccggtgtcaaattagacgtggcgtatttggagaacctcagccttgaagttgctgccgaaatgcgccgcttggaggaagaagtattccgtttagcaggccactcctttaaccttaattctcgcgatcagttagaacgtgtgttgttcgatgaacttggtctccctcctatcggcaagacagagaagaccggtaaacgtagcacttcagcggcggttttagaagctcttcgcgaagtccatcccattgtggacaagatcttgcagtaccgcgaactcgcgaaattgaaaggcacctatattgaccctcttccggcattagtccacccgaaaacgggacgcctccatacccgcttcaaccaaacagccacggcgaccggtcgtttgtcctcctctgatccaaaccttcagaatattccagtacgtaccccattgggccagaagatccgccgcgcgtttgtagctgaggagggttggcgtttagtggccctcgattatagccaaattgaattacgtgtccttgcccatctttctggcgatgagaacctcatccgcgtgtttcaggaaggcaaagacattcacactcaaacggcaagctggatgtttggattatcaccagaagcgatcgatcctttgatgcgtcgtgcagcgaagaccgttaatttcggtgttctctacggtatgagtgcccatcgtttgtcgcaggaattaggcattccctatgaagaagctgcggcgttcattcagcgctactttcaaagctatcccaaagttaaagcatggatcgagaagactctcgaagaaggccgcacacgtggttacgtagagaccttatttggacgtcgccgctatgttcccgatttaaacgctcgcgtgaaatctgtccgtgaagccgccgaacgcatggcgttcaacatgcctgtacagggcacggcagctgacctcatgaaacttgcaatggtgcgcctttttccacaattgcgtgaagttggtgcccgcatgctcttgcaggtccacgatgaactcttgttagaagcgccaaaagagcgtgcggaagaggtggcagccctcgcgaaagaggttatggaaggcgtgtggcccttagcggtgcctcttgaagtcgaagttggtattggcgaggattggttggctgccaaaggataatga

SEQ ID NO: 1064 - protein, 841 aa, synthetic construct
  REGION 1..841: note = Variant of DNA polymerase I from Thermus sp. strain 2.9
MHHHHHHGGSGMLPLFEPKGRVLLVDGHHLAYRNFFALKGLTTSRGEPVQGVYGFAKSLLKALKEDGDVVIVVFDAKAPSFRHEAYEAYKAGRAPTPEDFPRQLALMKELVDLLGLERLEVPGFEADDVLATLAKKAEREGYEVQILTADRDLFQLLSPRISVLHPEGHRITPEWLWEKYGLRPEQWVDFRALAGDPSDNIPGVKGIGEKTALKLLKEWGSLENLLKNLDQVKPESVREKILAHLEDLKLSLELSRVRTDLPLEVDFRGRREPDWEGLKAFLERLEFGSLLHEFGLLESPLPAEEAPWPPPEGAFLGYRLSRPEPMWAELSALAASAQGRVYRAEDPHGALRGLKEVRGLLAKDLAVVALREGLDLPPTDDPMLLAYLLDPSNTTPEGVARRYGGEWTEDAGERALLAERLHANLLGRLQGEERLLWLYEEVEKPLSRVLAHMEATGVKLDVAYLENLSLEVAAEMRRLEEEVFRLAGHSFNLNSRDQLERVLFDELGLPPIGKTEKTGKRSTSAAVLEALREVHPIVDKILQYRELAKLKGTYIDPLPALVHPKTGRLHTRFNQTATATGRLSSSDPNLQNIPVRTPLGQKIRRAFVAEEGWRLVALDYSQIELRVLAHLSGDENLIRVFQEGKDIHTQTASWMFGLSPEAIDPLMRRAAKTVNFGVLYGMSAHRLSQELGIPYEEAAAFIQRYFQSYPKVKAWIEKTLEEGRTRGYVETLFGRRRYVPDLNARVKSVREAAERMAFNMPVQGTAADLMKLAMVRLFPQLREVGARMLLQVHDELLLEAPKERAEEVAALAKEVMEGVWPLAVPLEVEVGIGEDWLAAKG

SEQ ID NO: 1065 - DNA, 2529 bp, synthetic construct
  misc_feature 1..2529: note = Variant of DNA polymerase I from Thermus sp. strain 2.9
  source 1..2529: mol_type = other DNA
atgcaccatcatcatcatcatggcggtagcggcatgttaccgttgttcgaacctaaaggtcgcgtgcttctggttgatggccatcatctcgcgtatcgtaacttctttgccctgaaaggattaaccaccagccgtggcgagccggtacagggtgtctacggctttgcaaagtcgctcctgaaagctctgaaagaagacggtgatgtggtgattgttgtctttgatgcgaaagcgccaagttttcgccacgaagcgtacgaagcttacaaagccgggcgtgctccaacgccggaagactttcctcgccaattggcgcttatgaaggaattagtggatttgcttggcctcgaacgcttggaagttcccggtttcgaggcagacgacgtattagcgactctcgcaaagaaagccgaacgtgagggctatgaagtccagatcttgacagcagatcgcgatcttttccagcttttatctccgcgcatctcggtgttacacccggaagggcatcgtatcaccccggaatggctctgggagaaatatggtttgcgtcccgaacaatgggtggattttcgcgccttagcaggcgatccgagcgacaatattccgggagttaaaggtatcggcgagaagacggcgctcaagctccttaaagaatgggggtcgttggagaacttgcttaagaatttagatcaggtcaaaccagagtcagtgcgtgagaagattcttgcacacctcgaagacctcaaattaagcctggaattgtcccgtgtacgcaccgatttgccgctcgaagttgatttccgtggccgccgcgaacctgactgggagggtcttaaagcgtttttagagcgtcttgaatttggttcgctcttgcatgaattcggccttttagaaagcccgttaccagccgaagaagcaccttggccaccgcccgaaggcgcgtttttaggttaccgtttgagtcgcccggaaccgatgtgggccgaattatcggctcttgcagcgtctgcccagggacgtgtgtatcgcgcggaagaccctcatggtgcgctccgcggcctcaaagaagtccgtggactccttgccaaagacttagctgttgttgcattgcgcgaaggtcttgatttacctccgactgatgatccaatgcttcttgcgtacctcttggacccgtcaaacacgacgcccgaaggcgtagcccgtcgttacggcggcgagtggaccgaagatgcagctgagcgcgcgttattggccgaacgtttgcacgccaatttattaggacgtttgcaaggcgaggaacgtctcctctggctttacgaagaagtggagaaaccattgagtcgcgtgctcgcgcatatggaagctaccggtgtcaaattagacgtggcgtatttggaggctctcagccttgaagttgctgccgaaatgcgccgcttggaggaagaagtattccgtttagcaggccactcctttaaccttaattctcgcgatcagttagaacgtgtgttgttcgataaccttggtctccctcctatcggcaagacagagaagaccggtaaacgtagcacttcagcggcggttttagaagctcttcgcgaagtccatcccattgtggacaagatcttgcagtaccgcgaactcgcgaaattgaaaggcacctatattgaccctcttccggcattagtccacccgaaaacgggacgcctccatacccgcttcaaccaaacagccacggcgaccggtcgtttgtcctcctctgatccaaaccttcagaatattccagtacgtaccccattgggccagaagatccgccgcgcgtttgtagctgaggagggttggcgtttagtggccctcgattatagccaaattgaattacgtgtccttgcccatctttctggcgatgagaacctcatccgcgtgtttcaggaaggcaaagacattcacactcaaacggcaagctggatgtttggattatcagctgaagcgatcgatcctttgatgcgtcgtgcagcgaagaccgttaatttcggtgttctctacggtatgagtgcccatcgtttgtcgcaggaattaggcattccctatgaagaagctgcggcgttcattcagcgctactttcaaagctatcccaaagttaaagcatggatcgagaagactctcgaagaaggccgcacacgtggttacgtagagaccttatttggacgtcgccgctatgttcccgatttaaacgctcgcgtgaaatctgtccgtgaagccgccgaacgcatggcgttcaacatgcctgtacagggcacggcagctgacctcatgaaacttgcaatggtgcgcctttttccacaattgcgtgaagttggtgcccgcatgctcttgcaggtccacgatgaactcttgttagaagcgccaaaagagcgtgcggaagaggtggcagccctcgcgaaagaggttatggaaggcgtgtggcccttagcggtgcctcttgaagtcgaagttggtattggcgaggattggttggctgccaaaggataatga

SEQ ID NO: 1066 - protein, 841 aa, synthetic construct
  REGION 1..841: note = Variant of DNA polymerase I from Thermus sp. strain 2.9
MHHHHHHGGSGMLPLFEPKGRVLLVDGHHLAYRNFFALKGLTTSRGEPVQGVYGFAKSLLKALKEDGDVVIVVFDAKAPSFRHEAYEAYKAGRAPTPEDFPRQLALMKELVDLLGLERLEVPGFEADDVLATLAKKAEREGYEVQILTADRDLFQLLSPRISVLHPEGHRITPEWLWEKYGLRPEQWVDFRALAGDPSDNIPGVKGIGEKTALKLLKEWGSLENLLKNLDQVKPESVREKILAHLEDLKLSLELSRVRTDLPLEVDFRGRREPDWEGLKAFLERLEFGSLLHEFGLLESPLPAEEAPWPPPEGAFLGYRLSRPEPMWAELSALAASAQGRVYRAEDPHGALRGLKEVRGLLAKDLAVVALREGLDLPPTDDPMLLAYLLDPSNTTPEGVARRYGGEWTEDAAERALLAERLHANLLGRLQGEERLLWLYEEVEKPLSRVLAHMEATGVKLDVAYLEALSLEVAAEMRRLEEEVFRLAGHSFNLNSRDQLERVLFDNLGLPPIGKTEKTGKRSTSAAVLEALREVHPIVDKILQYRELAKLKGTYIDPLPALVHPKTGRLHTRFNQTATATGRLSSSDPNLQNIPVRTPLGQKIRRAFVAEEGWRLVALDYSQIELRVLAHLSGDENLIRVFQEGKDIHTQTASWMFGLSAEAIDPLMRRAAKTVNFGVLYGMSAHRLSQELGIPYEEAAAFIQRYFQSYPKVKAWIEKTLEEGRTRGYVETLFGRRRYVPDLNARVKSVREAAERMAFNMPVQGTAADLMKLAMVRLFPQLREVGARMLLQVHDELLLEAPKERAEEVAALAKEVMEGVWPLAVPLEVEVGIGEDWLAAKG

SEQ ID NO: 1067 - DNA, 2529 bp, synthetic construct
  misc_feature 1..2529: note = Variant of DNA polymerase I from Thermus sp. strain 2.9
  source 1..2529: mol_type = other DNA
atgcaccatcatcatcatcatggcggtagcggcatgttaccgttgttcgaacctaaaggtcgcgtgcttctggttgatggccatcatctcgcgtatcgtaacttctttgccctgaaaggattaaccaccagccgtggcgagccggtacagggtgtctacggctttgcaaagtcgctcctgaaagctctgaaagaagacggtgatgtggtgattgttgtctttgatgcgaaagcgccaagttttcgccacgaagcgtacgaagcttacaaagccgggcgtgctccaacgccggaagactttcctcgccaattggcgcttatgaaggaattagtggatttgcttggcctcgaacgcttggaagttcccggtttcgaggcagacgacgtattagcgactctcgcaaagaaagccgaacgtgagggctatgaagtccagatcttgacagcagatcgcgatcttttccagcttttatctccgcgcatctcggtgttacacccggaagggcatcgtatcaccccggaatggctctgggagaaatatggtttgcgtcccgaacaatgggtggattttcgcgccttagcaggcgatccgagcgacaatattccgggagttaaaggtatcggcgagaagacggcgctcaagctccttaaagaatgggggtcgttggagaacttgcttaagaatttagatcaggtcaaaccagagtcagtgcgtgagaagattcttgcacacctcgaagacctcaaattaagccgcgaattgtcccgtgtacgcaccgatttgccgctcgaagttgatttccgtcgtcgccgcgaacctgactgggagggtcttaaagcgtttttagagcgtcttgaatttggttcgctcttgcatgaattcggccttttagaaagcccgttaccagccgaagaagcaccttggccaccgcccgaaggcgcgtttttaggttaccgtttgagtcgcccggaaccgatgtgggccgaattatcggctcttgcagcgtctgcccaggggcgtgtgtatcgcgcggaagaccctcatggtgcgctccgtggcctcaaagaagtccgtggactccttgccaaagacttagctgttgttgcattgcgcgaaggtcttgatttacctccgactgatgatccaatgcttcttgcgtacctcttggacccgtcaaacacgacgcccgaaggcgtagcccgtcgttacggcggcgagtggaccgaagatgcaggtgagcgcgcgttattggccgaacgtttgcacgccaatttattaggacgtttgcaaggcgaggaacgtctcctctggctttacgaagaagtggagaaaccattgagtcgcgtgctcgcgcatatggaagctaccggtgtcaaattagacgtggcgtatttggaggcactcagccttgaagttgctgccgaaatgcgccgcttggaggaagaagtattccgtttagcaggccactcctttaaccttaattctcgcgatcagttagaacgtgtgttgttcgatgaacttggtctccctcctatcggcaagacagagaagaccggtaaacgtagcacttcagcggcggttttagaagctcttcgcgaagtccatcccattgtggacaagatcttgcagtaccgcgaactcgcgaaattgaaaggcacctatattgaccctcttccggcattagtccacccgaaaacgggacgcctccatacccgcttcaaccaaacagccacggcgaccggtcgtttgtcctcctctgatccaaaccttcagaatattccagtacgtaccccattgggccagaagatccgccgcgcgtttgtagctgaggagggttggcgtttagtggccctcgattatagccaaattgaattacgtgtccttgcccatctttctggcgatgagaacctcatccgcgtgtttcaggaaggcaaagacattcacactcaaacggcaagctggatgtttggattatcagcagaagcgatcgatcctttgatgcgtcgtgcagcgaagaccattaatttcggtgttctctacggtatgagtgcccatcgtttgtcgcaggaattaggcattccctatgaagaagctgtcgcgttcattcagaagtactttcaaagctatcccaaagttaaagcatggatcgagaagactctcgaagaaggccgcacacgtggttacgtagagaccttatttggacgtcgccgctatgttcccgatttaaacgctcgcgtgaaatctgtccgtgaagccgccgaacgcatggcgttcaacatgcctgtacagggcacggcagctgacctcatgaaacttgcaatggtgcgcctttttccacaattgcgtgaagttggtgcccgcatgctcttgcaggtccacgatgaactcttgttagaagcgccaaaagagcgtgcggaagaggtggcagccctcgcgaaagaggttatggaaggcgtgtggcccttagcggtgcctcttgaagtcgaagttggtattggcgaggattggttggctgccaaaggataatga

SEQ ID NO: 1068 - protein, 841 aa, synthetic construct
  REGION 1..841: note = Variant of DNA polymerase I from Thermus sp. strain 2.9
MHHHHHHGGSGMLPLFEPKGRVLLVDGHHLAYRNFFALKGLTTSRGEPVQGVYGFAKSLLKALKEDGDVVIVVFDAKAPSFRHEAYEAYKAGRAPTPEDFPRQLALMKELVDLLGLERLEVPGFEADDVLATLAKKAEREGYEVQILTADRDLFQLLSPRISVLHPEGHRITPEWLWEKYGLRPEQWVDFRALAGDPSDNIPGVKGIGEKTALKLLKEWGSLENLLKNLDQVKPESVREKILAHLEDLKLSRELSRVRTDLPLEVDFRRRREPDWEGLKAFLERLEFGSLLHEFGLLESPLPAEEAPWPPPEGAFLGYRLSRPEPMWAELSALAASAQGRVYRAEDPHGALRGLKEVRGLLAKDLAVVALREGLDLPPTDDPMLLAYLLDPSNTTPEGVARRYGGEWTEDAGERALLAERLHANLLGRLQGEERLLWLYEEVEKPLSRVLAHMEATGVKLDVAYLEALSLEVAAEMRRLEEEVFRLAGHSFNLNSRDQLERVLFDELGLPPIGKTEKTGKRSTSAAVLEALREVHPIVDKILQYRELAKLKGTYIDPLPALVHPKTGRLHTRFNQTATATGRLSSSDPNLQNIPVRTPLGQKIRRAFVAEEGWRLVALDYSQIELRVLAHLSGDENLIRVFQEGKDIHTQTASWMFGLSAEAIDPLMRRAAKTINFGVLYGMSAHRLSQELGIPYEEAVAFIQKYFQSYPKVKAWIEKTLEEGRTRGYVETLFGRRRYVPDLNARVKSVREAAERMAFNMPVQGTAADLMKLAMVRLFPQLREVGARMLLQVHDELLLEAPKERAEEVAALAKEVMEGVWPLAVPLEVEVGIGEDWLAAKG

SEQ ID NO: 1069 - DNA, 2529 bp, synthetic construct
  misc_feature 1..2529: note = Variant of DNA polymerase I from Thermus sp. strain 2.9
  source 1..2529: mol_type = other DNA
atgcaccatcatcatcatcatggcggtagcggcatgttaccgttgttcgaacctaaaggtcgcgtgcttctggttgatggccatcatctcgcgtatcgtaacttctttgccctgaaaggattaaccaccagccgtggcgagccggtacagggtgtctacggctttgcaaagtcgctcctgaaagctctgaaagaagacggtgatgtggtgattgttgtctttgatgcgaaagcgccaagttttcgccacgaagcgtacgaagcttacaaagccgggcgtgctccaacgccggaagactttcctcgccaattggcgcttatgaaggaattagtggatttgcttggcctcgaacgcttggaagttcccggtttcgaggcagacgacgtattagcgactctcgcaaagaaagccgaacgtgagggctatgaagtccagatcttgacagcagatcgcgatcttttccagcttttatctccgcgcatctcggtgttacacccggaagggcatcgtatcaccccggaatggctctgggagaaatatggtttgcgtcccgaacaatgggtggattttcgcgccttagcaggcgatccgagcgacaatattccgggagttaaaggtatcggcgagaagacggcgctcaagctccttaaagaatgggggtcgttggagaacttgcttaagaatttagatcaggtcaaaccagagtcagtgcgtgagaagattcttgcacacctcgaagacctcaaattaagcctggaattgtcccgtgtacgcaccgatttgccgctcgaagttgatttccgtcgtcgccgcgaacctgactgggagggtcttaaagcgtttttagagcgtcttgaatttggttcgctcttgcatgaattcggccttttagaaagcccgttaccagccgaagaagcaccttggccaccgcccgaaggcgcgtttttaggttaccgtttgagtcgcccggaaccgatgtgggccgaattatcggctcttgcagcgtctgcccaggagcgtgtgtatcgcgcggaagaccctcatggtgcgctccgtggcctcaaagaagtccgtggactccttgccaaagacttagctgttgttgcattgcgcgaaggtcttgatttacctccgactgatgatccaatgcttcttgcgtacctcttggacccgtcaaacacgacgcccgaaggcgtagcccgtcgttacggcggcgagtggaccgaagatgcagctaagcgcgcgttattggccgaacgtttgcacgccaatttattaggacgtttgcaaggcgaggaacgtctcctctggctttacgaagaagtggagaaaccattgagtcgcgtgctcgcgcatatggaagctaccggtgtcaaattagacgtggcgtatttggaggcactcagccttgaagttgctgccgaaatgcgccgcttggaggaagaagtattccgtttagcaggccactcctttaaccttaattctcgcgatcagttagaacgtgtgttgttcgatgagcttggtctccctcctatcggcaagacagagaagaccggtaaacgtagcacttcagcggcggttttagaagctcttcgcgaagtccatcccattgtggacaagatcttgcagtaccgcgaactcgcgaaattgaaaggcacctatattgaccctcttccggcattagtccacccgaaaacgggacgcctccatacccgcttcaaccaaacagccacggcgaccggtcgtttgtcctcctctgatccaaaccttcagaatattccagtacgtaccccattgggccagaagatccgccgcgcgtttgtagctgaggagggttggcgtttagtggccctcgattatagccaaattgaattacgtgtccttgcccatctttctggcgatgagaacctcatccgcgtgtttcaggaaggcaaagacattcacactcaaacggcaagctggatgtttggattatcagcagaagcgatcgatcctttgatgcgtcgtgcagcgaagaccattaatttcggtgttctctacggtatgagtgcccatcgtttgtcgcaggaattaggcattccctatgaagaagctgccgcgttcattcagcgctactttcaaagctatcccaaagttaaagcatggatcgagaagactctcgaagaaggccgcacacgtggttacgtagagaccttatttggacgtcgccgctatgttcccgatttaaacgctcgcgtgaaatctgtccgtgaagccgccgaacgcatggcgttcaacatgcctgtacagggcacggcagctgacctcatgaaacttgcaatggtgcgcctttttccacaattgcgtgaagttggtgcccgcatgctcttgcaggtccacgatgaactcttgttagaagcgccaaaagagcgtgcggaagaggtggcagccctcgcgaaagaggttatggaaggcgtgtggcccttagcggtgcctcttgaagtcgaagttggtattggcgaggattggttggctgccaaaggataatga

SEQ ID NO: 1070 - protein, 841 aa, synthetic construct
  REGION 1..841: note = Variant of DNA polymerase I from Thermus sp. strain 2.9
MHHHHHHGGSGMLPLFEPKGRVLLVDGHHLAYRNFFALKGLTTSRGEPVQGVYGFAKSLLKALKEDGDVVIVVFDAKAPSFRHEAYEAYKAGRAPTPEDFPRQLALMKELVDLLGLERLEVPGFEADDVLATLAKKAEREGYEVQILTADRDLFQLLSPRISVLHPEGHRITPEWLWEKYGLRPEQWVDFRALAGDPSDNIPGVKGIGEKTALKLLKEWGSLENLLKNLDQVKPESVREKILAHLEDLKLSLELSRVRTDLPLEVDFRRRREPDWEGLKAFLERLEFGSLLHEFGLLESPLPAEEAPWPPPEGAFLGYRLSRPEPMWAELSALAASAQERVYRAEDPHGALRGLKEVRGLLAKDLAVVALREGLDLPPTDDPMLLAYLLDPSNTTPEGVARRYGGEWTEDAAKRALLAERLHANLLGRLQGEERLLWLYEEVEKPLSRVLAHMEATGVKLDVAYLEALSLEVAAEMRRLEEEVFRLAGHSFNLNSRDQLERVLFDELGLPPIGKTEKTGKRSTSAAVLEALREVHPIVDKILQYRELAKLKGTYIDPLPALVHPKTGRLHTRFNQTATATGRLSSSDPNLQNIPVRTPLGQKIRRAFVAEEGWRLVALDYSQIELRVLAHLSGDENLIRVFQEGKDIHTQTASWMFGLSAEAIDPLMRRAAKTINFGVLYGMSAHRLSQELGIPYEEAAAFIQRYFQSYPKVKAWIEKTLEEGRTRGYVETLFGRRRYVPDLNARVKSVREAAERMAFNMPVQGTAADLMKLAMVRLFPQLREVGARMLLQVHDELLLEAPKERAEEVAALAKEVMEGVWPLAVPLEVEVGIGEDWLAAKG

SEQ ID NO: 1071 - DNA, 2529 bp, synthetic construct
  misc_feature 1..2529: note = Variant of DNA polymerase I from Thermus sp. strain 2.9
  source 1..2529: mol_type = other DNA
atgcaccatcatcatcatcatggcggtagcggcatgttaccgttgttcgaacctaaaggtcgcgtgcttctggttgatggccatcatctcgcgtatcgtaacttctttgccctgaaaggattaaccaccagccgtggcgagccggtacagggtgtctacggctttgcaaagtcgctcctgaaagctctgaaagaagacggtgatgtggtgattgttgtctttgatgcgaaagcgccaagttttcgccacgaagcgtacgaagcttacaaagccgggcgtgctccaacgccggaagactttcctcgccaattggcgcttatgaaggaattagtggatttgcttggcctcgaacgcttggaagttcccggtttcgaggcagacgacgtattagcgactctcgcaaagaaagccgaacgtgagggctatgaagtccagatcttgacagcagatcgcgatcttttccagcttttatctccgcgcatctcggtgttacacccggaagggcatcgtatcaccccggaatggctctgggagaaatatggtttgcgtcccgaacaatgggtggattttcgcgccttagcaggcgatccgagcgacaatattccgggagttaaaggtatcggcgagaagacggcgctcaagctccttaaagaatgggggtcgttggagaacttgcttaagaatttagatcaggtcaaaccagagtcagtgcgtgagaagattcttgcacacctcgaagacctcaaattaagccgcgaattgtcccgtgtacgcaccgatttgccgctcgaagttgatttccgtggccgccgcgaacctgactgggagggtcttaaagcgtttttagagcgtcttgaatttggttcgctcttgcatgaattcggccttttagaaagcccgttaccagccgaagaagcaccttggccaccgcccgaaggcgcgtttttaggttaccgtttgagtcgcccggaaccgatgtgggccgaattattggctcttgcagcgtctgcccagggacgtgtgtatcgcgcggaagaccctcatggtgcgctccgcggcctcaaagaagtccgtggactccttgccaaagacttagctgttgttgcattgcgcgaaggtcttgatttacctccgactgatgatccaatgcttcttgcgtacctcttggacccgtcaaacacgacgcccgaaggcgtagcccgtcgttacggcggcgagtggaccgaagatgcaggcgagcgcgcgttattggccgaacgtttgcacgccaatttattaggacgtttgcaaggcgaggaacgtctcctctggctttacgaagaagtggagaaaccattgagtcgcgtgctcgcgcatatggaagctaccggtgtcaaattagacgtggcgtatttggaggcactcagccttgaagttgctgccgaaatgcgccgcttggaggaagaagtattccgtttagcaggccactcctttaaccttaattctcgcgatcagttagaaaaggtgttgttcgatgaacttggtctccctcctatcggcaagacagagaagaccggtaaacgtagcacttcagcggcggttttagaagctcttcgcgaagtccatcccattgtggacaagatcttgcagtaccgcgaactcgcgaaattgaaaggcacctatattgaccctcttccggcattagtccacccgaaaacgggacgcctccatacccgcttcaaccaaacagccacggcgaccggtcgtttgtcctcctctgatccaaaccttcagaatattccagtacgtaccccattgggccagaagatccgccgcgcgtttgtagctgaggagggttggcgtttagtggccctcgattatagccaaattgaattacgtgtccttgcccatctttctggcgatgagaacctcatccgcgtgtttcaggaaggcaaagacattcacactcaaacggcaagctggatgtttggattatcagctgaagcgatcgatcctttgatgcgtcgtgcagcgaagaccatcaatttcggtgttctctacggtatgagtgcccatcgtttgtcgcaggaattaggcattccctatgaagaagctgcggcgttcattcagcgctactttcaaagctatcccaaagttaaagcatggatcgagaagactctcgaagaaggccgcacacgtggttacgtagagaccttatttggacgtcgccgctatgttcccgatttaaacgctcgcgtgaaatctgtccgtgaagccgccgaacgcatggcgttcaacatgcctgtacagggcacggcagctgacctcatgaaacttgcaatggtgcgcctttttccacaattgcgtgaagttggtgcccgcatgctcttgcaggtccacgatgaactcttgttagaagcgccaaaagagcgtgcggaagaggtggcagccctcgcgaaagaggttatggaaggcgtgtggcccttagcggtgcctcttgaagtcgaagttggtattggcgaggattggttggctgccaaaggataatga

SEQ ID NO: 1072 - protein, 841 aa, synthetic construct
  REGION 1..841: note = Variant of DNA polymerase I from Thermus sp. strain 2.9
MHHHHHHGGSGMLPLFEPKGRVLLVDGHHLAYRNFFALKGLTTSRGEPVQGVYGFAKSLLKALKEDGDVVIVVFDAKAPSFRHEAYEAYKAGRAPTPEDFPRQLALMKELVDLLGLERLEVPGFEADDVLATLAKKAEREGYEVQILTADRDLFQLLSPRISVLHPEGHRITPEWLWEKYGLRPEQWVDFRALAGDPSDNIPGVKGIGEKTALKLLKEWGSLENLLKNLDQVKPESVREKILAHLEDLKLSRELSRVRTDLPLEVDFRGRREPDWEGLKAFLERLEFGSLLHEFGLLESPLPAEEAPWPPPEGAFLGYRLSRPEPMWAELLALAASAQGRVYRAEDPHGALRGLKEVRGLLAKDLAVVALREGLDLPPTDDPMLLAYLLDPSNTTPEGVARRYGGEWTEDAGERALLAERLHANLLGRLQGEERLLWLYEEVEKPLSRVLAHMEATGVKLDVAYLEALSLEVAAEMRRLEEEVFRLAGHSFNLNSRDQLEKVLFDELGLPPIGKTEKTGKRSTSAAVLEALREVHPIVDKILQYRELAKLKGTYIDPLPALVHPKTGRLHTRFNQTATATGRLSSSDPNLQNIPVRTPLGQKIRRAFVAEEGWRLVALDYSQIELRVLAHLSGDENLIRVFQEGKDIHTQTASWMFGLSAEAIDPLMRRAAKTINFGVLYGMSAHRLSQELGIPYEEAAAFIQRYFQSYPKVKAWIEKTLEEGRTRGYVETLFGRRRYVPDLNARVKSVREAAERMAFNMPVQGTAADLMKLAMVRLFPQLREVGARMLLQVHDELLLEAPKERAEEVAALAKEVMEGVWPLAVPLEVEVGIGEDWLAAKG

SEQ ID NO: 1073 - DNA, 2529 bp, synthetic construct
  misc_feature 1..2529: note = Variant of DNA polymerase I from Thermus sp. strain 2.9
  source 1..2529: mol_type = other DNA
atgcaccatcatcatcatcatggcggtagcggcatgttaccgttgttcgaacctaaaggtcgcgtgcttctggttgatggccatcatctcgcgtatcgtaacttctttgccctgaaaggattaaccaccagccgtggcgagccggtacagggtgtctacggctttgcaaagtcgctcctgaaagctctgaaagaagacggtgatgtggtgattgttgtctttgatgcgaaagcgccaagttttcgccacgaagcgtacgaagcttacaaagccgggcgtgctccaacgccggaagactttcctcgccaattggcgcttatgaaggaattagtggatttgcttggcctcgaacgcttggaagttcccggtttcgaggcagacgacgtattagcgactctcgcaaagaaagccgaacgtgagggctatgaagtccagatcttgacagcagatcgcgatcttttccagcttttatctccgcgcatctcggtgttacacccggaagggcatcgtatcaccccggaatggctctgggagaaatatggtttgcgtcccgaacaatgggtggattttcgcgccttagccggcgatccgagcgacaatattccgggagttaaaggtatcggcgagaagacggcgctcaagctccttaaagaatgggggtcgttggagaacttgcttaagaatttagatcaggtcaaaccagagtcagtgcgtgagaagattcttgcacacctcgaagacctcaaattaagccgcgaattgtcccgtgtacgcaccgatttgccgctcgaagttgatttccgtggccgccgcgaacctgactgggagggtcttaaagcgtttttagagcgtcttgaatttggttcgctcttgcatgaattcggccttttagaaagcccgttaccagccgaagaagcaccttggccaccgcccgaaggcgcgtttttaggttaccgtttgagtcgcccggaaccgatgtgggccgaattattggctcttgcagcgtctgcccagggacgtgtgtatcgcgcggaagaccctcatggtgcgctccgcggcctcaaagaagtccgtggactccttgccaaagacttagctgttgttgcattgcgcgaaggtcttgatttacctccgactgatgatccaatgcttcttgcgtacctcttggacccgtcaaacacgacgcccgaaggcgtagcccgtcgttacggcggcgagtggaccgaagatgcaggcgagcgcgcgttattggccgaacgtttgcacgcaaatttattaggacgtttgcaaggcgaggaacgtctcctctggctttacgaagaagtggagaaaccattgagtcgcgtgctcgctcatatggaagctaccggtgtcaaattagacgtggcgtatttggaggcactcagccttgaagttgctgccgaactgcgccgcttgaaggaagaagtattccgtttagcaggccactcctttaaccttaattctcgcgatcagttagaacgtgtgttgttcgatgaacttggtctccctcctatcggcaagacagagaagaccggtaaacgtagcacttcagcggcggttttagaagctcttcgcgaagtccatcccattgtggacaagatcttgcagtaccgcgaactcgcgaaattgaaaggcacctatattgaccgtcttccggcattagtccacccgaaaacgggacgcctccatacccgcttcaaccaaacagccacggcgaccggtcgtttgtcctcctctgatccaaaccttcagaatattccagtacgtaccccattgggccagaagatccgccgcgcgtttgtagctgaggagggttggcgtttagtggccctcgattatagccaaattgaattacgtgtccttgcccatctttctggcgatgagaacctcatccgcgtgtttcaggaaggcaaagacattcacactcaaacggcaagctggatgtttggactgccggcggaagcgatcgatcctttgatgcgtcgtgcagcgaagaccatcaatttcggtgttctctacggtatgagtgcccaccgtttgtcgcaggaattaggcattccctatgaagaagctgcggcgttcattcagcgctactttcaaagctatcccaaagttaaagcatggatcgagaagactctcgaagaaggccgcacacgtggttacgtagagaccttatttggacgtcgccgctatgttcccgatttaaacgctcgcgtgaaatctgtccgtgaagccgccgaacgcatggcgttcaacatgcctgtacagggcacggcagctgacctcatgaaacttgcaatggtgcgcctttttccacaattgcgtgaagttggtgcccgcatgctcttgcaggtccacgatgaactcttgttagaagcgccaaaagagcgtgcggaagaggtggcagccctcgcgaaagaggttatggaaggcgtgtggcccttagcggtgcctcttgaagtcgaagttggtattggcgaggattggttggctgccaaaggataatga

SEQ ID NO: 1074 - protein, 841 aa, synthetic construct
  REGION 1..841: note = Variant of DNA polymerase I from Thermus sp. strain 2.9
MHHHHHHGGSGMLPLFEPKGRVLLVDGHHLAYRNFFALKGLTTSRGEPVQGVYGFAKSLLKALKEDGDVVIVVFDAKAPSFRHEAYEAYKAGRAPTPEDFPRQLALMKELVDLLGLERLEVPGFEADDVLATLAKKAEREGYEVQILTADRDLFQLLSPRISVLHPEGHRITPEWLWEKYGLRPEQWVDFRALAGDPSDNIPGVKGIGEKTALKLLKEWGSLENLLKNLDQVKPESVREKILAHLEDLKLSRELSRVRTDLPLEVDFRGRREPDWEGLKAFLERLEFGSLLHEFGLLESPLPAEEAPWPPPEGAFLGYRLSRPEPMWAELLALAASAQGRVYRAEDPHGALRGLKEVRGLLAKDLAVVALREGLDLPPTDDPMLLAYLLDPSNTTPEGVARRYGGEWTEDAGERALLAERLHANLLGRLQGEERLLWLYEEVEKPLSRVLAHMEATGVKLDVAYLEALSLEVAAELRRLKEEVFRLAGHSFNLNSRDQLERVLFDELGLPPIGKTEKTGKRSTSAAVLEALREVHPIVDKILQYRELAKLKGTYIDRLPALVHPKTGRLHTRFNQTATATGRLSSSDPNLQNIPVRTPLGQKIRRAFVAEEGWRLVALDYSQIELRVLAHLSGDENLIRVFQEGKDIHTQTASWMFGLPAEAIDPLMRRAAKTINFGVLYGMSAHRLSQELGIPYEEAAAFIQRYFQSYPKVKAWIEKTLEEGRTRGYVETLFGRRRYVPDLNARVKSVREAAERMAFNMPVQGTAADLMKLAMVRLFPQLREVGARMLLQVHDELLLEAPKERAEEVAALAKEVMEGVWPLAVPLEVEVGIGEDWLAAKG

SEQ ID NO: 1075 - DNA, 2529 bp, synthetic construct
  misc_feature 1..2529: note = Variant of DNA polymerase I from Thermus sp. strain 2.9
  source 1..2529: mol_type = other DNA
atgcaccatcatcatcatcatggcggtagcggcatgttaccgttgttcgaacctaaaggtcgcgtgcttctggttgatggccatcatctcgcgtatcgtaacttctttgccctgaaaggattaaccaccagccgtggcgagccggtacagggtgtctacggctttgcaaagtcgctcctgaaagctctgaaagaagacggtgatgtggtgattgttgtctttgatgcgaaagcgccaagttttcgccacgaagcgtacgaagcttacaaagccgggcgtgctccaacgccggaagactttcctcgccaattggcgcttatgaaggaattagtggatttgcttggcctcgaacgcttggaagttcccggtttcgaggcagacgacgtattagcgactctcgcaaagaaagccgaacgtgagggctatgaagtccagatcttgacagcagatcgcgatcttttccagcttttatctccgcgcatctcggtgttacacccggaagggcatcgtatcaccccggaatggctctgggagaaatatggtttgcgtcccgaacaatgggtggattttcgcgccttagcaggcgatccgagcgacaatattccgggagttaaaggtatcggcgagaagacggcgctcaagctccttaaagaatgggggtcgttggagaacttgcttaagaatttagatcaggtcaaaccagagtcagtgcgtgagaagattcttgcacacctcgaagacctcaaattaagccgcgaattgtcccgtgtacgcaccgatttgccgctcgaagttgatttccgtggtcgccgcgaacctgactgggagggtcttaaagcgtttttagagcgtcttgaatttggttcgctcttgcatgaattcggccttttagaaagcccgttaccagccgaagaagcaccttggccaccgcccgaaggcgcgtttttaggttaccgtttgagtcgcccggaaccgatgtgggccgaattattggctcttgcagcgtctgcccaggggcgtgtgtatcgcgcggaagaccctcatggtgcgctccgcggcctcaaagaagtccgtggactccttgccaaagacttagctgttgttgcattgcgcgaaggtcttgatttacctccgactgatgatccaatgcttcttgcgtacctcttggacccgtcaaacacgacgcccgaaggcgtagcccgtcgttacggcggcgagtggaccgaagatgcaggcgagcgcgcgttattggccgaacgtttgcacgccaatttattaggacgtttgcaaggcgaggaacgtctcctctggctttacgaagaagtggagaaaccattgagtcgcgtgctcgcgcatatggaagctaccggtgtcaaattagacgtggcgtatttggaggcactcagccttgaagttgctgccgaaatgcgccgcttggaggaagaagtattccgtttagcaggccactcctttaaccttaattctcgcgatcagttagaacgtgtgttgttcgatgaacttggtctccctcctatcggcaagacagagaagaccggtaaacgtagcacttcagcggcggttttagaagctcttcgcgaagtccatcccattgtggacaagatcttgcagtaccgcgaactcgcgaaattgaaaggcacctatattgaccctcttccggcattagtccacccgaaaacgggacgcctccatacccgcttcaaccaaacagccacggcgaccggtcgtttgtcctcctctgatccaaaccttcagaatattccagtacgtaccccattgggccagaagatccgccgcgcgtttgtagctgaggagggttggcgtttagtggccctcgattatagccaaattgaattacgtgtccttgcccatctttctggcgatgagaacctcatccgcgtgtttcaggaaggcaaagacattcacactcaaacggcaagctggatgtttggattatcagctgaagcgatcgatcctttgatgcgtcgtgcagcgaagaccgttaatttcggtgttctctacggtatgagtgcccatcgtttgtcgcaggaattaggcattccctatgaagaagctgccgcgttcattcagcgctactttcaaagctatcccaaagttaaagcatggatcgagaagactctcgaagaaggccgcacacgtggttacgtagagaccttatttggacgtcgccgctatgttcccgatttaaacgctcgcgtgaaatctgtccgtgaagccgccgaacgcatggcgttcaacatgcctgtacagggcacggcagctgacctcatgaaacttgcaatggtgcgcctttttccacaattgcgtgaagttggtgcccgcatgctcttgcaggtccacgatgaactcttgttagaagcgccaaaagagcgtgcggaagaggtggcagccctcgcgaaagaggttatggaaggcgtgtggcccttagcggtgcctcttgaagtcgaagttggtattggcgaggattggttggctgccaaaggataatga

SEQ ID NO: 1076 - protein, 841 aa, synthetic construct
  REGION 1..841: note = Variant of DNA polymerase I from Thermus sp. strain 2.9
MHHHHHHGGSGMLPLFEPKGRVLLVDGHHLAYRNFFALKGLTTSRGEPVQGVYGFAKSLLKALKEDGDVVIVVFDAKAPSFRHEAYEAYKAGRAPTPEDFPRQLALMKELVDLLGLERLEVPGFEADDVLATLAKKAEREGYEVQILTADRDLFQLLSPRISVLHPEGHRITPEWLWEKYGLRPEQWVDFRALAGDPSDNIPGVKGIGEKTALKLLKEWGSLENLLKNLDQVKPESVREKILAHLEDLKLSRELSRVRTDLPLEVDFRGRREPDWEGLKAFLERLEFGSLLHEFGLLESPLPAEEAPWPPPEGAFLGYRLSRPEPMWAELLALAASAQGRVYRAEDPHGALRGLKEVRGLLAKDLAVVALREGLDLPPTDDPMLLAYLLDPSNTTPEGVARRYGGEWTEDAGERALLAERLHANLLGRLQGEERLLWLYEEVEKPLSRVLAHMEATGVKLDVAYLEALSLEVAAEMRRLEEEVFRLAGHSFNLNSRDQLERVLFDELGLPPIGKTEKTGKRSTSAAVLEALREVHPIVDKILQYRELAKLKGTYIDPLPALVHPKTGRLHTRFNQTATATGRLSSSDPNLQNIPVRTPLGQKIRRAFVAEEGWRLVALDYSQIELRVLAHLSGDENLIRVFQEGKDIHTQTASWMFGLSAEAIDPLMRRAAKTVNFGVLYGMSAHRLSQELGIPYEEAAAFIQRYFQSYPKVKAWIEKTLEEGRTRGYVETLFGRRRYVPDLNARVKSVREAAERMAFNMPVQGTAADLMKLAMVRLFPQLREVGARMLLQVHDELLLEAPKERAEEVAALAKEVMEGVWPLAVPLEVEVGIGEDWLAAKG

SEQ ID NO: 1077 - DNA, 2529 bp, synthetic construct
  misc_feature 1..2529: note = Variant of DNA polymerase I from Thermus sp. strain 2.9
  source 1..2529: mol_type = other DNA
atgcaccatcatcatcatcatggcggtagcggcatgttaccgttgttcgaacctaaaggtcgcgtgcttctggttgatggccatcatctcgcgtatcgtaacttctttgccctgaaaggattaaccaccagccgtggcgagccggtacagggtgtctacggctttgcaaagtcgctcctgaaagctctgaaagaagacggtgatgtggtgattgttgtctttgatgcgaaagcgccaagttttcgccacgaagcgtacgaagcttacaaagccgggcgtgctccaacgccggaagactttcctcgccaattggcgcttatgaaggaattagtggatttgcttggcctcgaacgcttggaagttcccggtttcgaggcagacgacgtattagcgactctcgcaaagaaagccgaacgtgagggctatgaagtccagatcttgacagcagatcgcgatcttttccagcttttatctccgcgcatctcggtgttacacccggaagggcatcgtatcaccccggaatggctctgggagaaatatggtttgcgtcccgaacaatgggtggattttcgcgccttagccggcgatccgagcgacaatattccgggagttaaaggtatcggcgagaagacggcgctcaagctccttaaagaatgggggtcgttggagaacttgcttaagaatttagatcaggtcaaaccagagtcagtgcgtgagaagattcttgcacacctcgaagacctcaaattaagccgcgaattgtcccgtgtacgcaccgatttgccgctcgaagttgatttccgtggccgccgcgaacctgactgggagggtcttaaagcgtttttagagcgtcttgaatttggttcgctcttgcatgaattcggccttttagaaagcccgttaccagccgaagaagcaccttggccaccgcccgaaggcgcgtttttaggttaccgtttgagtcgcccggaaccgatgtgggccgaattattggctcttgcagcgtctgcccagggacgtgtgtatcgcgcggaagaccctcatggtgcgctccgcggcctcaaagaagtccgtggactccttgccaaagacttagctgttgttgcattgcgcgaaggtcttgatttacctccgactgatgatccaatgcttcttgcgtacctcttggacccgtcaaacacgacgcccgaaggcgtagcccgtcgttacggcggcgagtggaccgaagatgcaggcgagcgcgcgttattggccgaacgtttgcaccagaatttattaggacgtttgcaaggcgaggaacgtctcctctggctttacgaagaagtggagaaaccattgagtcgcgtgctcgcgcatatggaagctaccggtgtcaaattagacgtggcgtatttggaggcactcagccttgaagttgctgccgaaatgcgccgcttggaggaagaagtattccgtttagcaggccactcctttaaccttaattctcgcgatcagttagaacgtgtgttgttcgatgaacttggtctccctcctatcggcaagacagagaagaccggtaaacgtagcacttcagcggcggttttagaagctcttcgcgaagtccatcccattgtggacaagatcttgcagtaccgcgaactcgcgaaattgaaaggcacctatattgaccctcttccggcattagtccacccgaaaacgggacgcctccatacccgcttcaaccaaacagccacggcgaccggtcgtttgtcctcctctgatccaaaccttcagaatattccagtacgtaccccattgggccagaagatccgccgcgcgtttgtagctgaggagggttggcgtttagtggccctcgattatagccaaattgaattacgtgtccttgcccatctttctggcgatgagaacctcatccgcgtgtttcaggaaggcaaagacattcacactcaaacggcaagctggatgtttggattatcagctgaagcgatcgatcctttgatgcgtcgtgcagcgaagaccatcaatttcggtgttctctacggtatgagtgccgctcgtttgtcgcaggaattaggcattccctatgaagaagctgcggcgttcattcagcgctactttcaaagctatcccaaagttaaagcatggatcgagaagactctcgaagaaggccgcacacgtggttacgtagagaccttatttggacgtcgccgctatgttcccgatttaaccgctcgcgtgaaatctgtccgtgaagccgccgaacgcatggcgttcaacatgcctgtacagggcacggcagctgacctcatgaaacttgcaatggtgcgcctttttccacaattgcgtgaagttggtgcccgcatgctcttgcaggtccacgatgaactcttgttagaagcgccaaaagagcgtgcggaagaggtggcagccctcgcgaaagaggttatggaaggcgtgtggcccttagcggtgcctcttgaagtcgaagttggtattggcgaggattggttggctgccaaaggataatga

SEQ ID NO: 1078 - protein, 841 aa, synthetic construct
  REGION 1..841: note = Variant of DNA polymerase I from Thermus sp. strain 2.9
MHHHHHHGGSGMLPLFEPKGRVLLVDGHHLAYRNFFALKGLTTSRGEPVQGVYGFAKSLLKALKEDGDVVIVVFDAKAPSFRHEAYEAYKAGRAPTPEDFPRQLALMKELVDLLGLERLEVPGFEADDVLATLAKKAEREGYEVQILTADRDLFQLLSPRISVLHPEGHRITPEWLWEKYGLRPEQWVDFRALAGDPSDNIPGVKGIGEKTALKLLKEWGSLENLLKNLDQVKPESVREKILAHLEDLKLSRELSRVRTDLPLEVDFRGRREPDWEGLKAFLERLEFGSLLHEFGLLESPLPAEEAPWPPPEGAFLGYRLSRPEPMWAELLALAASAQGRVYRAEDPHGALRGLKEVRGLLAKDLAVVALREGLDLPPTDDPMLLAYLLDPSNTTPEGVARRYGGEWTEDAGERALLAERLHQNLLGRLQGEERLLWLYEEVEKPLSRVLAHMEATGVKLDVAYLEALSLEVAAEMRRLEEEVFRLAGHSFNLNSRDQLERVLFDELGLPPIGKTEKTGKRSTSAAVLEALREVHPIVDKILQYRELAKLKGTYIDPLPALVHPKTGRLHTRFNQTATATGRLSSSDPNLQNIPVRTPLGQKIRRAFVAEEGWRLVALDYSQIELRVLAHLSGDENLIRVFQEGKDIHTQTASWMFGLSAEAIDPLMRRAAKTINFGVLYGMSAARLSQELGIPYEEAAAFIQRYFQSYPKVKAWIEKTLEEGRTRGYVETLFGRRRYVPDLTARVKSVREAAERMAFNMPVQGTAADLMKLAMVRLFPQLREVGARMLLQVHDELLLEAPKERAEEVAALAKEVMEGVWPLAVPLEVEVGIGEDWLAAKG

SEQ ID NO: 1079 - DNA, 2529 bp, synthetic construct
  misc_feature 1..2529: note = Variant of DNA polymerase I from Thermus sp. strain 2.9
  source 1..2529: mol_type = other DNA
atgcaccatcatcatcatcatggcggtagcggcatgttaccgttgttcgaacctaaaggtcgcgtgcttctggttgatggccatcatctcgcgtatcgtaacttctttgccctggagggattaaccaccagccgtggcgagccggtacagggtgtctacggctttgcaaagtcgctcctgaaagctctgaaagaagacggtgatgtggtgattgttgtctttgatgcgaaagcgccaagttttcgccacgaagcgtacgaagcttacaaagccgggcgtgctccaacgccggaagactttcctcgccaattggcgcttatgaaggaattagtggatttgcttggcctcgaacgcttggaagttcccggtttcgaggcagacgacgtattagcgactctcgcaaagaaagccgaacgtgagggctatgaagtccagatcttgacagcagatcgcgatcttttccagcttttatctccgcgcatctcggtgttacacccggaagggcatcgtatcaccccggaatggctctgggagaaatatggtttgcgtcccgaacaatgggtggattttcgcgccttagcaggcgatccgagcgacaatattccgggagttaaaggtatcggcgagaagacggcgctcaagctccttaaagaatgggggtcgttggagaacttgcttaagaatttagatcaggtcaaaccagagtcagtgcgtgagaagattcttgcacacctcgaagacctcaaattaagccgcgaattgtcccgtgtacgcaccgatttgccgctcgaagttgatttccgtggccgccgcgaacctgactgggagggtcttaaagcgtttttagagcgtcttgaatttggttcgctcttgcatgaattcggccttttagaaagcccgttaccagccgaagaagcaccttggccaccgcccgaaggcgcgtttttaggttaccgtttgagtcgcccggaaccgatgtgggccgaattattggctcttgcagcgtctgcccagggacgtgtgtatcgcgcggaagaccctcatggtgcgctccgcggcctcaaagaagtccgtggactccttgccaaagacttagctgttgttgcattgcgcgaaggtcttgatttacctccgactgatgatccaatgcttcttgcgtacctcttggacccgtcaaacacgacgcccgaaggcgtagcccgtcgttacggcggcgagtggaccgaagatgcaggcgagcgcgcgttattggccgaacgtttgcacgccaatttattaggacgtttgcaaggcgaggaacgtctcctctggctttacgaagaagtggagaaaccattgagtcgcgtgctcgcgcatatggaagctaccggtgtcaaattagacgtggcgtatttggaggcactcagccttgaagttgctgccgaaatgcgccgcttggaggaagaagtattccgtttagcaggccactcctttaaccttaattctcgcgatcagttagaacgtgtgttgttcgatgaacttggtctccctcctatcggcaagacagagaagaccggtaaacgtagcacttcagcggcggttttagaagctcttcgcgaagtccatcccattgtggacaagatcttgcagtaccgcgaactcgcgaaattgaaaggcacctatattgaccctcttccggcattagtccacccgaaaacgggacgcctccatacccgcttcaaccaaacagccacggcgaccggtcgtttgtcctcctctgatccaaaccttcagaatattccagtacgtaccccattgggccagaagatccgccgcgcgtttgtagctgaggagggttggcgtttagtggccctcgattatagccaaattgaattacgtgtccttgcccatctttctggcgatgagaacctcatccgcgtgtttcaggaaggcaaagacattcacactcaaacggcaagctggatgtttggattatcagctgaagcgatcgatcctttgatgcgtcgtgcagcgaagaccatcaatttcggtgttctctacggtatgagtgcccatcgtttgtcgcaggaattaggcattccctatgaagaagctgcggcgttcattcagcgctactttcaaagctatcccaaagttaaagcatggatcgagaagactctcgaagaaggccgcacacgtggttacgtagagaccttatttggacgtcgccgctatgttcccgatttaaacgctcgcgtgaaatctgtccgtgaagccgccgaacgcatggcgttcaacatgcctgtacagggcacggcagctgacctcatgaaacttgcaatggtgcgcctttttccacaattgcgtgaagttggtgcccgcatgctcttgcaggtccacgatgaactcttgttagaagcgccaaaagagcgtgcggaagaggtggcagccctcgcgaaagaggttatggaaggcgtgtggcccttagcggtgcctcttgaagtcgaagttggtattggcgaggattggttggctgccaaaggataatga

SEQ ID NO: 1080 - protein, 841 aa, synthetic construct
  REGION 1..841: note = Variant of DNA polymerase I from Thermus sp. strain 2.9
MHHHHHHGGSGMLPLFEPKGRVLLVDGHHLAYRNFFALEGLTTSRGEPVQGVYGFAKSLLKALKEDGDVVIVVFDAKAPSFRHEAYEAYKAGRAPTPEDFPRQLALMKELVDLLGLERLEVPGFEADDVLATLAKKAEREGYEVQILTADRDLFQLLSPRISVLHPEGHRITPEWLWEKYGLRPEQWVDFRALAGDPSDNIPGVKGIGEKTALKLLKEWGSLENLLKNLDQVKPESVREKILAHLEDLKLSRELSRVRTDLPLEVDFRGRREPDWEGLKAFLERLEFGSLLHEFGLLESPLPAEEAPWPPPEGAFLGYRLSRPEPMWAELLALAASAQGRVYRAEDPHGALRGLKEVRGLLAKDLAVVALREGLDLPPTDDPMLLAYLLDPSNTTPEGVARRYGGEWTEDAGERALLAERLHANLLGRLQGEERLLWLYEEVEKPLSRVLAHMEATGVKLDVAYLEALSLEVAAEMRRLEEEVFRLAGHSFNLNSRDQLERVLFDELGLPPIGKTEKTGKRSTSAAVLEALREVHPIVDKILQYRELAKLKGTYIDPLPALVHPKTGRLHTRFNQTATATGRLSSSDPNLQNIPVRTPLGQKIRRAFVAEEGWRLVALDYSQIELRVLAHLSGDENLIRVFQEGKDIHTQTASWMFGLSAEAIDPLMRRAAKTINFGVLYGMSAHRLSQELGIPYEEAAAFIQRYFQSYPKVKAWIEKTLEEGRTRGYVETLFGRRRYVPDLNARVKSVREAAERMAFNMPVQGTAADLMKLAMVRLFPQLREVGARMLLQVHDELLLEAPKERAEEVAALAKEVMEGVWPLAVPLEVEVGIGEDWLAAKG

SEQ ID NO: 1081 - DNA, 2529 bp, synthetic construct
  misc_feature 1..2529: note = Variant of DNA polymerase I from Thermus sp. strain 2.9
  source 1..2529: mol_type = other DNA
atgcaccatcatcatcatcatggcggtagcggcatgttaccgttgttcgaacctaaaggtcgcgtgcttctggttgatggccatcatctcgcgtatcgtaacttctttgccctgaaaggattaaccaccagccgtggcgagccggtacagggtgtctacggctttgcaaagtcgctcctgaaagctctgaaagaagacggtgatgtggtgattgttgtctttgatgcgaaagcgccaagttttcgccacgaagcgtacgaagcttacaaagccgggcgtgctccaacgccggaagactttcctcgccaattggcgcttatgaaggaattagtggatttgcttggcctcgaacgcttggaagttcccggtttcgaggcagacgacgtattagcgactctcgcaaagaaagccgaacgtgagggctatgaagtccagatcttgacagcagatcgcgatcttttccagcttttatctccgcgcatctcggtgttacacccggaagggcatcgtatcaccccggaatggctctgggagaaatatggtttgcgtcccgaacaatgggtggattttcgcgccttagcaggcgatccgagcgacaatattccgggagttaaaggtatcggcgagaagacggcgctcaagctccttaaagaatgggggtcgttggagaacttgcttaagaatttagatcaggtcaaaccagagtcagtgcgtgagaagattcttgcacacctcgaagacctcgagttaagccgcgaattgtcccgtgtacgcaccgatttgccgctcgaagttgatttccgtggccgccgcgaacctgactgggagggtcttaaagcgtttttagagcgtcttgaatttggttcgctcttgcatgaattcggccttttagaaagcccgttaccagccgaagaagcaccttggccaccgcccgaaggcgcgtttttaggttaccgtttgagtcgcccggaaccgatgtgggccgaattattggctcttgcagcgtctgcccagggacgtgtgtatcgcgcggaagaccctcatggtgcgctccgcggcctcaaagaagtccgtggactccttgccaaagacttagctgttgttgcattgcgcgaaggtcttgatttacctccgactgatgatccaatgcttcttgcgtacctcttggacccgtcaaacacgacgcccgaaggcgtagcccgtcgttacggcggcgagtggaccgaagatgcaggcgagcgcgcgttattggccgaacgtttgcacgccaatttattaggacgtttgcaaggcgaggaacgtctcctctggctttacgaagaagtggagaaaccattgagtcgcgtgctcgcgcatatggaagctaccggtgtcaaattagacgtggcgtatttggaggcactcagccttgaagttgctgccgaaatgcgccgcttggaggaagaagtattccgtttagcaggccactcctttaaccttaattctcgcgatcagttagaacgtgtgttgttcgatgaacttggtctccctcctatcggcaagacagagaagaccggtaaacgtagcacttcagcggcggttttagaagctcttcgcgaagtccatcccattgtggacaagatcttgcagtaccgcgaactcgcgaaattgaaaggcacctatattgaccctcttccggcattagtccacccgaaaacgggacgcctccatacccgcttcaaccaaacagccacggcgaccggtcgtttgtcctcctctgatccaaaccttcagaatattccagtacgtaccccattgggccagaagatccgccgcgcgtttgtagctgaggagggttggcgtttagtggccctcgattatagccaaattgaattacgtgtccttgcccatctttctggcgatgagaacctcatccgcgtgtttcaggaaggcaaagacattcacactcaaacggcaagctggatgtttggattatcagctgaagcgatcgatcctttgatgcgtcgtgcagcgaagaccatcaatttcggtgttctctacggtatgagtgcccatcgtttgtcgcaggaattaggcattccctatgaagaagctgcggcgttcattcagcgctactttcaaagctatcccaaagttaaagcatggatcgagaagactctcgaagaaggccgcacacgtggttacgtagagaccttatttggacgtcgccgctatgttcccgatttaaacgctcgcgtgaaatctgtccgtgaagccgccgaacgcatggcgttcaacatgcctgtacagggcacggcagctgacctcatgaaacttgcaatggtgcgcctttttccacaattgcgtgaagttggtgcccgcatgctcttgcaggtccacgatgaactcttgttagaagcgccaaaagagcgtgcggaagaggtggcagccctcgcgaaagaggttatggaaggcgtgtggcccttagcggtgcctcttgaagtcgaagttggtattggcgaggattggttggctgccaaaggataatga

SEQ ID NO: 1082 - protein, 841 aa, synthetic construct
  REGION 1..841: note = Variant of DNA polymerase I from Thermus sp. strain 2.9
MHHHHHHGGSGMLPLFEPKGRVLLVDGHHLAYRNFFALKGLTTSRGEPVQGVYGFAKSLLKALKEDGDVVIVVFDAKAPSFRHEAYEAYKAGRAPTPEDFPRQLALMKELVDLLGLERLEVPGFEADDVLATLAKKAEREGYEVQILTADRDLFQLLSPRISVLHPEGHRITPEWLWEKYGLRPEQWVDFRALAGDPSDNIPGVKGIGEKTALKLLKEWGSLENLLKNLDQVKPESVREKILAHLEDLELSRELSRVRTDLPLEVDFRGRREPDWEGLKAFLERLEFGSLLHEFGLLESPLPAEEAPWPPPEGAFLGYRLSRPEPMWAELLALAASAQGRVYRAEDPHGALRGLKEVRGLLAKDLAVVALREGLDLPPTDDPMLLAYLLDPSNTTPEGVARRYGGEWTEDAGERALLAERLHANLLGRLQGEERLLWLYEEVEKPLSRVLAHMEATGVKLDVAYLEALSLEVAAEMRRLEEEVFRLAGHSFNLNSRDQLERVLFDELGLPPIGKTEKTGKRSTSAAVLEALREVHPIVDKILQYRELAKLKGTYIDPLPALVHPKTGRLHTRFNQTATATGRLSSSDPNLQNIPVRTPLGQKIRRAFVAEEGWRLVALDYSQIELRVLAHLSGDENLIRVFQEGKDIHTQTASWMFGLSAEAIDPLMRRAAKTINFGVLYGMSAHRLSQELGIPYEEAAAFIQRYFQSYPKVKAWIEKTLEEGRTRGYVETLFGRRRYVPDLNARVKSVREAAERMAFNMPVQGTAADLMKLAMVRLFPQLREVGARMLLQVHDELLLEAPKERAEEVAALAKEVMEGVWPLAVPLEVEVGIGEDWLAAKG

SEQ ID NO: 1083 - DNA, 2529 bp, synthetic construct
  misc_feature 1..2529: note = Variant of DNA polymerase I from Thermus sp. strain 2.9
  source 1..2529: mol_type = other DNA
atgcaccatcatcatcatcatggcggtagcggcatgttaccgttgttcgaacctaaaggtcgcgtgcttctggttgatggccatcatctcgcgtatcgtaacttctttgccctgaaaggattaaccaccagccgtggcgagccggtacagggtgtctacggctttgcaaagtcgctcctgaaagctctgaaagaagacggtgatgtggtgattgttgtctttgatgcgaaagcgccaagttttcgccacgaagcgtacgaagcttacaaagccgggcgtgctccaacgccggaagactttcctcgccaattggcgcttatgaaggaattagtggatttgcttggcctcgaacgcttggaagttcccggtttcgaggcagacgacgtattagcgactctcgcaaagaaagccgaacgtgagggctatgaagtccagatcttgacagcagatcgcgatcttttccagcttttatctccgcgcatctcggtgttacacccggaagggcatcgtatcaccccggaatggctctgggagaaatatggtttgcgtcccgaacaatgggtggattttcgcgccttagcaggcgatccgagcgacaatattccgggagttaaaggtatcggcgagaagacggcgctcaagctccttaaagaatgggggtcgttggagaacttgcttaagaatttagatcaggtcaaaccagagtcagtgcgtgagaagattcttgcacacctcgaagacctcaaattaagccgcgaattgtcccgtgtacgcaccgatttgccgctcgaagttgatttccgtcgtcgccgcgaacctgactgggagggtcttaaagcgtttttagagcgtcttgaatttggttcgctcttgcatgaattcggccttttagaaagcccgttaccagccgaagaagcaccttggccaccgcccgaaggcgcgtttttaggttaccgtttgagtcgcccggaaccgatgtgggccgaattattggctcttgcagcgtctgcccagggacgtgtgtatcgcgcggaagaccctcatggtgcgctccgcggcctcaaagaagtccgtggactccttgccaaagacttagctgttgttgcattgcgcgaaggtcttgatttacctccgactgatgatccaatgcttcttgcgtacctcttggacccgtcaaacacgacgcccgaaggcgtagcccgtcgttacggcggcgagtggaccgaagatgcagctgagcgcgcgttattggccgaacgtttgcacgccaatttattaggacgtttgcaaggcgaggaacgtctcctctggctttacgaagaagtggagaaaccattgagtcgcgtgctcgcgcatatggaagctaccggtgtcaaattagacgtggcgtatttggagaacctcagccttgaagttgctgccgaaatgcgccgcttggaggaagaagtattccgtttagcaggccactcctttaaccttaattctcgcgatcagttagaacgtgtgttgttcgatgagcttggtctccctcctatcggcaagacagagaagaccggtaaacgtagcacttcagcggcggttttagaagctcttcgcgaagtccatcccattgtggacaagatcttgcagtaccgcgaactcgcgaaattgaaaggcacctatattgaccctcttccggcattagtccacccgaaaacgggacgcctccatacccgcttcaaccaaacagccacggcgaccggtcgtttgtcctcctctgatccaaaccttcagaatattccagtacgtaccccattgggccagaagatccgccgcgcgtttgtagctgaggagggttggcgtttagtggccctcgattatagccaaattgaattacgtgtccttgcccatctttctggcgatgagaacctcatccgcgtgtttcaggaaggcaaagacattcacactcaaacggcaagctggatgtttggattatcagctgaagcgatcgatcctttgatgcgtcgtgcagcgaagaccattaatttcggtgttctctacggtatgagtgcccatcgtttgtcgcaggaattaggcattccctatgaagaagctgccgcgttcattcagaagtactttcaaagctatcccaaagttaaagcatggatcgagaagactctcgaagaaggccgcacacgtggttacgtagagaccttatttggacgtcgccgctatgttcccgatttaaacgctcgcgtgaaatctgtccgtgaagccgccgaacgcatggcgttcaacatgcctgtacagggcacggcagctgacctcatgaaacttgcaatggtgcgcctttttccacaattgcgtgaagttggtgcccgcatgctcttgcaggtccacgatgaactcttgttagaagcgccaaaagagcgtgcggaagaggtggcagccctcgcgaaagaggttatggaaggcgtgtggcccttagcggtgcctcttgaagtcgaagttggtattggcgaggattggttggctgccaaaggataatga

SEQ ID NO: 1084 - protein, 841 aa, synthetic construct
  REGION 1..841: note = Variant of DNA polymerase I from Thermus sp. strain 2.9
MHHHHHHGGSGMLPLFEPKGRVLLVDGHHLAYRNFFALKGLTTSRGEPVQGVYGFAKSLLKALKEDGDVVIVVFDAKAPSFRHEAYEAYKAGRAPTPEDFPRQLALMKELVDLLGLERLEVPGFEADDVLATLAKKAEREGYEVQILTADRDLFQLLSPRISVLHPEGHRITPEWLWEKYGLRPEQWVDFRALAGDPSDNIPGVKGIGEKTALKLLKEWGSLENLLKNLDQVKPESVREKILAHLEDLKLSRELSRVRTDLPLEVDFRRRREPDWEGLKAFLERLEFGSLLHEFGLLESPLPAEEAPWPPPEGAFLGYRLSRPEPMWAELLALAASAQGRVYRAEDPHGALRGLKEVRGLLAKDLAVVALREGLDLPPTDDPMLLAYLLDPSNTTPEGVARRYGGEWTEDAAERALLAERLHANLLGRLQGEERLLWLYEEVEKPLSRVLAHMEATGVKLDVAYLENLSLEVAAEMRRLEEEVFRLAGHSFNLNSRDQLERVLFDELGLPPIGKTEKTGKRSTSAAVLEALREVHPIVDKILQYRELAKLKGTYIDPLPALVHPKTGRLHTRFNQTATATGRLSSSDPNLQNIPVRTPLGQKIRRAFVAEEGWRLVALDYSQIELRVLAHLSGDENLIRVFQEGKDIHTQTASWMFGLSAEAIDPLMRRAAKTINFGVLYGMSAHRLSQELGIPYEEAAAFIQKYFQSYPKVKAWIEKTLEEGRTRGYVETLFGRRRYVPDLNARVKSVREAAERMAFNMPVQGTAADLMKLAMVRLFPQLREVGARMLLQVHDELLLEAPKERAEEVAALAKEVMEGVWPLAVPLEVEVGIGEDWLAAKG

SEQ ID NO: 1085 - DNA, 2529 bp, synthetic construct
  misc_feature 1..2529: note = Variant of DNA polymerase I from Thermus sp. strain 2.9
  source 1..2529: mol_type = other DNA
atgcaccatcatcatcatcatggcggtagcggcatgttaccgttgttcgaacctaaaggtcgcgtgcttctggttgatggccatcatctcgcgtatcgtaacttctttgccctgaaaggattaaccaccagccgtggcgagccggtacagggtgtctacggctttgcaaagtcgctcctgaaagctctgaaagaagacggtgatgtggtgattgttgtctttgatgcgaaagcgccaagttttcgccacgaagcgtacgaagcttacaaagccgggcgtgctccaacgccggaagactttcctcgccaattggcgcttatgaaggaattagtggatttgcttggcctcgaacgcttggaagttcccggtttcgaggcagacgacgtattagcgactctcgcaaagaaagccgaacgtgagggctatgaagtccagatcttgacagcagatcgcgatcttttccagcttttatctccgcgcatctcggtgttacacccggaagggcatcgtatcaccccggaatggctctgggagaaatatggtttgcgtcccgaacaatgggtggattttcgcgccttagcaggcgatccgagcgacaatattccgggagttaaaggtatcggcgagaagacggcgctcaagctccttaaagaatgggggtcgttggagaacttgcttaagaatttagatcaggtcaaaccagagtcagtgcgtgagaagattcttgcacacctcgaagacctcaaattaagccgcgaattgtcccgtgtacgcaccgatttgccgctcgaagttgatttccgtggccgccgcgaacctgactgggagggtcttaaagcgtttttagagcgtcttgaatttggttcgctcttgcatgaattcggccttttagaaagcccgttaccagccgaagaagcaccttggccaccgcccgaaggcgcgtttttaggttaccgtttgagtcgcccggaaccgatgtgggccgaattatcggctcttgcagcgtctgcccaggggcgtgtgtatcgcgcggaagaccctcatggtgcgctccgcggcctcaaagaagtccgtggactccttgccaaagacttagctgttgttgcattgcgcgaaggtcttgatttacctccgactgatgatccaatgcttcttgcgtacctcttggacccgtcaaacacgacgcccgaaggcgtagcccgtcgttacggcggcgagtggaccgaagatgcaggcgagcgcgcgttattggccgaacgtttgcacgccaatttattaggacgtttgcaaggcgaggaacgtctcctctggctttacgaagaagtggagaaaccattgagtcgcgtgctcgcgcatatggaagctaccggtgtcaaattagacgtggcgtatttggaggctctcagccttgaagttgctgccgaaatgcgccgcttggaggaagaagtattccgtttagcaggccactcctttaaccttaattctcgcgatcagttagaacgtgtgttgttcgataaccttggtctccctcctatcggcaagacagagaagaccggtaaacgtagcacttcagcggcggttttagaagctcttcgcgaagtccatcccattgtggacaagatcttgcagtaccgcgaactcgcgaaattgaaaggcacctatattgaccctcttccggcattagtccacccgaaaacgggacgcctccatacccgcttcaaccaaacagccacggcgaccggtcgtttgtcctcctctgatccaaaccttcagaatattccagtacgtaccccattgggccagaagatccgccgcgcgtttgtagctgaggagggttggcgtttagtggccctcgattatagccaaattgaattacgtgtccttgcccatctttctggcgatgagaacctcatccgcgtgtttcaggaaggcaaagacattcacactcaaacggcaagctggatgtttggattatcagctgaagcgatcgatcctttgatgcgtcgtgcagcgaagaccatcaatttcggtgttctctacggtatgagtgcccatcgtttgtcgcaggaattaggcattccctatgaagaagctgccgcgttcattcagcgctactttcaaagctatcccaaagttaaagcatggatcgagaagactctcgaagaaggccgcacacgtggttacgtagagaccttatttggacgtcgccgctatgttcccgatttaaacgctcgcgtgaaatctgtccgtgaagccgccgaacgcatggcgttcaacatgcctgtacagggcacggcagctgacctcatgaaacttgcaatggtgcgcctttttccacaattgcgtgaagttggtgcccgcatgctcttgcaggtccacgatgaactcttgttagaagcgccaaaagagcgtgcggaagaggtggcagccctcgcgaaagaggttatggaaggcgtgtggcccttagcggtgcctcttgaagtcgaagttggtattggcgaggattggttggctgccaaaggataatga

SEQ ID NO: 1086 - protein, 841 aa, synthetic construct
  REGION 1..841: note = Variant of DNA polymerase I from Thermus sp. strain 2.9
MHHHHHHGGSGMLPLFEPKGRVLLVDGHHLAYRNFFALKGLTTSRGEPVQGVYGFAKSLLKALKEDGDVVIVVFDAKAPSFRHEAYEAYKAGRAPTPEDFPRQLALMKELVDLLGLERLEVPGFEADDVLATLAKKAEREGYEVQILTADRDLFQLLSPRISVLHPEGHRITPEWLWEKYGLRPEQWVDFRALAGDPSDNIPGVKGIGEKTALKLLKEWGSLENLLKNLDQVKPESVREKILAHLEDLKLSRELSRVRTDLPLEVDFRGRREPDWEGLKAFLERLEFGSLLHEFGLLESPLPAEEAPWPPPEGAFLGYRLSRPEPMWAELSALAASAQGRVYRAEDPHGALRGLKEVRGLLAKDLAVVALREGLDLPPTDDPMLLAYLLDPSNTTPEGVARRYGGEWTEDAGERALLAERLHANLLGRLQGEERLLWLYEEVEKPLSRVLAHMEATGVKLDVAYLEALSLEVAAEMRRLEEEVFRLAGHSFNLNSRDQLERVLFDNLGLPPIGKTEKTGKRSTSAAVLEALREVHPIVDKILQYRELAKLKGTYIDPLPALVHPKTGRLHTRFNQTATATGRLSSSDPNLQNIPVRTPLGQKIRRAFVAEEGWRLVALDYSQIELRVLAHLSGDENLIRVFQEGKDIHTQTASWMFGLSAEAIDPLMRRAAKTINFGVLYGMSAHRLSQELGIPYEEAAAFIQRYFQSYPKVKAWIEKTLEEGRTRGYVETLFGRRRYVPDLNARVKSVREAAERMAFNMPVQGTAADLMKLAMVRLFPQLREVGARMLLQVHDELLLEAPKERAEEVAALAKEVMEGVWPLAVPLEVEVGIGEDWLAAKG

SEQ ID NO: 1087 - DNA, 2529 bp, synthetic construct
  misc_feature 1..2529: note = Variant of DNA polymerase I from Thermus sp. strain 2.9
  source 1..2529: mol_type = other DNA
atgcaccatcatcatcatcatggcggtagcggcatgttaccgttgttcgaacctaaaggtcgcgtgcttctggttgatggccatcatctcgcgtatcgtaacttctttgccctgaaaggattaaccaccagccgtggcgagccggtacagggtgtctacggctttgcaaagtcgctcctgaaagctctgaaagaagacggtgatgtggtgattgttgtctttgatgcgaaagcgccaagttttcgccacgaagcgtacgaagcttacaaagccgggcgtgctccaacgccggaagactttcctcgccaattggcgcttatgaaggaattagtggatttgcttggcctcgaacgcttggaagttcccggtttcgaggcagacgacgtattagcgactctcgcaaagaaagccgaacgtgagggctatgaagtccagatcttgacagcagatcgcgatcttttccagcttttatctccgcgcatctcggtgttacacccggaagggcatcgtatcaccccggaatggctctgggagaaatatggtttgcgtcccgaacaatgggtggattttcgcgccttagcaggcgatccgagcgacaatattccgggagttaaaggtatcggcgagaagacggcgctcaagctccttaaagaatgggggtcgttggagaacttgcttaagaatttagatcaggtcaaaccagagtcagtgcgtgagaagattcttgcacacctcgaagacctcaaattaagccgcgaattgtcccgtgtacgcaccgatttgccgctcgaagttgatttccgtggtcgccgcgaacctgactgggagggtcttaaagcgtttttagagcgtcttgaatttggttcgctcttgcatgaattcggccttttagaaagcccgttaccagccgaagaagcaccttggccaccgcccgaaggcgcgtttttaggttaccgtttgagtcgcccggaaccgatgtgggccgaattatcggctcttgcagcgtctgcccagggacgtgtgtatcgcgcggaagaccctcatggtgcgctccgcggcctcaaagaagtccgtggactccttgccaaagacttagctgttgttgcattgcgcgaaggtcttgatttacctccgactgatgatccaatgcttcttgcgtacctcttggacccgtcaaacacgacgcccgaaggcgtagcccgtcgttacggcggcgagtggaccgaagatgcaggcgagcgcgcgttattggccgaacgtttgcacgccaatttattaggacgtttgcaaggcgaggaacgtctcctctggctttacgaagaagtggagaaaccattgagtcgcgtgctcgcgcatatggaagctaccggtgtcaaattagacgtggcgtatttggaggcactcagccttgaagttgctgccgaaatgcgccgcttggaggaagaagtattccgtttagcaggccactcctttaaccttaattctcgcgatcagttagaacgtgtgttgttcgatgagcttggtctccctcctatcggcaagacagagaagaccggtaaacgtagcacttcagcggcggttttagaagctcttcgcgaagtccatcccattgtggacaagatcttgcagtaccgcgaactcgcgaaattgaaaggcacctatattgaccctcttccggcattagtccacccgaaaacgggacgcctccatacccgcttcaaccaaacagccacggcgaccggtcgtttgtcctcctctgatccaaaccttcagaatattccagtacgtaccccattgggccagaagatccgccgcgcgtttgtagctgaggagggttggcgtttagtggccctcgattatagccaaattgaattacgtgtccttgcccatctttctggcgatgagaacctcatccgcgtgtttcaggaaggcaaagacattcacactcaaacggcaagctggatgtttggattatcagcagaagcgatcgatcctttgatgcgtcgtgcagcgaagaccattaatttcggtgttctctacggtatgagtgcccatcgtttgtcgcaggaattaggcattccctatgaagaagctgccgcgttcattcagaagtactttcaaagctatcccaaagttaaagcatggatcgagaagactctcgaagaaggccgcacacgtggttacgtagagaccttatttggacgtcgccgctatgttcccgatttaaacgctcgcgtgaaatctgtccgtgaagccgccgaacgcatggcgttcaacatgcctgtacagggcacggcagctgacctcatgaaacttgcaatggtgcgcctttttccacaattgcgtgaagttggtgcccgcatgctcttgcaggtccacgatgaactcttgttagaagcgccaaaagagcgtgcggaagaggtggcagccctcgcgaaagaggttatggaaggcgtgtggcccttagcggtgcctcttgaagtcgaagttggtattggcgaggattggttggctgccaaaggataatga

SEQ ID NO: 1088 - protein, 841 aa, synthetic construct
  REGION 1..841: note = Variant of DNA polymerase I from Thermus sp. strain 2.9
MHHHHHHGGSGMLPLFEPKGRVLLVDGHHLAYRNFFALKGLTTSRGEPVQGVYGFAKSLLKALKEDGDVVIVVFDAKAPSFRHEAYEAYKAGRAPTPEDFPRQLALMKELVDLLGLERLEVPGFEADDVLATLAKKAEREGYEVQILTADRDLFQLLSPRISVLHPEGHRITPEWLWEKYGLRPEQWVDFRALAGDPSDNIPGVKGIGEKTALKLLKEWGSLENLLKNLDQVKPESVREKILAHLEDLKLSRELSRVRTDLPLEVDFRGRREPDWEGLKAFLERLEFGSLLHEFGLLESPLPAEEAPWPPPEGAFLGYRLSRPEPMWAELSALAASAQGRVYRAEDPHGALRGLKEVRGLLAKDLAVVALREGLDLPPTDDPMLLAYLLDPSNTTPEGVARRYGGEWTEDAGERALLAERLHANLLGRLQGEERLLWLYEEVEKPLSRVLAHMEATGVKLDVAYLEALSLEVAAEMRRLEEEVFRLAGHSFNLNSRDQLERVLFDELGLPPIGKTEKTGKRSTSAAVLEALREVHPIVDKILQYRELAKLKGTYIDPLPALVHPKTGRLHTRFNQTATATGRLSSSDPNLQNIPVRTPLGQKIRRAFVAEEGWRLVALDYSQIELRVLAHLSGDENLIRVFQEGKDIHTQTASWMFGLSAEAIDPLMRRAAKTINFGVLYGMSAHRLSQELGIPYEEAAAFIQKYFQSYPKVKAWIEKTLEEGRTRGYVETLFGRRRYVPDLNARVKSVREAAERMAFNMPVQGTAADLMKLAMVRLFPQLREVGARMLLQVHDELLLEAPKERAEEVAALAKEVMEGVWPLAVPLEVEVGIGEDWLAAKG

SEQ ID NO: 1089 - DNA, 2529 bp, synthetic construct
  misc_feature 1..2529: note = Variant of DNA polymerase I from Thermus sp. strain 2.9
  source 1..2529: mol_type = other DNA
atgcaccatcatcatcatcatggcggtagcggcatgttaccgttgttcgaacctaaaggtcgcgtgcttctggttgatggccatcatctcgcgtatcgtaacttctttgccctgaaaggattaaccaccagccgtggcgagccggtacagggtgtctacggctttgcaaagtcgctcctgaaagctctgaaagaagacggtgatgtggtgattgttgtctttgatgcgaaagcgccaagttttcgccacgaagcgtacgaagcttacaaagccgggcgtgctccaacgccggaagactttcctcgccaattggcgcttatgaaggaattagtggatttgcttggcctcgaacgcttggaagttcccggtttcgaggcagacgacgtattagcgactctcgcaaagaaagccgaacgtgagggctatgaagtccagatcttgacagcagatcgcgatcttttccagcttttatctccgcgcatctcggtgttacacccggaagggcatcgtatcaccccggaatggctctgggagaaatatggtttgcgtcccgaacaatgggtggattttcgcgccttagcaggcgatccgagcgacaatattccgggagttaaaggtatcggcgagaagacggcgctcaagctccttaaagaatgggggtcgttggagaacttgcttaagaatttagatcaggtcaaaccagagtcagtgcgtgagaagattcttgcacacctcgaagacctcaaattaagccgcgaattgtcccgtgtacgcaccgatttgccgctcgaagttgatttccgtggtcgccgcgaacctgactgggagggtcttaaagcgtttttagagcgtcttgaatttggttcgctcttgcatgaattcggccttttagaaagcccgttaccagccgaagaagcaccttggccaccgcccgaaggcgcgtttttaggttaccgtttgagtcgcccggaaccgatgtgggccgaattatcggctcttgcagcgtctgcccaggggcgtgtgtatcgcgcggaagaccctcatggtgcgctccgcggcctcaaagaagtccgtggactccttgccaaagacttagctgttgttgcattgcgcgaaggtcttgatttacctccgactgatgatccaatgcttcttgcgtacctcttggacccgtcaaacacgacgcccgaaggcgtagcccgtcgttacggcggcgagtggaccgaagatgcaggtaagcgcgcgttattggccgaacgtttgcacgccaatttattaggacgtttgcaaggcgaggaacgtctcctctggctttacgaagaagtggagaaaccattgagtcgcgtgctcgcgcatatggaagctaccggtgtcaaattagacgtggcgtatttggagaacctcagccttgaagttgctgccgaaatgcgccgcttggaggaagaagtattccgtttagcaggccactcctttaaccttaattctcgcgatcagttagaacgtgtgttgttcgatgaacttggtctccctcctatcggcaagacagagaagaccggtaaacgtagcacttcagcggcggttttagaagctcttcgcgaagtccatcccattgtggacaagatcttgcagtaccgcgaactcgcgaaattgaaaggcacctatattgaccctcttccggcattagtccacccgaaaacgggacgcctccatacccgcttcaaccaaacagccacggcgaccggtcgtttgtcctcctctgatccaaaccttcagaatattccagtacgtaccccattgggccagaagatccgccgcgcgtttgtagctgaggagggttggcgtttagtggccctcgattatagccaaattgaattacgtgtccttgcccatctttctggcgatgagaacctcatccgcgtgtttcaggaaggcaaagacattcacactcaaacggcaagctggatgtttggattatcaccagaagcgatcgatcctttgatgcgtcgtgcagcgaagaccgttaatttcggtgttctctacggtatgagtgcccatcgtttgtcgcaggaattaggcattccctatgaagaagctgcggcgttcattcagcgctactttcaaagctatcccaaagttaaagcatggatcgagaagactctcgaagaaggccgcacacgtggttacgtagagaccttatttggacgtcgccgctatgttcccgatttaaacgctcgcgtgaaatctgtccgtgaagccgccgaacgcatggcgttcaacatgcctgtacagggcacggcagctgacctcatgaaacttgcaatggtgcgcctttttccacaattgcgtgaagttggtgcccgcatgctcttgcaggtccacgatgaactcttgttagaagcgccaaaagagcgtgcggaagaggtggcagccctcgcgaaagaggttatggaaggcgtgtggcccttagcggtgcctcttgaagtcgaagttggtattggcgaggattggttggctgccaaaggataatga

SEQ ID NO: 1090 - protein, 841 aa, synthetic construct
  REGION 1..841: note = Variant of DNA polymerase I from Thermus sp. strain 2.9
MHHHHHHGGSGMLPLFEPKGRVLLVDGHHLAYRNFFALKGLTTSRGEPVQGVYGFAKSLLKALKEDGDVVIVVFDAKAPSFRHEAYEAYKAGRAPTPEDFPRQLALMKELVDLLGLERLEVPGFEADDVLATLAKKAEREGYEVQILTADRDLFQLLSPRISVLHPEGHRITPEWLWEKYGLRPEQWVDFRALAGDPSDNIPGVKGIGEKTALKLLKEWGSLENLLKNLDQVKPESVREKILAHLEDLKLSRELSRVRTDLPLEVDFRGRREPDWEGLKAFLERLEFGSLLHEFGLLESPLPAEEAPWPPPEGAFLGYRLSRPEPMWAELSALAASAQGRVYRAEDPHGALRGLKEVRGLLAKDLAVVALREGLDLPPTDDPMLLAYLLDPSNTTPEGVARRYGGEWTEDAGKRALLAERLHANLLGRLQGEERLLWLYEEVEKPLSRVLAHMEATGVKLDVAYLENLSLEVAAEMRRLEEEVFRLAGHSFNLNSRDQLERVLFDELGLPPIGKTEKTGKRSTSAAVLEALREVHPIVDKILQYRELAKLKGTYIDPLPALVHPKTGRLHTRFNQTATATGRLSSSDPNLQNIPVRTPLGQKIRRAFVAEEGWRLVALDYSQIELRVLAHLSGDENLIRVFQEGKDIHTQTASWMFGLSPEAIDPLMRRAAKTVNFGVLYGMSAHRLSQELGIPYEEAAAFIQRYFQSYPKVKAWIEKTLEEGRTRGYVETLFGRRRYVPDLNARVKSVREAAERMAFNMPVQGTAADLMKLAMVRLFPQLREVGARMLLQVHDELLLEAPKERAEEVAALAKEVMEGVWPLAVPLEVEVGIGEDWLAAKG

SEQ ID NO: 1091 - DNA, 2529 bp, synthetic construct
  misc_feature 1..2529: note = Variant of DNA polymerase I from Thermus sp. strain 2.9
  source 1..2529: mol_type = other DNA
atgcaccatcatcatcatcatggcggtagcggcatgttaccgttgttcgaacctaaaggtcgcgtgcttctggttgatggccatcatctcgcgtatcgtaacttctttgccctgaaaggattaaccaccagccgtggcgagccggtacagggtgtctacggctttgcaaagtcgctcctgaaagctctgaaagaagacggtgatgtggtgattgttgtctttgatgcgaaagcgccaagttttcgccacgaagcgtacgaagcttacaaagccgggcgtgctccaacgccggaagactttcctcgccaattggcgcttatgaaggaattagtggatttgcttggcctcgaacgcttggaagttcccggtttcgaggcagacgacgtattagcgactctcgcaaagaaagccgaacgtgagggctatgaagtccagatcttgacagcagatcgcgatcttttccagcttttatctccgcgcatctcggtgttacacccggaagggcatcgtatcaccccggaatggctctgggagaaatatggtttgcgtcccgaacaatgggtggattttcgcgccttagcaggcgatccgagcgacaatattccgggagttaaaggtatcggcgagaagacggcgctcaagctccttaaagaatgggggtcgttggagaacttgcttaagaatttagatcaggtcaaaccagagtcagtgcgtgagaagattcttgcacacctcgaagacctcaaattaagccgcgaattgtcccgtgtacgcaccgatttgccgctcgaagttgatttccgtggccgccgcgaacctgactgggagggtcttaaagcgtttttagagcgtcttgaatttggttcgctcttgcatgaattcggccttttagaaagcccgttaccagccgaagaagcaccttggccaccgcccgaaggcgcgtttttaggttaccgtttgagtcgcccggaaccgatgtgggccgaattatcggctcttgcagcgtctgcccagggacgtgtgtatcgcgcggaagaccctcatggtgcgctcaagggcctcaaagaagtcaacggactccttgccaaagacttagctgttgttgcattgcgcgaaggtcttgatttacctccgactgatgatccaatgcttcttgcgtacctcttggacccgtcaaacacgacgcccgaaggcgtagcccgtcgttacggcggcgagtggaccgaagatgcaggcgagcgcgcgttattggccgaacgtttgcacgccaatttattaggacgtttgcaaggcgaggaacgtctcctctggctttacgaagaagtggagaaaccattgagtcgcgtgctcgcgcatatggaagctaccggtgtcaaattagacgtggcgtatttggaggctctcagccttgaagttgctgccgaaatgcgccgcttggaggaagaagtattccgtttagcaggccactcctttaaccttaattctcgcgatcagttagaacgtgtgttgttcgatgagcttggtctccctcctatcggcaagacagagaagaccggtaaacgtagcacttcagcggcggttttagaagctcttcgcgaagtccatcccattgtggacaagatcttgcagtaccgcgaactcgcgaaattgaaaggcacctatattgaccctcttccggcattagtccacccgaaaacgggacgcctccatacccgcttcaaccaaacagccacggcgaccggtcgtttgtcctcctctgatccaaaccttcagaatattccagtacgtaccccattgggccagaagatccgccgcgcgtttgtagctgaggagggttggcgtttagtggccctcgattatagccaaattgaattacgtgtccttgcccatctttctggcgatgagaacctcatccgcgtgtttcaggaaggcaaagacattcacactcaaacggcaagctggatgtttggattatcagctgaagcgatcgatcctttgatgcgtcgtgcagcgaagaccatcaatttcggtgttctctacggtatgagtgcccatcgtttgtcgcaggaattaggcattccctatgaagaagctgtcgcgttcattcagaagtactttcaaagctatcccaaagttaaagcatggatcgagaagactctcgaagaaggccgcacacgtggttacgtagagaccttatttggacgtcgccgctatgttcccgatttaaacgctcgcgtgaaatctgtccgtgaagccgccgaacgcatggcgttcaacatgcctgtacagggcacggcagctgacctcatgaaacttgcaatggtgcgcctttttccacaattgcgtgaagttggtgcccgcatgctcttgcaggtccacgatgaactcttgttagaagcgccaaaagagcgtgcggaagaggtggcagccctcgcgaaagaggttatggaaggcgtgtggcccttagcggtgcctcttgaagtcgaagttggtattggcgaggattggttggctgccaaaggataatga

SEQ ID NO: 1092 - protein, 841 aa, synthetic construct
  REGION 1..841: note = Variant of DNA polymerase I from Thermus sp. strain 2.9
MHHHHHHGGSGMLPLFEPKGRVLLVDGHHLAYRNFFALKGLTTSRGEPVQGVYGFAKSLLKALKEDGDVVIVVFDAKAPSFRHEAYEAYKAGRAPTPEDFPRQLALMKELVDLLGLERLEVPGFEADDVLATLAKKAEREGYEVQILTADRDLFQLLSPRISVLHPEGHRITPEWLWEKYGLRPEQWVDFRALAGDPSDNIPGVKGIGEKTALKLLKEWGSLENLLKNLDQVKPESVREKILAHLEDLKLSRELSRVRTDLPLEVDFRGRREPDWEGLKAFLERLEFGSLLHEFGLLESPLPAEEAPWPPPEGAFLGYRLSRPEPMWAELSALAASAQGRVYRAEDPHGALKGLKEVNGLLAKDLAVVALREGLDLPPTDDPMLLAYLLDPSNTTPEGVARRYGGEWTEDAGERALLAERLHANLLGRLQGEERLLWLYEEVEKPLSRVLAHMEATGVKLDVAYLEALSLEVAAEMRRLEEEVFRLAGHSFNLNSRDQLERVLFDELGLPPIGKTEKTGKRSTSAAVLEALREVHPIVDKILQYRELAKLKGTYIDPLPALVHPKTGRLHTRFNQTATATGRLSSSDPNLQNIPVRTPLGQKIRRAFVAEEGWRLVALDYSQIELRVLAHLSGDENLIRVFQEGKDIHTQTASWMFGLSAEAIDPLMRRAAKTINFGVLYGMSAHRLSQELGIPYEEAVAFIQKYFQSYPKVKAWIEKTLEEGRTRGYVETLFGRRRYVPDLNARVKSVREAAERMAFNMPVQGTAADLMKLAMVRLFPQLREVGARMLLQVHDELLLEAPKERAEEVAALAKEVMEGVWPLAVPLEVEVGIGEDWLAAKG

SEQ ID NO: 1093 - DNA, 2529 bp, synthetic construct
  misc_feature 1..2529: note = Variant of DNA polymerase I from Thermus sp. strain 2.9
  source 1..2529: mol_type = other DNA
atgcaccatcatcatcatcatggcggtagcggcatgttaccgttgttcgaacctaaaggtcgcgtgcttctggttgatggccatcatctcgcgtatcgtaacttctttgccctgaaaggattaaccaccagccgtggcgagccggtacagggtgtctacggctttgcaaagtcgctcctgaaagctctgaaagaagacggtgatgtggtgattgttgtctttgatgcgaaagcgccaagttttcgccacgaagcgtacgaagcttacaaagccgggcgtgctccaacgccggaagactttcctcgccaattggcgcttatgaaggaattagtggatttgcttggcctcgaacgcttggaagttcccggtttcgaggcagacgacgtattagcgactctcgcaaagaaagccgaacgtgagggctatgaagtccagatcttgacagcagatcgcgatcttttccagcttttatctccgcgcatctcggtgttacacccggaagggcatcgtatcaccccggaatggctctgggagaaatatggtttgcgtcccgaacaatgggtggattttcgcgccttagcaggcgatccgagcgacaatattccgggagttaaaggtatcggcgagaagacggcgctcaagctccttaaagaatgggggtcgttggagaacttgcttaagaatttagatcaggtcaaaccagagtcagtgcgtgagaagattcttgcacacctcgaagacctcaaattaagccgcgaattgtcccgtgtacgcaccgatttgccgctcgaagttgatttccgtggccgccgcgaacctgactgggagggtcttaaagcgtttttagagcgtcttgaatttggttcgctcttgcatgaattcggccttttagaaagcccgttaccagccgaagaagcaccttggccaccgcccgaaggcgcgtttttaggttaccgtttgagtcgcccggaaccgatgtgggccgaattatcggctcttgcagcgtctgcccaggggcgtgtgtatcgcgcggaagaccctcatggtgcgctccgcggcctcaaagaagtcaacggactccttgccaaagacttagctgttgttgcattgcgcgaaggtcttgatttacctccgactgatgatccaatgcttcttgcgtacctcttggacccgtcaaacacgacgcccgaaggcgtagcccgtcgttacggcggcgagtggaccgaagatgcaggcgagcgcgcgttattggccgaacgtttgcacgccaatttattaggacgtttgcaaggcgaggaacgtctcctctggctttacgaagaagtggagaaaccattgagtcgcgtgctcgcgcatatggaagctaccggtgtcaaattagacgtggcgtatttggaggctctcagccttgaagttgctgccgaaatgcgccgcttggaggaagaagtattccgtttagcaggccactcctttaaccttaattctcgcgatcagttagaacgtgtgttgttcgatgaacttggtctccctcctatcggcaagacagagaagaccggtaaacgtagcacttcagcggcggttttagaagctcttcgcgaagtccatcccattgtggacaagatcttgcagtaccgcgaactcgcgaaattgaaaggcacctatattgaccctcttccggcattagtccacccgaaaacgggacgcctccatacccgcttcaaccaaacagccacggcgaccggtcgtttgtcctcctctgatccaaaccttcagaatattccagtacgtaccccattgggccagaagatccgccgcgcgtttgtagctgaggagggttggcgtttagtggccctcgattatagccaaattgaattacgtgtccttgcccatctttctggcgatgagaacctcatccgcgtgtttcaggaaggcaaagacattcacactcaaacggcaagctggatgtttggattatcagcagaagcgatcgatcctttgatgcgtcgtgcagcgaagaccatcaatttcggtgttctctacggtatgagtgcccatcgtttgtcgcaggaattaggcattccctatgaagaagctgcggcgttcattcagcgctactttcaaagctatcccaaagttaaagcatggatcgagaagactctcgaagaaggccgcacacgtggttacgtagagaccttatttggacgtcgccgctatgttcccgatttaaacgctcgcgtgaaatctgtccgtgaagccgccgaacgcatggcgttcaacatgcctgtacagggcacggcagctgacctcatgaaacttgcaatggtgcgcctttttccacaattgcgtgaagttggtgcccgcatgctcttgcaggtccacgatgaactcttgttagaagcgccaaaagagcgtgcggaagaggtggcagccctcgcgaaagaggttatggaaggcgtgtggcccttagcggtgcctcttgaagtcgaagttggtattggcgaggattggttggctgccaaaggataatga

SEQ ID NO: 1094 - protein, 841 aa, synthetic construct
  REGION 1..841: note = Variant of DNA polymerase I from Thermus sp. strain 2.9
MHHHHHHGGSGMLPLFEPKGRVLLVDGHHLAYRNFFALKGLTTSRGEPVQGVYGFAKSLLKALKEDGDVVIVVFDAKAPSFRHEAYEAYKAGRAPTPEDFPRQLALMKELVDLLGLERLEVPGFEADDVLATLAKKAEREGYEVQILTADRDLFQLLSPRISVLHPEGHRITPEWLWEKYGLRPEQWVDFRALAGDPSDNIPGVKGIGEKTALKLLKEWGSLENLLKNLDQVKPESVREKILAHLEDLKLSRELSRVRTDLPLEVDFRGRREPDWEGLKAFLERLEFGSLLHEFGLLESPLPAEEAPWPPPEGAFLGYRLSRPEPMWAELSALAASAQGRVYRAEDPHGALRGLKEVNGLLAKDLAVVALREGLDLPPTDDPMLLAYLLDPSNTTPEGVARRYGGEWTEDAGERALLAERLHANLLGRLQGEERLLWLYEEVEKPLSRVLAHMEATGVKLDVAYLEALSLEVAAEMRRLEEEVFRLAGHSFNLNSRDQLERVLFDELGLPPIGKTEKTGKRSTSAAVLEALREVHPIVDKILQYRELAKLKGTYIDPLPALVHPKTGRLHTRFNQTATATGRLSSSDPNLQNIPVRTPLGQKIRRAFVAEEGWRLVALDYSQIELRVLAHLSGDENLIRVFQEGKDIHTQTASWMFGLSAEAIDPLMRRAAKTINFGVLYGMSAHRLSQELGIPYEEAAAFIQRYFQSYPKVKAWIEKTLEEGRTRGYVETLFGRRRYVPDLNARVKSVREAAERMAFNMPVQGTAADLMKLAMVRLFPQLREVGARMLLQVHDELLLEAPKERAEEVAALAKEVMEGVWPLAVPLEVEVGIGEDWLAAKG

SEQ ID NO: 1095 - DNA, 2529 bp, synthetic construct
  misc_feature 1..2529: note = Variant of DNA polymerase I from Thermus sp. strain 2.9
  source 1..2529: mol_type = other DNA
atgcaccatcatcatcatcatggcggtagcggcatgttaccgttgttcgaacctaaaggtcgcgtgcttctggttgatggccatcatctcgcgtatcgtaacttctttgccctgaaaggattaaccaccagccgtggcgagccggtacagggtgtctacggctttgcaaagtcgctcctgaaagctctgaaagaagacggtgatgtggtgattgttgtctttgatgcgaaagcgccaagttttcgccacgaagcgtacgaagcttacaaagccgggcgtgctccaacgccggaagactttcctcgccaattggcgcttatgaaggaattagtggatttgcttggcctcgaacgcttggaagttcccggtttcgaggcagacgacgtattagcgactctcgcaaagaaagccgaacgtgagggctatgaagtccagatcttgacagcagatcgcgatcttttccagcttttatctccgcgcatctcggtgttacacccggaagggcatcgtatcaccccggaatggctctgggagaaatatggtttgcgtcccgaacaatgggtggattttcgcgccttagcaggcgatccgagcgacaatattccgggagttaaaggtatcggcgagaagacggcgctcaagctccttaaagaatgggggtcgttggagaacttgcttaagaatttagatcaggtcaaaccagagtcagtgcgtgagaagattcttgcacacctcgaagacctcaaattaagccgcgaattgtcccgtgtacgcaccgatttgccgctcgaagttgatttccgtggccgccgcgaacctgactgggagggtcttaaagcgtttttagagcgtcttgaatttggttcgctcttgcatgaattcggccttttagaaagcccgttaccagccgaagaagcaccttggccaccgcccgaaggcgcgtttttaggttaccgtttgagtcgcccggaaccgatgtgggccgaattactggctcttgcagcgtctgcccaggggcgtgtgtatcgcgcggaagaccctcatggtgcgctcaagggcctcaaagaagtccgtggactccttgccaaagacttagctgttgttgcattgcgcgaaggtcttgatttacctccgactgatgatccaatgcttcttgcgtacctcttggacccgtcaaacacgacgcccgaaggcgtagcccgtcgttacggcggcgagtggaccgaagatgcaggcgagcgcgcgttattggccgaacgtttgcacgccaatttattaggacgtttgcaaggcgaggaacgtctcctctggctttacgaagaagtggagaaaccattgagtcgcgtgctcgcgcatatggaagctaccggtgtcaaattagacgtggcgtatttggaggcactcagccttgaagttgctgccgaaatgcgccgcttggaggaagaagtattccgtttagcaggccactcctttaaccttaattctcgcgatcagttagaacgtgtgttgttcgatgaacttggtctccctcctatcggcaagacagagaagaccggtaaacgtagcacttcagcggcggttttagaagctcttcgcgaagtccatcccattgtggacaagatcttgcagtaccgcgaactcgcgaaattgaaaggcacctatattgaccctcttccggcattagtccacccgaaaacgggacgcctccatacccgcttcaaccaaacagccacggcgaccggtcgtttgtcctcctctgatccaaaccttcagaatattccagtacgtaccccattgggccagaagatccgccgcgcgtttgtagctgaggagggttggcgtttagtggccctcgattatagccaaattgaattacgtgtccttgcccatctttctggcgatgagaacctcatccgcgtgtttcaggaaggcaaagacattcacactcaaacggcaagctggatgtttggattatcagctgaagcgatcgatcctttgatgcgtcgtgcagcgaagaccgttaatttcggtgttctctacggtatgagtgcccatcgtttgtcgcaggaattaggcattccctatgaagaagctgcggcgttcattcagcgctactttcaaagctatcccaaagttaaagcatggatcgagaagactctcgaagaaggccgcacacgtggttacgtagagaccttatttggacgtcgccgctatgttcccgatttaaacgctcgcgtgaaatctgtccgtgaagccgccgaacgcatggcgttcaacatgcctgtacagggcacggcagctgacctcatgaaacttgcaatggtgcgcctttttccacaattgcgtgaagttggtgcccgcatgctcttgcaggtccacgatgaactcttgttagaagcgccaaaagagcgtgcggaagaggtggcagccctcgcgaaagaggttatggaaggcgtgtggcccttagcggtgcctcttgaagtcgaagttggtattggcgaggattggttggctgccaaaggataatga

SEQ ID NO: 1096 - protein, 841 aa, synthetic construct
  REGION 1..841: note = Variant of DNA polymerase I from Thermus sp. strain 2.9
MHHHHHHGGSGMLPLFEPKGRVLLVDGHHLAYRNFFALKGLTTSRGEPVQGVYGFAKSLLKALKEDGDVVIVVFDAKAPSFRHEAYEAYKAGRAPTPEDFPRQLALMKELVDLLGLERLEVPGFEADDVLATLAKKAEREGYEVQILTADRDLFQLLSPRISVLHPEGHRITPEWLWEKYGLRPEQWVDFRALAGDPSDNIPGVKGIGEKTALKLLKEWGSLENLLKNLDQVKPESVREKILAHLEDLKLSRELSRVRTDLPLEVDFRGRREPDWEGLKAFLERLEFGSLLHEFGLLESPLPAEEAPWPPPEGAFLGYRLSRPEPMWAELLALAASAQGRVYRAEDPHGALKGLKEVRGLLAKDLAVVALREGLDLPPTDDPMLLAYLLDPSNTTPEGVARRYGGEWTEDAGERALLAERLHANLLGRLQGEERLLWLYEEVEKPLSRVLAHMEATGVKLDVAYLEALSLEVAAEMRRLEEEVFRLAGHSFNLNSRDQLERVLFDELGLPPIGKTEKTGKRSTSAAVLEALREVHPIVDKILQYRELAKLKGTYIDPLPALVHPKTGRLHTRFNQTATATGRLSSSDPNLQNIPVRTPLGQKIRRAFVAEEGWRLVALDYSQIELRVLAHLSGDENLIRVFQEGKDIHTQTASWMFGLSAEAIDPLMRRAAKTVNFGVLYGMSAHRLSQELGIPYEEAAAFIQRYFQSYPKVKAWIEKTLEEGRTRGYVETLFGRRRYVPDLNARVKSVREAAERMAFNMPVQGTAADLMKLAMVRLFPQLREVGARMLLQVHDELLLEAPKERAEEVAALAKEVMEGVWPLAVPLEVEVGIGEDWLAAKG

SEQ ID NO: 1097 - DNA, 2529 bp, synthetic construct
  misc_feature 1..2529: note = Variant of DNA polymerase I from Thermus sp. strain 2.9
  source 1..2529: mol_type = other DNA
atgcaccatcatcatcatcatggcggtagcggcatgttaccgttgttcgaacctaaaggtcgcgtgcttctggttgatggccatcatctcgcgtatcgtaacttctttgccctgaaaggattaaccaccagccgtggcgagccggtacagggtgtctacggctttgcaaagtcgctcctgaaagctctgaaagaagacggtgatgtggtgattgttgtctttgatgcgaaagcgccaagttttcgccacgaagcgtacgaagcttacaaagccgggcgtgctccaacgccggaagactttcctcgccaattggcgcttatgaaggaattagtggatttgcttggcctcgaacgcttggaagttcccggtttcgaggcagacgacgtattagcgactctcgcaaagaaagccgaacgtgagggctatgaagtccagatcttgacagcagatcgcgatcttttccagcttttatctccgcgcatctcggtgttacacccggaagggcatcgtatcaccccggaatggctctgggagaaatatggtttgcgtcccgaacaatgggtggattttcgcgccttagcaggcgatccgagcgacaatattccgggagttaaaggtatcggcgagaagacggcgctcaagctccttaaagaatgggggtcgttggagaacttgcttaagaatttagatcaggtcaaaccagagtcagtgcgtgagaagattcttgcacacctcgaagacctcaaattaagcctggaattgtcccgtgtacgcaccgatttgccgctcgaagttgatttccgtggccgccgcgaacctgactgggagggtcttaaagcgtttttagagcgtcttgaatttggttcgctcttgcatgaattcggccttttagaaagcccgttaccagccgaagaagcaccttggccaccgcccgaaggcgcgtttttaggttaccgtttgagtcgcccggaaccgatgtgggccgaattactggctcttgcagcgtctgcccaggggcgtgtgtatcgcgcggaagaccctcatggtgcgctccgtggcctcaaagaagtccgtggactccttgccaaagacttagctgttgttgcattgcgcgaaggtcttgatttacctccgactgatgatccaatgcttcttgcgtacctcttggacccgtcaaacacgacgcccgaaggcgtagcccgtcgttacggcggcgagtggaccgaagatgcaggcgagcgcgcgttattggccgaacgtttgcacgccaatttattaggacgtttgcaaggcgaggaacgtctcctctggctttacgaagaagtggagaaaccattgagtcgcgtgctcgcgcatatggaagctaccggtgtcaaattagacgtggcgtatttggaggcactcagccttgaagttgctgccgaaatgcgccgcttggaggaagaagtattccgtttagcaggccactcctttaaccttaattctcgcgatcagttagaacgtgtgttgttcgatgaacttggtctccctcctatcggcaagacagagaagaccggtaaacgtagcacttcagcggcggttttagaagctcttcgcgaagtccatcccattgtggacaagatcttgcagtaccgcgaactcgcgaaattgaaaggcacctatattgaccctcttccggcattagtccacccgaaaacgggacgcctccatacccgcttcaaccaaacagccacggcgaccggtcgtttgtcctcctctgatccaaaccttcagaatattccagtacgtaccccattgggccagaagatccgccgcgcgtttgtagctgaggagggttggcgtttagtggccctcgattatagccaaattgaattacgtgtccttgcccatctttctggcgatgagaacctcatccgcgtgtttcaggaaggcaaagacattcacactcaaacggcaagctggatgtttggattatcagctgaagcgatcgatcctttgatgcgtcgtgcagcgaagaccattaatttcggtgttctctacggtatgagtgcccatcgtttgtcgcaggaattaggcattccctatgaagaagctgcggcgttcattcagcgctactttcaaagctatcccaaagttaaagcatggatcgagaagactctcgaagaaggccgcacacgtggttacgtagagaccttatttggacgtcgccgctatgttcccgatttaaacgctcgcgtgaaatctgtccgtgaagccgccgaacgcatggcgttcaacatgcctgtacagggcacggcagctgacctcatgaaacttgcaatggtgcgcctttttccacaattgcgtgaagttggtgcccgcatgctcttgcaggtccacgatgaactcttgttagaagcgccaaaagagcgtgcggaagaggtggcagccctcgcgaaagaggttatggaaggcgtgtggcccttagcggtgcctcttgaagtcgaagttggtattggcgaggattggttggctgccaaaggataatga

SEQ ID NO: 1098 - protein, 841 aa, synthetic construct
  REGION 1..841: note = Variant of DNA polymerase I from Thermus sp. strain 2.9
MHHHHHHGGSGMLPLFEPKGRVLLVDGHHLAYRNFFALKGLTTSRGEPVQGVYGFAKSLLKALKEDGDVVIVVFDAKAPSFRHEAYEAYKAGRAPTPEDFPRQLALMKELVDLLGLERLEVPGFEADDVLATLAKKAEREGYEVQILTADRDLFQLLSPRISVLHPEGHRITPEWLWEKYGLRPEQWVDFRALAGDPSDNIPGVKGIGEKTALKLLKEWGSLENLLKNLDQVKPESVREKILAHLEDLKLSLELSRVRTDLPLEVDFRGRREPDWEGLKAFLERLEFGSLLHEFGLLESPLPAEEAPWPPPEGAFLGYRLSRPEPMWAELLALAASAQGRVYRAEDPHGALRGLKEVRGLLAKDLAVVALREGLDLPPTDDPMLLAYLLDPSNTTPEGVARRYGGEWTEDAGERALLAERLHANLLGRLQGEERLLWLYEEVEKPLSRVLAHMEATGVKLDVAYLEALSLEVAAEMRRLEEEVFRLAGHSFNLNSRDQLERVLFDELGLPPIGKTEKTGKRSTSAAVLEALREVHPIVDKILQYRELAKLKGTYIDPLPALVHPKTGRLHTRFNQTATATGRLSSSDPNLQNIPVRTPLGQKIRRAFVAEEGWRLVALDYSQIELRVLAHLSGDENLIRVFQEGKDIHTQTASWMFGLSAEAIDPLMRRAAKTINFGVLYGMSAHRLSQELGIPYEEAAAFIQRYFQSYPKVKAWIEKTLEEGRTRGYVETLFGRRRYVPDLNARVKSVREAAERMAFNMPVQGTAADLMKLAMVRLFPQLREVGARMLLQVHDELLLEAPKERAEEVAALAKEVMEGVWPLAVPLEVEVGIGEDWLAAKG

SEQ ID NO: 1099 - DNA, 2529 bp, synthetic construct
  misc_feature 1..2529: note = Variant of DNA polymerase I from Thermus sp. strain 2.9
  source 1..2529: mol_type = other DNA
atgcaccatcatcatcatcatggcggtagcggcatgttaccgttgttcgaacctaaaggtcgcgtgcttctggttgatggccatcatctcgcgtatcgtaacttctttgccctgaaaggattaaccaccagccgtggcgagccggtacagggtgtctacggctttgcaaagtcgctcctgaaagctctgaaagaagacggtgatgtggtgattgttgtctttgatgcgaaagcgccaagttttcgccacgaagcgtacgaagcttacaaagccgggcgtgctccaacgccggaagactttcctcgccaattggcgcttatgaaggaattagtggatttgcttggcctcgaacgcttggaagttcccggtttcgaggcagacgacgtattagcgactctcgcaaagaaagccgaacgtgagggctatgaagtccagatcttgacagcagatcgcgatcttttccagcttttatctccgcgcatctcggtgttacacccggaagggcatcgtatcaccccggaatggctctgggagaaatatggtttgcgtcccgaacaatgggtggattttcgcgccttagcaggcgatccgagcgacaatattccgggagttaaaggtatcggccctaagacggcgctcaagctccttaaagaatgggggtcgttggagaacttgcttaagaatttagatcaggtcaaaccagagtcagtgcgtgagaagattcttgcacacctcgaagacctcaaattaagccgcgaattgtcccgtgtacgcaccgatttgccgctcgaagttgatttccgtggccgccgcgaacctgactgggagggtcttaaagcgtttttagagcgtcttgaatttggttcgctcttgcatgaattcggccttttagaaagcccgttaccagccgaagaagcaccttggccaccgcccgaaggcgcgtttttaggttaccgtttgagtcgcccggaaccgatgtgggccgaattattggctcttgcagcgtctgcccagggacgtgtgtatcgcgcggaagaccctcatggtgcgctccgcggcctcaaagaagtccgtggactccttgccaaagacttagctgttgttgcattgcgcgaaggtcttgatttacctccgactgatgatccaatgcttcttgcgtacctcttggacccgtcaaacacgacgcccgaaggcgtagcccgtcgttacggcggcgagtggaccgaagatgcaggcgagcgcgcgttattggccgaacgtttgcacgccaatttattaggacgtttgcaaggcgaggaacgtctcctctggctttacgaagaagtggagaaaccattgagtcgcgtgctcgcgcatatggaagctaccggtgtcaaattagacgtggcgtatttggaggcactcagccttgaagttgctgccgaaatgcgccgcttggaggaagaagtattccgtttagcaggccactcctttaaccttaattctcgcgatcagttagaacgtgtgttgttcgatgaacttggtctccctcctatcggcaagacagagaagaccggtaaacgtagcacttcagcggcggttttagaagctcttcgcgaagtccatcccattgtggacaagatcttgcagtaccgcgaactcgcgaaattgaaaggcacctatattgaccctcttccggcattagtccacccgaaaacgggacgcctccatacccgcttcaaccaaacagccacggcgaccggtcgtttgtcctcctctgatccaaaccttcagaatattccagtacgtaccccattgggccagaagatccgccgcgcgtttgtagctgaggagggttggcgtttagtggccctcgattatagccaaattgaattacgtgtccttgcccatctttctggcgatgagaacctcatccgcgtgtttcaggaaggcaaagacattcacactcaaacggcaagctggatgtttggattatcagctgaagcgatcgatcctttgatgcgtcgtgcagcgaagaccatcaatttcggtgttctctacggtatgagtgcccatcgtttgtcgcaggaattaggcattccctatgaagaagctgcggcgttcattcagcgctactttcaaagctatcccaaagttaaagcatggatcgagaagactctcgaagaaggccgcacacgtggttacgtagagaccttatttggacgtcgccgctatgttcccgatttaaacgctcgcgtgaaatctgtccgtgaagccgccgaacgcatggcgttcaacatgcctgtacagggcacggcagctgacctcatgaaacttgcaatggtgcgcctttttccacaattgcgtgaagttggtgcccgcatgctcttgcaggtccacgatgaactcttgttagaagcgccaaaagagcgtgcggaagaggtggcagccctcgcgaaagaggttatggaaggcgtgtggcccttagcggtgcctcttgaagtcgaagttggtattggcgaggattggttggctgccaaaggataatga

SEQ ID NO: 1100 - protein, 841 aa, synthetic construct
  REGION 1..841: note = Variant of DNA polymerase I from Thermus sp. strain 2.9
MHHHHHHGGSGMLPLFEPKGRVLLVDGHHLAYRNFFALKGLTTSRGEPVQGVYGFAKSLLKALKEDGDVVIVVFDAKAPSFRHEAYEAYKAGRAPTPEDFPRQLALMKELVDLLGLERLEVPGFEADDVLATLAKKAEREGYEVQILTADRDLFQLLSPRISVLHPEGHRITPEWLWEKYGLRPEQWVDFRALAGDPSDNIPGVKGIGPKTALKLLKEWGSLENLLKNLDQVKPESVREKILAHLEDLKLSRELSRVRTDLPLEVDFRGRREPDWEGLKAFLERLEFGSLLHEFGLLESPLPAEEAPWPPPEGAFLGYRLSRPEPMWAELLALAASAQGRVYRAEDPHGALRGLKEVRGLLAKDLAVVALREGLDLPPTDDPMLLAYLLDPSNTTPEGVARRYGGEWTEDAGERALLAERLHANLLGRLQGEERLLWLYEEVEKPLSRVLAHMEATGVKLDVAYLEALSLEVAAEMRRLEEEVFRLAGHSFNLNSRDQLERVLFDELGLPPIGKTEKTGKRSTSAAVLEALREVHPIVDKILQYRELAKLKGTYIDPLPALVHPKTGRLHTRFNQTATATGRLSSSDPNLQNIPVRTPLGQKIRRAFVAEEGWRLVALDYSQIELRVLAHLSGDENLIRVFQEGKDIHTQTASWMFGLSAEAIDPLMRRAAKTINFGVLYGMSAHRLSQELGIPYEEAAAFIQRYFQSYPKVKAWIEKTLEEGRTRGYVETLFGRRRYVPDLNARVKSVREAAERMAFNMPVQGTAADLMKLAMVRLFPQLREVGARMLLQVHDELLLEAPKERAEEVAALAKEVMEGVWPLAVPLEVEVGIGEDWLAAKG

SEQ ID NO: 1101 - DNA, 2529 bp, synthetic construct
  misc_feature 1..2529: note = Variant of DNA polymerase I from Thermus sp. strain 2.9
  source 1..2529: mol_type = other DNA
atgcaccatcatcatcatcatggcggtagcggcatgttaccgttgttcgaacctaaaggtcgcgtgcttctggttgatggccatcatctcgcgtatcgtaacttctttgccctgaaaggattaaccaccagccgtggcgagccggtacagggtgtctacggctttgcaaagtcgctcctgaaagctctgaaagaagacggtgatgtggtgattgttgtctttgatgcgaaagcgccaagttttcgccacgaagcgtacgaagcttacaaagccgggcgtgctccaacgccggaagactttcctcgccaattggcgcttatgaaggaattagtggatttgcttggcctcgaacgcttggaagttcccggtttcgaggcagacgacgtattagcgactctcgcaaagaaagccgaacgtgagggctatgaagtccagatcttgacagcagatcgcgatcttttccagcttttatctccgcgcatctcggtgttacacccggaagggcatcgtatcaccccggaatggctctgggagaaatatggtttgcgtcccgaacaatgggtggattttcgcgccttagcaggcgatccgagcgacaatattccgggagttaaaggtatcggcgagaagacggcgctcaagctccttaaagaatgggggtcgttggagaacttgcttaagaatttagatcaggtcaaaccagagtcagtgcgtgagaagattcttgcacacctcgaagacctcaaattaagccgcgaattgtcccgtgtacgcaccgatttgccgctcgaagttgatttccgtggccgccgcgaacctgactgggagggtcttaaagcgtttttagagcgtcttgaatttggttcgctcttgcatgaattcggccttttagaaagcccgttaccagccgaagaagcaccttggccaccgcccgaaggcgcgtttttaggttaccgtttgagtcgcccggaaccgatgtgggccgaattattggctcttgcagcgtctgcccagggacgtgtgtatcgcgcggaagaccctcatggtgcgctccgcggcctcaaagaagtccgtggactccttgccaaagacttagctgttgttgcattgcgcgaaggtcttgatttacctccgactgatgatccaatgcttcttgcgtacctcttggacccgtcaaacacgacgcccgaaggcgtagcccgtcgttacggcggcgagtggaccgaagatgcaggcgagcgcgcgttattggccgaacgtttgcacgccaatttattaggacgtttgcaaggcgaggaacgtctcctctggctttacgaagaagtggagaaaccattgagtcgcgtgctcgcgcatatggaagctaccggtgtcaaattagacgtggcgtatttggaggcactcagccttgaagttgctgccgaaatgcgccgcttggaggaagaagtattccgtttagcaggccactcctttaaccttaattctcgcgatcagttagaacgtgtgttgttcgatgaacttggtctccctcctatcggcaagacagagaagaccggtaaacgtagcacttcagcggcggttttagaagctcttcgcgaagtccatcccattgtggacaagatcttgcagtaccgcgaactcgcgaaattgaaaggcacctatattgaccctcttccggcattagtccacccgaaaacgggacgcctccatacccgcttcaaccaaacagccacggcgaccggtcgtttgtcctcctctgatccaaaccttcagaatattccagtacgtaccccattgggccagaagatccgccgcgcgtttgtagctgaggagggttggcgtttagtggccctcgattatagccaaattgaattacgtgtccttgcccatctttctggcgatgagaacctcatccgcgtgtttcaggaaggcaaagacattcacactcaaacggcaagctggatgtttggattatcagctgaagcgatcgatcctttgatgcgtcgtgcagcgaagaccatcaatttcggtgttctctacggtatgagtgcccatcgtttgtcgcaggaattaggcattccctatgaagaagctgcggcgttcattcagcgctactttcaaagctatcccaaagttaaagcatggatcgagaagactctcgaagaaggccgcacacgtggttacgtagagaccttatttggacgtcgccgctatgttcccgatttaaacgctcgcgtgaaatctgtccgtgaagccgccgaacgcatggcgttcaacatgcctgtacagggcacggcagctgacctcatgaaacttgcaatggtgcgcctttttccacaattgcgtgaagttggtgcccgcatgctcttgcaggtccacgatgaactcttgttagaagcgccaaaagagcgtgcggaagaggtggcagccctcgcgaaagaggttatggaaggcgtgtggagtttagcggtgcctcttgaagtcgaagttggtattggcgaggattggttggctgccaaaggataatga

SEQ ID NO: 1102 - protein, 841 aa, synthetic construct
  REGION 1..841: note = Variant of DNA polymerase I from Thermus sp. strain 2.9
MHHHHHHGGSGMLPLFEPKGRVLLVDGHHLAYRNFFALKGLTTSRGEPVQGVYGFAKSLLKALKEDGDVVIVVFDAKAPSFRHEAYEAYKAGRAPTPEDFPRQLALMKELVDLLGLERLEVPGFEADDVLATLAKKAEREGYEVQILTADRDLFQLLSPRISVLHPEGHRITPEWLWEKYGLRPEQWVDFRALAGDPSDNIPGVKGIGEKTALKLLKEWGSLENLLKNLDQVKPESVREKILAHLEDLKLSRELSRVRTDLPLEVDFRGRREPDWEGLKAFLERLEFGSLLHEFGLLESPLPAEEAPWPPPEGAFLGYRLSRPEPMWAELLALAASAQGRVYRAEDPHGALRGLKEVRGLLAKDLAVVALREGLDLPPTDDPMLLAYLLDPSNTTPEGVARRYGGEWTEDAGERALLAERLHANLLGRLQGEERLLWLYEEVEKPLSRVLAHMEATGVKLDVAYLEALSLEVAAEMRRLEEEVFRLAGHSFNLNSRDQLERVLFDELGLPPIGKTEKTGKRSTSAAVLEALREVHPIVDKILQYRELAKLKGTYIDPLPALVHPKTGRLHTRFNQTATATGRLSSSDPNLQNIPVRTPLGQKIRRAFVAEEGWRLVALDYSQIELRVLAHLSGDENLIRVFQEGKDIHTQTASWMFGLSAEAIDPLMRRAAKTINFGVLYGMSAHRLSQELGIPYEEAAAFIQRYFQSYPKVKAWIEKTLEEGRTRGYVETLFGRRRYVPDLNARVKSVREAAERMAFNMPVQGTAADLMKLAMVRLFPQLREVGARMLLQVHDELLLEAPKERAEEVAALAKEVMEGVWSLAVPLEVEVGIGEDWLAAKG

SEQ ID NO: 1103 - DNA, 2529 bp, synthetic construct
  misc_feature 1..2529: note = Variant of DNA polymerase I from Thermus sp. strain 2.9
  source 1..2529: mol_type = other DNA
atgcaccatcatcatcatcatggcggtagcggcatgttaccgttgttcgaacctaaaggtcgcgtgcttctggttgatggccatcatctcgcgtatcgtaacttctttgccctgaaaggattaaccaccagccgtggcgagccggtacagggtgtctacggctttgcaaagtcgctcctgaaagctctgaaagaagacggtgatgtggtgattgttgtctttgatgcgaaagcgccaagttttcgccacgaagcgtacgaagcttacaaagccgggcgtgctccaacgccggaagactttcctcgccaattggcgcttatgaaggaattagtggatttgcttggcctcgaacgcttggaagttcccggtttcgaggcagacgacgtattagcgactctcgcaaagaaagccgaacgtgagggctatgaagtccagatcttgacagcagatcgcgatcttttccagcttttatctccgcgcatctcggtgttacacccggaagggcatcgtatcaccccggaatggctctgggagaaatatggtttgcgtcccgaacaatgggtggattttcgcgccttagcaggcgatccgagcgacaatattccgggagttaaaggtatcggcgagaagacggcgctcaagctccttaaagaatgggggtcgttggagaacttgcttaagaatttagatcaggtcaaaccagagtcagtgcgtgagaagattcttgcacacctcgaagacctcaaattaagcctggaattgtcccgtgtacgcaccgatttgccgctcgaagttgatttccgtcgtcgccgcgaacctgactgggagggtcttaaagcgtttttagagcgtcttgaatttggttcgctcttgcatgaattcggccttttagaaagcccgttaccagccgaagaagcaccttggccaccgcccgaaggcgcgtttttaggttaccgtttgagtcgcccggaaccgatgtgggccgaattattggctcttgcagcgtctgcccaggagcgtgtgtatcgcgcggaagaccctcatggtgcgctcaagggcctcaaaggagtccgtggactccttgccaaagacttagctgttgttgcattgcgcgaaggtcttgatttacctccgactgatgatccaatgcttcttgcgtacctcttggacccgtcaaacacgacgcccgaaggcgtagcccgtcgttacggcggcgagtggaccgaagatgcaggcgagcgcgcgttattggccgaacgtttgcacgccaatttattaggacgtttgcaaggcgaggaacgtctcctctggctttacgaagaagtggagaaaccattgagtcgcgtgctcgcgcatatggaagctaccggtgtcaaattagacgtggcgtatttggaggctctcagccttgaagttgctgccgaaatgcgccgcttggaggaagaagtattccgtttagcaggccactcctttaaccttaattctcgcgatcagttagaacgtgtgttgttcgatgagcttggtctccctcctatcggcaagacagagaagaccggtaaacgtagcacttcagcggcggttttagaagctcttcgcgaagtccatcccattgtggacaagatcttgcagtaccgcgaactcgcgaaattgaaaggcacctatattgaccctcttccggcattagtccacccgaaaacgggacgcctccatacccgcttcaaccaaacagccacggcgaccggtcgtttgtcctcctctgatccaaaccttcagaatattccagtacgtaccccattgggccagaagatccgccgcgcgtttgtagctgaggagggttggcgtttagtggccctcgattatagccaaattgaattacgtgtccttgcccatctttctggcgatgagaacctcatccgcgtgtttcaggaaggcaaagacattcacactcaaacggcaagctggatgtttggattatcaccagaagcgatcgatcctttgatgcgtcgtgcagcgaagaccattaatttcggtgttctctacggtatgagtgcccatcgtttgtcgcaggaattaggcattccctatgaagaagctgccgcgttcattcagaagtactttcaaagctatcccaaagttaaagcatggatcgagaagactctcgaagaaggccgcacacgtggttacgtagagaccttatttggacgtcgccgctatgttcccgatttaaacgctcgcgtgaaatctgtccgtgaagccgccgaacgcatggcgttcaacatgcctgtacagggcacggcagctgacctcatgaaacttgcaatggtgcgcctttttccacaattgcgtgaagttggtgcccgcatgctcttgcaggtccacgatgaactcttgttagaagcgccaaaagagcgtgcggaagaggtggcagccctcgcgaaagaggttatggaaggcgtgtggcccttagcggtgcctcttgaagtcgaagttggtattggcgaggattggttggctgccaaaggataatga

SEQ ID NO: 1104 - protein, 841 aa, synthetic construct
  REGION 1..841: note = Variant of DNA polymerase I from Thermus sp. strain 2.9
MHHHHHHGGSGMLPLFEPKGRVLLVDGHHLAYRNFFALKGLTTSRGEPVQGVYGFAKSLLKALKEDGDVVIVVFDAKAPSFRHEAYEAYKAGRAPTPEDFPRQLALMKELVDLLGLERLEVPGFEADDVLATLAKKAEREGYEVQILTADRDLFQLLSPRISVLHPEGHRITPEWLWEKYGLRPEQWVDFRALAGDPSDNIPGVKGIGEKTALKLLKEWGSLENLLKNLDQVKPESVREKILAHLEDLKLSLELSRVRTDLPLEVDFRRRREPDWEGLKAFLERLEFGSLLHEFGLLESPLPAEEAPWPPPEGAFLGYRLSRPEPMWAELLALAASAQERVYRAEDPHGALKGLKGVRGLLAKDLAVVALREGLDLPPTDDPMLLAYLLDPSNTTPEGVARRYGGEWTEDAGERALLAERLHANLLGRLQGEERLLWLYEEVEKPLSRVLAHMEATGVKLDVAYLEALSLEVAAEMRRLEEEVFRLAGHSFNLNSRDQLERVLFDELGLPPIGKTEKTGKRSTSAAVLEALREVHPIVDKILQYRELAKLKGTYIDPLPALVHPKTGRLHTRFNQTATATGRLSSSDPNLQNIPVRTPLGQKIRRAFVAEEGWRLVALDYSQIELRVLAHLSGDENLIRVFQEGKDIHTQTASWMFGLSPEAIDPLMRRAAKTINFGVLYGMSAHRLSQELGIPYEEAAAFIQKYFQSYPKVKAWIEKTLEEGRTRGYVETLFGRRRYVPDLNARVKSVREAAERMAFNMPVQGTAADLMKLAMVRLFPQLREVGARMLLQVHDELLLEAPKERAEEVAALAKEVMEGVWPLAVPLEVEVGIGEDWLAAKG

SEQ ID NO: 1105 - DNA, 2529 bp, synthetic construct
  misc_feature 1..2529: note = Variant of DNA polymerase I from Thermus sp. strain 2.9
  source 1..2529: mol_type = other DNA
atgcaccatcatcatcatcatggcggtagcggcatgttaccgttgttcgaacctaaaggtcgcgtgcttctggttgatggccatcatctcgcgtatcgtaacttctttgccctgaaaggattaaccaccagccgtggcgagccggtacagggtgtctacggctttgcaaagtcgctcctgaaagctctgaaagaagacggtgatgtggtgattgttgtctttgatgcgaaagcgccaagttttcgccacgaagcgtacgaagcttacaaagccgggcgtgctccaacgccggaagactttcctcgccaattggcgcttatgaaggaattagtggatttgcttggcctcgaacgcttggaagttcccggtttcgaggcagacgacgtattagcgactctcgcaaagaaagccgaacgtgagggctatgaagtccagatcttgacagcagatcgcgatcttttccagcttttatctccgcgcatctcggtgttacacccggaagggcatcgtatcaccccggaatggctctgggagaaatatggtttgcgtcccgaacaatgggtggattttcgcgccttagcaggcgatccgagcgacaatattccgggagttaaaggtatcggcgagaagacggcgctcaagctccttaaagaatgggggtcgttggagaacttgcttaagaatttagatcaggtcaaaccagagtcagtgcgtgagaagattcttgcacacctcgaagacctcaaattaagcctggaattgtcccgtgtacgcaccgatttgccgctcgaagttgatttccgtggtcgccgcgaacctgactgggagggtcttaaagcgtttttagagcgtcttgaatttggttcgctcttgcatgaattcggccttttagaaagcccgttaccagccgaagaagcaccttggccaccgcccgaaggcgcgtttttaggttaccgtttgagtcgcccggaaccgatgtgggccgaattattggctcttgcagcgtctgcccagggacgtgtgtatcgcgcggaagaccctcatggtgcgctccgcggcctcaaagaagtcaacggactccttgccaaagacttagctgttgttgcattgcgcgaaggtcttgatttacctccgactgatgatccaatgcttcttgcgtacctcttggacccgtcaaacacgacgcccgaaggcgtagcccgtcgttacggcggcgagtggaccgaagatgcaggcgagcgcgcgttattggccgaacgtttgcacgccaatttattaggacgtttgcaaggcgaggaacgtctcctctggctttacgaagaagtggagaaaccattgagtcgcgtgctcgcgcatatggaagctaccggtgtcaaattagacgtggcgtatttggaggcactcagccttgaagttgctgccgaaatgcgccgcttggaggaagaagtattccgtttagcaggccactcctttaaccttaattctcgcgatcagttagaacgtgtgttgttcgatgaacttggtctccctcctatcggcaagacagagaagaccggtaaacgtagcacttcagcggcggttttagaagctcttcgcgaagtccatcccattgtggacaagatcttgcagtaccgcgaactcgcgaaattgaaaggcacctatattgaccctcttccggcattagtccacccgaaaacgggacgcctccatacccgcttcaaccaaacagccacggcgaccggtcgtttgtcctcctctgatccaaaccttcagaatattccagtacgtaccccattgggccagaagatccgccgcgcgtttgtagctgaggagggttggcgtttagtggccctcgattatagccaaattgaattacgtgtccttgcccatctttctggcgatgagaacctcatccgcgtgtttcaggaaggcaaagacattcacactcaaacggcaagctggatgtttggattatcagctgaagcgatcgatcctttgatgcgtcgtgcagcgaagaccgttaatttcggtgttctctacggtatgagtgcccatcgtttgtcgcaggaattaggcattccctatgaagaagctgcggcgttcattcagcgctactttcaaagctatcccaaagttaaagcatggatcgagaagactctcgaagaaggccgcacacgtggttacgtagagaccttatttggacgtcgccgctatgttcccgatttaaacgctcgcgtgaaatctgtccgtgaagccgccgaacgcatggcgttcaacatgcctgtacagggcacggcagctgacctcatgaaacttgcaatggtgcgcctttttccacaattgcgtgaagttggtgcccgcatgctcttgcaggtccacgatgaactcttgttagaagcgccaaaagagcgtgcggaagaggtggcagccctcgcgaaagaggttatggaaggcgtgtggcccttagcggtgcctcttgaagtcgaagttggtattggcgaggattggttggctgccaaaggataatga

SEQ ID NO: 1106 - protein, 841 aa, synthetic construct
  REGION 1..841: note = Variant of DNA polymerase I from Thermus sp. strain 2.9
MHHHHHHGGSGMLPLFEPKGRVLLVDGHHLAYRNFFALKGLTTSRGEPVQGVYGFAKSLLKALKEDGDVVIVVFDAKAPSFRHEAYEAYKAGRAPTPEDFPRQLALMKELVDLLGLERLEVPGFEADDVLATLAKKAEREGYEVQILTADRDLFQLLSPRISVLHPEGHRITPEWLWEKYGLRPEQWVDFRALAGDPSDNIPGVKGIGEKTALKLLKEWGSLENLLKNLDQVKPESVREKILAHLEDLKLSLELSRVRTDLPLEVDFRGRREPDWEGLKAFLERLEFGSLLHEFGLLESPLPAEEAPWPPPEGAFLGYRLSRPEPMWAELLALAASAQGRVYRAEDPHGALRGLKEVNGLLAKDLAVVALREGLDLPPTDDPMLLAYLLDPSNTTPEGVARRYGGEWTEDAGERALLAERLHANLLGRLQGEERLLWLYEEVEKPLSRVLAHMEATGVKLDVAYLEALSLEVAAEMRRLEEEVFRLAGHSFNLNSRDQLERVLFDELGLPPIGKTEKTGKRSTSAAVLEALREVHPIVDKILQYRELAKLKGTYIDPLPALVHPKTGRLHTRFNQTATATGRLSSSDPNLQNIPVRTPLGQKIRRAFVAEEGWRLVALDYSQIELRVLAHLSGDENLIRVFQEGKDIHTQTASWMFGLSAEAIDPLMRRAAKTVNFGVLYGMSAHRLSQELGIPYEEAAAFIQRYFQSYPKVKAWIEKTLEEGRTRGYVETLFGRRRYVPDLNARVKSVREAAERMAFNMPVQGTAADLMKLAMVRLFPQLREVGARMLLQVHDELLLEAPKERAEEVAALAKEVMEGVWPLAVPLEVEVGIGEDWLAAKG

SEQ ID NO: 1107 - DNA, 2529 bp, synthetic construct
  misc_feature 1..2529: note = Variant of DNA polymerase I from Thermus sp. strain 2.9
  source 1..2529: mol_type = other DNA
atgcaccatcatcatcatcatggcggtagcggcatgttaccgttgttcgaacctaaaggtcgcgtgcttctggttgatggccatcatctcgcgtatcgtaacttctttgccctgaaaggattaaccaccagccgtggcgagccggtacagggtgtctacggctttgcaaagtcgctcctgaaagctctgaaagaagacggtgatgtggtgattgttgtctttgatgcgaaagcgccaagttttcgccacgaagcgtacgaagcttacaaagccgggcgtgctccaacgccggaagactttcctcgccaattggcgcttatgaaggaattagtggatttgcttggcctcgaacgcttggaagttcccggtttcgaggcagacgacgtattagcgactctcgcaaagaaagccgaacgtgagggctatgaagtccagatcttgacagcagatcgcgatcttttccagcttttatctccgcgcatctcggtgttacacccggaagggcatcgtatcaccccggaatggctctgggagaaatatggtttgcgtcccgaacaatgggtggattttcgcgccttagcaggcgatccgagcgacaatattccgggagttaaaggtatcggcgagaagacggcgctcaagctccttaaagaatgggggtcgttggagaacttgcttaagaatttagatcaggtcaaaccagagtcagtgcgtgagaagattcttgcacacctcgaagacctcaaattaagccgcgaattgtcccgtgtacgcaccgatttgccgctcgaagttgatttccgtggccgccgcgaacctgactgggagggtcttaaagcgtttttagagcgtcttgaatttggttcgctcttgcatgaattcggccttttagaaagcccgttaccagccgaagaagcaccttggccaccgcccgaaggcgcgtttttaggttaccgtttgagtcgcccggaaccgatgtgggccgaattactggctcttgcagcgtctgcccagggacgtgtgtatcgcgcggaagaccctcatggtgcgctccgcggcctcaaagaagtccgtggactccttgccaaagacttagctgttgttgcattgcgcgaaggtcttgatttacctccgactgatgatccaatgcttcttgcgtacctcttggacccgtcaaacacgacgcccgaaggcgtagcccgtcgttacggcggcgagtggaccgaagatgcaggcgagcgcgcgttattggccgaacgtttgcacgccaatttattaggacgtttgcaaggcgaggaacgtctcctctggctttacgaagaagtggagaaaccattgagtcgcgtgctcgcgcatatggaagctaccggtgtcaaattagacgtggcgtatttggagaacctcagccttgaagttgctgccgaaatgcgccgcttggaggaagaagtattccgtttagcaggccactcctttaaccttaattctcgcgatcagttagaacgtgtgttgttcgatgagcttggtctccctcctatcggcaagacagagaagaccggtaaacgtagcacttcagcggcggttttagaagctcttcgcgaagtccatcccattgtggacaagatcttgcagtaccgcgaactcgcgaaattgaaaggcacctatattgaccctcttccggcattagtccacccgaaaacgggacgcctccatacccgcttcaaccaaacagccacggcgaccggtcgtttgtcctcctctgatccaaaccttcagaatattccagtacgtaccccattgggccagaagatccgccgcgcgtttgtagctgaggagggttggcgtttagtggccctcgattatagccaaattgaattacgtgtccttgcccatctttctggcgatgagaacctcatccgcgtgtttcaggaaggcaaagacattcacactcaaacggcaagctggatgtttggagtgtcgtcggaagcgatcgatcctttgatgcgtcgtgcagcgaagaccgttaatttcggtgttctctacggtatgagtgcccatcgtttgtcgcaggaattaggcattccctatgaagaagctgtcgcgttcattcagcgctactttcaaagctatcccaaagttaaagcatggatcgagaagactctcgaagaaggccgcacacgtggttacgtagagaccttatttggacgtcgccgctatgttcccgatttaaacgctcgcgtgaaatctgtccgtgaagccgccgaacgcatggcgttcaacatgcctgtacagggcacggcagctgacctcatgaaacttgcaatggtgcgcctttttccacaattgcgtgaagttggtgcccgcatgctcttgcaggtccacgatgaactcttgttagaagcgccaaaagagcgtgcggaagaggtggcagccctcgcgaaagaggttatggaaggcgtgtggcccttagcggtgcctcttgaagtcgaagttggtattggcgaggattggttggctgccaaaggataatga

SEQ ID NO: 1108 - protein, 841 aa, synthetic construct
  REGION 1..841: note = Variant of DNA polymerase I from Thermus sp. strain 2.9
MHHHHHHGGSGMLPLFEPKGRVLLVDGHHLAYRNFFALKGLTTSRGEPVQGVYGFAKSLLKALKEDGDVVIVVFDAKAPSFRHEAYEAYKAGRAPTPEDFPRQLALMKELVDLLGLERLEVPGFEADDVLATLAKKAEREGYEVQILTADRDLFQLLSPRISVLHPEGHRITPEWLWEKYGLRPEQWVDFRALAGDPSDNIPGVKGIGEKTALKLLKEWGSLENLLKNLDQVKPESVREKILAHLEDLKLSRELSRVRTDLPLEVDFRGRREPDWEGLKAFLERLEFGSLLHEFGLLESPLPAEEAPWPPPEGAFLGYRLSRPEPMWAELLALAASAQGRVYRAEDPHGALRGLKEVRGLLAKDLAVVALREGLDLPPTDDPMLLAYLLDPSNTTPEGVARRYGGEWTEDAGERALLAERLHANLLGRLQGEERLLWLYEEVEKPLSRVLAHMEATGVKLDVAYLENLSLEVAAEMRRLEEEVFRLAGHSFNLNSRDQLERVLFDELGLPPIGKTEKTGKRSTSAAVLEALREVHPIVDKILQYRELAKLKGTYIDPLPALVHPKTGRLHTRFNQTATATGRLSSSDPNLQNIPVRTPLGQKIRRAFVAEEGWRLVALDYSQIELRVLAHLSGDENLIRVFQEGKDIHTQTASWMFGVSSEAIDPLMRRAAKTVNFGVLYGMSAHRLSQELGIPYEEAVAFIQRYFQSYPKVKAWIEKTLEEGRTRGYVETLFGRRRYVPDLNARVKSVREAAERMAFNMPVQGTAADLMKLAMVRLFPQLREVGARMLLQVHDELLLEAPKERAEEVAALAKEVMEGVWPLAVPLEVEVGIGEDWLAAKG

SEQ ID NO: 1109 - DNA, 2529 bp, synthetic construct
  misc_feature 1..2529: note = Variant of DNA polymerase I from Thermus sp. strain 2.9
  source 1..2529: mol_type = other DNA
atgcaccatcatcatcatcatggcggtagcggcatgttaccgttgttcgaacctaaaggtcgcgtgcttctggttgatggccatcatctcgcgtatcgtaacttctttgccctgaaaggattaaccaccagccgtggcgagccggtacagggtgtctacggctttgcaaagtcgctcctgaaagctctgaaagaagacggtgatgtggtgattgttgtctttgatgcgaaagcgccaagttttcgccacgaagcgtacgaagcttacaaagccgggcgtgctccaacgccggaagactttcctcgccaattggcgcttatgaaggaattagtggatttgcttggcctcgaacgcttggaagttcccggtttcgaggcagacgacgtattagcgactctcgcaaagaaagccgaacgtgagggctatgaagtccagatcttgacagcagatcgcgatcttttccagcttttatctccgcgcatctcggtgttacacccggaagggcatcgtatcaccccggaatggctctgggagaaatatggtttgcgtcccgaacaatgggtggattttcgcgccttagcaggcgatccgagcgacaatattccgggagttaaaggtatcggcgagaagacggcgctcaagctccttaaagaatgggggtcgttggagaacttgcttaagaatttagatcaggtcaaaccagagtcagtgcgtgagaagattcttgcacacctcgaagacctcaaattaagccgcgaattgtcccgtgtacgcaccgatttgccgctcgaagttgatttccgtggccgccgcgaacctgactgggagggtcttaaagcgtttttagagcgtcttgaatttggttcgctcttgcatgaattcggccttttagaaagcccgttaccagccgaagaagcaccttggccaccgcccgaaggcgcgtttttaggttaccgtttgagtcgcccggaaccgatgtgggccgaattactggctcttgcagcgtctgcccaggggcgtgtgtatcgcgcggaagaccctcatggtgcgctccgcggcctcaaagaagtccgtggactccttgccaaagacttagctgttgttgcattgcgcgaaggtcttgatttacctccgactgatgatccaatgcttcttgcgtacctcttggacccgtcaaacacgacgcccgaaggcgtagcccgtcgttacggcggcgagtggaccgaagatgcaggcgagcgcgcgttattggccgaacgtttgcacgccaatttattaggacgtttgcaaggcgaggaacgtctcctctggctttacgaagaagtggagaaaccattgagtcgcgtgctcgcgcatatggaagctaccggtgtcaaattagacgtggcgtatttggaggcactcagccttgaagttgctgccgaaatgcgccgcttggaggaagaagtattccgtttagcaggccactcctttaaccttaattctcgcgatcagttagaacgtgtgttgttcgatgaacttggtctccctcctatcggcaagacagagaagaccggtaaacgtagcacttcagcggcggttttagaagctcttcgcgaagtccatcccattgtggacaagatcttgcagtaccgcgaactcgcgaaattgaaaggcacctatattgaccctcttccggcattagtccacccgaaaacgggacgcctccatacccgcttcaaccaaacagccacggcgaccggtcgtttgtcctcctctgatccaaaccttcagaatattccagtacgtaccccattgggccagaagatccgccgcgcgtttgtagctgaggagggttggcgtttagtggccctcgattatagccaaattgaattacgtgtccttgcccatctttctggcgatgagaacctcatccgcgtgtttcaggaaggcaaagacattcacactcaaacggcaagctggatgtttggattatcagcagaagcgatcgatcctttgatgcgtcgtgcagcgaagaccattaatttcggtgttctctacggtatgagtgcccatcgtttgtcgcaggaattaggcattccctatgaagaagctgtcgcgttcattcagcgctactttcaaagctatcccaaagttaaagcatggatcgagaagactctcgaagaaggccgcacacgtggttacgtagagaccttatttggacgtcgccgctatgttcccgatttaaacgctcgcgtgaaatctgtccgtgaagccgccgaacgcatggcgttcaacatgcctgtacagggcacggcagctgacctcatgaaacttgcaatggtgcgcctttttccacaattgcgtgaagttggtgcccgcatgctcttgcaggtccacgatgaactcttgttagaagcgccaaaagagcgtgcggaagaggtggcagccctcgcgaaagaggttatggaaggcgtgtggcccttagcggtgcctcttgaagtcgaagttggtattggcgaggattggttggctgccaaaggataatga

SEQ ID NO: 1110 - protein, 841 aa, synthetic construct
  REGION 1..841: note = Variant of DNA polymerase I from Thermus sp. strain 2.9
MHHHHHHGGSGMLPLFEPKGRVLLVDGHHLAYRNFFALKGLTTSRGEPVQGVYGFAKSLLKALKEDGDVVIVVFDAKAPSFRHEAYEAYKAGRAPTPEDFPRQLALMKELVDLLGLERLEVPGFEADDVLATLAKKAEREGYEVQILTADRDLFQLLSPRISVLHPEGHRITPEWLWEKYGLRPEQWVDFRALAGDPSDNIPGVKGIGEKTALKLLKEWGSLENLLKNLDQVKPESVREKILAHLEDLKLSRELSRVRTDLPLEVDFRGRREPDWEGLKAFLERLEFGSLLHEFGLLESPLPAEEAPWPPPEGAFLGYRLSRPEPMWAELLALAASAQGRVYRAEDPHGALRGLKEVRGLLAKDLAVVALREGLDLPPTDDPMLLAYLLDPSNTTPEGVARRYGGEWTEDAGERALLAERLHANLLGRLQGEERLLWLYEEVEKPLSRVLAHMEATGVKLDVAYLEALSLEVAAEMRRLEEEVFRLAGHSFNLNSRDQLERVLFDELGLPPIGKTEKTGKRSTSAAVLEALREVHPIVDKILQYRELAKLKGTYIDPLPALVHPKTGRLHTRFNQTATATGRLSSSDPNLQNIPVRTPLGQKIRRAFVAEEGWRLVALDYSQIELRVLAHLSGDENLIRVFQEGKDIHTQTASWMFGLSAEAIDPLMRRAAKTINFGVLYGMSAHRLSQELGIPYEEAVAFIQRYFQSYPKVKAWIEKTLEEGRTRGYVETLFGRRRYVPDLNARVKSVREAAERMAFNMPVQGTAADLMKLAMVRLFPQLREVGARMLLQVHDELLLEAPKERAEEVAALAKEVMEGVWPLAVPLEVEVGIGEDWLAAKG

SEQ ID NO: 1111 - DNA, 2529 bp, synthetic construct
  misc_feature 1..2529: note = Variant of DNA polymerase I from Thermus sp. strain 2.9
  source 1..2529: mol_type = other DNA
atgcaccatcatcatcatcatggcggtagcggcatgttaccgttgttcgaacctaaaggtcgcgtgcttctggttgatggccatcatctcgcgtatcgtaacttctttgccctgaaaggattaaccaccagccgtggcgagccggtacagggtgtctacggctttgcaaagtcgctcctgaaagctctgaaagaagacggtgatgtggtgattgttgtctttgatgcgaaagcgccaagttttcgccacgaagcgtacgaagcttacaaagccgggcgtgctccaacgccggaagactttcctcgccaattggcgcttatgaaggaattagtggatttgcttggcctcgaacgcttggaagttcccggtttcgaggcagacgacgtattagcgactctcgcaaagaaagccgaacgtgagggctatgaagtccagatcttgacagcagatcgcgatcttttccagcttttatctccgcgcatctcggtgttacacccggaagggcatcgtatcaccccggaatggctctgggagaaatatggtttgcgtcccgaacaatgggtggattttcgcgccttagcaggcgatccgagcgacaatattccgggagttaaaggtatcggcgagaagacggcgctcaagctccttaaagaatgggggtcgttggagaacttgcttaagaatttagatcaggtcaaaccagagtcagtgcgtgagaagattcttgcacacctcgaagacctcaaattaagccgcgaattgtcccgtgtacgcaccgatttgccgctcgaagttgatttccatggccgccgcgaacctgactgggagggtcttaaagcgtttttagagcgtcttgaatttggttcgctcttgcatgaattcggccttttagaaagcccgttaccagccgaagaagcaccttggccaccgcccgaaggcgcgtttttaggttaccgtttgagtcgcccggaaccgatgtgggccgaattattggctcttgcagcgtctgcccagggacgtgtgtatcgcgcggaagaccctcatggtgcgctccgcggcctcaaagaagtccgtggactccttgccaaagacttagctgttgttgcattgcgcgaaggtcttgatttacctccgactgatgatccaatgcttcttgcgtacctcttggacccgtcaaacacgacgcccgaaggcgtagcccgtcgttacggcggcgagtggaccgaagatgcaggcgagcgcgcgttattggccgaacgtttgcacgccaatttattaggacgtttgcaaggcgaggaacgtctcctctggctttacgaagaagtggagaaaccattgagtcgcgtgctcgcgcatatggaagctaccggtgtcaaattagacgtggcgtatttggaggcactcagccttgaagttgctgccgaaatgcgccgcttggaggaagaagtattccgtttagcaggccactcctttaaccttaattctcgcgatcagttagaacgtgtgttgttcgatgaacttggtctcgctcctatcggcaagacagagaagaccggtaaacgtagcacttcagcggcggttttagaagctcttcgcgaagtccatcccattgtggacaagatcttgcagtaccgcgaactcgcgaaattgaaaggcacctatattgaccctcttccggcattagtccacccgaaaacgggacgcctccatacccgcttcaaccaaacagccacggcgaccggtcgtttgtcctcctctgatccaaaccttcagaatattccagtacgtaccccattgggccagaagatccgccgcgcgtttgtagctgaggagggttggcgtttagtggccctcgattatagccaaattgaattacgtgtccttgcccatctttctggcgatgagaacctcatccgcgtgtttcaggaaggcaaagacattcacactcaaacggcaagctggatgtttggattatcagctgaagcgatcgatcctttgatgcgtcgtgcagcgaagaccatcaatttcggtgttctctacggtatgagtgcccatcgtttgtcgcaggaattaggcattccctatgaagaagctgcggcgttcattcagcgctactttcaaagctatcccaaagttaaagcatggatcgagaagactctcgaagaaggccgcacacgtggttacgtagagaccttatttggacgtcgccgctatgttcccgatttaaacgctcgcgtgaaatctgtccgtgaagccgccgaacgcatggcgttcaacatgcctgtacagggcacggcagctgacctcatgaaacttgcaatggtgcgcctttttccacaattgcgtgaagttggtgcccgcatgctcttgcaggtccacgatgaactcttgttagaagcgccaaaagagcgtgcggaagaggtggcagccctcgcgaaagaggttatggaaggcgtgtggcccttagcggtgcctcttgaagtcgaagttggtattggcgaggattggttggctgccaaaggataatga

SEQ ID NO: 1112 - protein, 841 aa, synthetic construct
  REGION 1..841: note = Variant of DNA polymerase I from Thermus sp. strain 2.9
MHHHHHHGGSGMLPLFEPKGRVLLVDGHHLAYRNFFALKGLTTSRGEPVQGVYGFAKSLLKALKEDGDVVIVVFDAKAPSFRHEAYEAYKAGRAPTPEDFPRQLALMKELVDLLGLERLEVPGFEADDVLATLAKKAEREGYEVQILTADRDLFQLLSPRISVLHPEGHRITPEWLWEKYGLRPEQWVDFRALAGDPSDNIPGVKGIGEKTALKLLKEWGSLENLLKNLDQVKPESVREKILAHLEDLKLSRELSRVRTDLPLEVDFHGRREPDWEGLKAFLERLEFGSLLHEFGLLESPLPAEEAPWPPPEGAFLGYRLSRPEPMWAELLALAASAQGRVYRAEDPHGALRGLKEVRGLLAKDLAVVALREGLDLPPTDDPMLLAYLLDPSNTTPEGVARRYGGEWTEDAGERALLAERLHANLLGRLQGEERLLWLYEEVEKPLSRVLAHMEATGVKLDVAYLEALSLEVAAEMRRLEEEVFRLAGHSFNLNSRDQLERVLFDELGLAPIGKTEKTGKRSTSAAVLEALREVHPIVDKILQYRELAKLKGTYIDPLPALVHPKTGRLHTRFNQTATATGRLSSSDPNLQNIPVRTPLGQKIRRAFVAEEGWRLVALDYSQIELRVLAHLSGDENLIRVFQEGKDIHTQTASWMFGLSAEAIDPLMRRAAKTINFGVLYGMSAHRLSQELGIPYEEAAAFIQRYFQSYPKVKAWIEKTLEEGRTRGYVETLFGRRRYVPDLNARVKSVREAAERMAFNMPVQGTAADLMKLAMVRLFPQLREVGARMLLQVHDELLLEAPKERAEEVAALAKEVMEGVWPLAVPLEVEVGIGEDWLAAKG

SEQ ID NO: 1113 - DNA, 2529 bp, synthetic construct
  misc_feature 1..2529: note = Variant of DNA polymerase I from Thermus sp. strain 2.9
  source 1..2529: mol_type = other DNA
atgcaccatcatcatcatcatggcggtagcggcatgttaccgttgttcgaacctaaaggtcgcgtgcttctggttgatggccatcatctcgcgtatcgtaacttctttgccctgaaaggattaaccaccagccgtggcgagccggtacagggtgtctacggctttgcaaagtcgctcctgaaagctctgaaagaagacggtgatgtggtgattgttgtctttgatgcgaaagcgccaagttttcgccacgaagcgtacgaagcttacaaagccgggcgtgctccaacgccggaagactttcctcgccaattggcgcttatgaaggaattagtggatttgcttggcctcgaacgcttggaagttcccggtttcgaggcagacgacgtattagcgactctcgcaaagaaagccgaacgtgagggctatgaagtccagatcttgacagcagatcgcgatcttttccagcttttatctccgcgcatctcggtgttacacccggaagggcatcgtatcaccccggaatggctctgggagaaatatggtttgcgtcccgaacaatgggtggattttcgcgccttagcaggcgatccgagcgacaatattccgggagttaaaggtatcggcgagaagacggcgctcaagctccttaaagaatgggggtcgttggagaacttgcttaagaatttagatcaggtcaaaccagagtcagtgcgtgagaagattcttgcacacctcgaagacctcaaattaagcctggaattgtcccgtgtacgcaccgatttgccgctcgaagttgatttccgtggtcgccgcgaacctgactgggagggtcttaaagcgtttttagagcgtcttgaatttggttcgctcttgcatgaattcggccttttagaaagcccgttaccagccgaagaagcaccttggccaccgcccgaaggcgcgtttttaggttaccgtttgagtcgcccggaaccgatgtgggccgaattactggctcttgcagcgtctgcccagggacgtgtgtatcgcgcggaagaccctcatggtgcgctccgtggcctcaaagaagtccgtggactccttgccaaagacttagctgttgttgcattgcgcgaaggtcttgatttacctccgactgatgatccaatgcttcttgcgtacctcttggacccgtcaaacacgacgcccgaaggcgtagcccgtcgttacggcggcgagtggaccgaagatgcaggcgagcgcgcgttattggccgaacgtttgcacgccaatttattaggacgtttgcaaggcgaggaacgtctcctctggctttacgaagaagtggagaaaccattgagtcgcgtgctcgcgcatatggaagctaccggtgtcaaattagacgtggcgtatttggaggcactcagccttgaagttgctgccgaaatgcgccgcttggaggaagaagtattccgtttagcaggccactcctttaaccttaattctcgcgatcagttagaacgtgtgttgttcgatgagcttggtctccctcctatcggcaagacagagaagaccggtaaacgtagcacttcagcggcggttttagaagctcttcgcgaagtccatcccattgtggacaagatcttgcagtaccgcgaactcgcgaaattgaaaggcacctatattgaccctcttccggcattagtccacccgaaaacgggacgcctccatacccgcttcaaccaaacagccacggcgaccggtcgtttgtcctcctctgatccaaaccttcagaatattccagtacgtaccccattgggccagaagatccgccgcgcgtttgtagctgaggagggttggcgtttagtggccctcgattatagccaaattgaattacgtgtccttgcccatctttctggcgatgagaacctcatccgcgtgtttcaggaaggcaaagacattcacactcaaacggcaagctggatgtttggattatcagctgaagcgatcgatcctttgatgcgtcgtgcagcgaagaccatcaatttcggtgttctctacggtatgagtgcccatcgtttgtcgcaggaattaggcattccctatgaagaagctgtcgcgttcattcagcgctactttcaaagctatcccaaagttaaagcatggatcgagaagactctcgaagaaggccgcacacgtggttacgtagagaccttatttggacgtcgccgctatgttcccgatttaaacgctcgcgtgaaatctgtccgtgaagccgccgaacgcatggcgttcaacatgcctgtacagggcacggcagctgacctcatgaaacttgcaatggtgcgcctttttccacaattgcgtgaagttggtgcccgcatgctcttgcaggtccacgatgaactcttgttagaagcgccaaaagagcgtgcggaagaggtggcagccctcgcgaaagaggttatggaaggcgtgtggcccttagcggtgcctcttgaagtcgaagttggtattggcgaggattggttggctgccaaaggataatga

SEQ ID NO: 1114 - protein, 841 aa, synthetic construct
  REGION 1..841: note = Variant of DNA polymerase I from Thermus sp. strain 2.9
MHHHHHHGGSGMLPLFEPKGRVLLVDGHHLAYRNFFALKGLTTSRGEPVQGVYGFAKSLLKALKEDGDVVIVVFDAKAPSFRHEAYEAYKAGRAPTPEDFPRQLALMKELVDLLGLERLEVPGFEADDVLATLAKKAEREGYEVQILTADRDLFQLLSPRISVLHPEGHRITPEWLWEKYGLRPEQWVDFRALAGDPSDNIPGVKGIGEKTALKLLKEWGSLENLLKNLDQVKPESVREKILAHLEDLKLSLELSRVRTDLPLEVDFRGRREPDWEGLKAFLERLEFGSLLHEFGLLESPLPAEEAPWPPPEGAFLGYRLSRPEPMWAELLALAASAQGRVYRAEDPHGALRGLKEVRGLLAKDLAVVALREGLDLPPTDDPMLLAYLLDPSNTTPEGVARRYGGEWTEDAGERALLAERLHANLLGRLQGEERLLWLYEEVEKPLSRVLAHMEATGVKLDVAYLEALSLEVAAEMRRLEEEVFRLAGHSFNLNSRDQLERVLFDELGLPPIGKTEKTGKRSTSAAVLEALREVHPIVDKILQYRELAKLKGTYIDPLPALVHPKTGRLHTRFNQTATATGRLSSSDPNLQNIPVRTPLGQKIRRAFVAEEGWRLVALDYSQIELRVLAHLSGDENLIRVFQEGKDIHTQTASWMFGLSAEAIDPLMRRAAKTINFGVLYGMSAHRLSQELGIPYEEAVAFIQRYFQSYPKVKAWIEKTLEEGRTRGYVETLFGRRRYVPDLNARVKSVREAAERMAFNMPVQGTAADLMKLAMVRLFPQLREVGARMLLQVHDELLLEAPKERAEEVAALAKEVMEGVWPLAVPLEVEVGIGEDWLAAKG

SEQ ID NO: 1115 - DNA, 2529 bp, synthetic construct
  misc_feature 1..2529: note = Variant of DNA polymerase I from Thermus sp. strain 2.9
  source 1..2529: mol_type = other DNA
atgcaccatcatcatcatcatggcggtagcggcatgttaccgttgttcgaacctaaaggtcgcgtgcttctggttgatggccatcatctcgcgtatcgtaacttctttgccctgaaaggattaaccaccagccgtggcgagccggtacagggtgtctacggctttgcaaagtcgctcctgaaagctctgaaagaagacggtgatgtggtgattgttgtctttgatgcgaaagcgccaagttttcgccacgaagcgtacgaagcttacaaagccgggcgtgctccaacgccggaagactttcctcgccaattggcgcttatgaaggaattagtggatttgcttggcctcgaacgcttggaagttcccggtttcgaggcagacgacgtattagcgactctcgcaaagaaagccgaacgtgagggctatgaagtccagatcttgacagcagatcgcgatcttttccagcttttatctccgcgcatctcggtgttacacccggaagggcatcgtatcaccccggaatggctctgggagaaatatggtttgcgtcccgaacaatgggtggattttcgcgccttagcaggcgatccgagcgacaatattccgggagttaaaggtatcggcgagaagacggcgctcaagctccttaaagaatgggggtcgttggagaacttgcttaagaatttagatcaggtcaaaccagagtcagtgcgtgagaagattcttgcacacctcgaagacctcaaattaagccgcgaattgtcccgtgtacgcaccgatttgccgctcgaagttgatttccgtggccgccgcgaacctgactgggagggtcttaaagcgtttttagagcgtcttgaatttggttcgctcttgcatgaattcggccttttagaaagcccgttaccagccgaagaagcaccttggccaccgcccgaaggcgcgtttttaggttaccgtttgagtcgcccggaaccgatgtgggccgaattattggctcttgcagcgtctgcccagggacgtgtgtatcgcgcggaagaccctcatggtgcgctccgcggcctcaaagaagtccgtggactccttgccaaagacttagctgttgttgcattgcgcgaaggtcttgatttacctccgactgatgatccaatgcttcttgcgtacctcttggacccgtcaaacacgacgcccgaaggcgtagcccgtcgttacggcggcgagtggaccgaagatgcaggcgagcgcgcgttattggccgaacgtttgcacgccaatttattaggacgtttgcaaggcgaggaacgtctcctctggctttacgaagaagtggagaaaccattgagtcgcgtgctcgcgcatatggaagctaccggtgtcaaattagacgtggcgtatttggaggcactcagccttgaagttgctgccgaaatgcgccgcttggaggaagaagtattcgtgttagcaggccactcctttaaccttaattctcgcgatcagttagaacgtgtgttgttcgatgaacttggtctccctcctatcggcaagacagagaagaccggtaaacgtagcacttcagcggcagttttagaagctcttcgcgaagtccatcccattgtggacaagatcttgcagtaccgcgaactcgcgaaattgaaaggcacctatattgaccctcttccggcattagtccacccgaaaacgggacgcctccatacccgcttcaaccaaacagccacggcgaccggtcgtttgtcctcctctgatccaaaccttcagaatattccagtacgtaccccattgggccagaagatccgccgcgcgtttgtagctgaggagggttggcgtttagtggccctcgattatagccaaattgaattacgtgtccttgcccatctttctggcgatgagaacctcatccgcgtgtttcaggaaggcaaagacattcacactcaaacggcaagctggatgtttggattatcagctgaagcgatcgatcctttgatgcgtcgtgcagcgaagaccatcaatttcggtgttctctacggtatgagtgcccatcgtttgtcgcaggaattaggcattccctatgaagaagctgcggcgttcattcagcgctactttcaaagctatcccaaagttaaagcatggatcgagaagactctcgaagaaggccgcacacgtggttacgtagagaccttatttggacgtcgccgctatgttcccgatttaaacgctcgcgtgaaatctgtccgtgaagccgccgaacgcatggcgttcaacatgcctgtacagggcacggcagctgacctcatgaaacttgcaatggtgcgcctttttccacaattgcgtgaagttggtgcccgcatgctcttgcaggtccacgatgaactcttgttagaagcgccaaaagagcgtgcggaagaggtggcagccctcgcgaaagaggttatggaaggcgtgtggcccttagcggtgcctcttgaagtcgaagttggtattggcgaggattggttggctgccaaaggataatga

SEQ ID NO: 1116 - protein, 841 aa, synthetic construct
  REGION 1..841: note = Variant of DNA polymerase I from Thermus sp. strain 2.9
MHHHHHHGGSGMLPLFEPKGRVLLVDGHHLAYRNFFALKGLTTSRGEPVQGVYGFAKSLLKALKEDGDVVIVVFDAKAPSFRHEAYEAYKAGRAPTPEDFPRQLALMKELVDLLGLERLEVPGFEADDVLATLAKKAEREGYEVQILTADRDLFQLLSPRISVLHPEGHRITPEWLWEKYGLRPEQWVDFRALAGDPSDNIPGVKGIGEKTALKLLKEWGSLENLLKNLDQVKPESVREKILAHLEDLKLSRELSRVRTDLPLEVDFRGRREPDWEGLKAFLERLEFGSLLHEFGLLESPLPAEEAPWPPPEGAFLGYRLSRPEPMWAELLALAASAQGRVYRAEDPHGALRGLKEVRGLLAKDLAVVALREGLDLPPTDDPMLLAYLLDPSNTTPEGVARRYGGEWTEDAGERALLAERLHANLLGRLQGEERLLWLYEEVEKPLSRVLAHMEATGVKLDVAYLEALSLEVAAEMRRLEEEVFVLAGHSFNLNSRDQLERVLFDELGLPPIGKTEKTGKRSTSAAVLEALREVHPIVDKILQYRELAKLKGTYIDPLPALVHPKTGRLHTRFNQTATATGRLSSSDPNLQNIPVRTPLGQKIRRAFVAEEGWRLVALDYSQIELRVLAHLSGDENLIRVFQEGKDIHTQTASWMFGLSAEAIDPLMRRAAKTINFGVLYGMSAHRLSQELGIPYEEAAAFIQRYFQSYPKVKAWIEKTLEEGRTRGYVETLFGRRRYVPDLNARVKSVREAAERMAFNMPVQGTAADLMKLAMVRLFPQLREVGARMLLQVHDELLLEAPKERAEEVAALAKEVMEGVWPLAVPLEVEVGIGEDWLAAKG

SEQ ID NO: 1117 - DNA, 2529 bp, synthetic construct
  misc_feature 1..2529: note = Variant of DNA polymerase I from Thermus sp. strain 2.9
  source 1..2529: mol_type = other DNA
atgcaccatcatcatcatcatggcggtagcggcatgttaccgttgttcgaacctaaaggtcgcgtgcttctggttgatggccatcatctcgcgtatcgtaacttctttgccctgaaaggattaaccaccagccgtggcgagccggtacagggtgtctacggctttgcaaagtcgctcctgaaagctctgaaagaagacggtgatgtggtgattgttgtctttgatgcgaaagcgccaagttttcgccacgaagcgtacgaagcttacaaagccgggcgtgctccaacgccggaagactttcctcgccaattggcgcttatgaaggaattagtggatttgcttggcctcgaacgcttggaagttcccggtttcgaggcagacgacgtattagcgactctcgcaaagaaagccgaacgtgagggctatgaagtccagatcttgacagcagatcgcgatcttttccagcttttatctccgcgcatctcggtgttacacccggaagggcatcgtatcaccccggaatggctctgggagaaatatggtttgcgtcccgaacaatgggtggattttcgcgccttagcaggcgatccgagcgacaatattccgggagttaaaggtatcggcgagaagacggcgctcaagctccttaaagaatgggggtcgttggagaacttgcttaagaatttagatcaggtcaaaccagagtcagtgcgtgagaagattcttgcacacctcgaagacctcaaattaagcctggaattgtcccgtgtacgcaccgatttgccgctcgaagttgatttccgtggccgccgcgaacctgactgggagggtcttaaagcgtttttagagcgtcttgaatttggttcgctcttgcatgaattcggccttttagaaagcccgttaccagccgaagaagcaccttggccaccgcccgaaggcgcgtttttaggttaccgtttgagtcgcccggaaccgatgtgggccgaattactggctcttgcagcgtctgcccaggagcgtgtgtatcgcgcggaagaccctcatggtgcgctccgcggcctcaaagaagtccgtggactccttgccaaagacttagctgttgttgcattgcgcgaaggtcttgatttacctccgactgatgatccaatgcttcttgcgtacctcttggacccgtcaaacacgacgcccgaaggcgtagcccgtcgttacggcggcgagtggaccgaagatgcagctaagcgcgcgttattggccgaacgtttgcacgccaatttattaggacgtttgcaaggcgaggaacgtctcctctggctttacgaagaagtggagaaaccattgagtcgcgtgctcgcgcatatggaagctaccggtgtcaaattagacgtggcgtatttggagaacctcagccttgaagttgctgccgaaatgcgccgcttggaggaagaagtattccgtttagcaggccactcctttaaccttaattctcgcgatcagttagaacgtgtgttgttcgatgagcttggtctccctcctatcggcaagacagagaagaccggtaaacgtagcacttcagcggcggttttagaagctcttcgcgaagtccatcccattgtggacaagatcttgcagtaccgcgaactcgcgaaattgaaaggcacctatattgaccctcttccggcattagtccacccgaaaacgggacgcctccatacccgcttcaaccaaacagccacggcgaccggtcgtttgtcctcctctgatccaaaccttcagaatattccagtacgtaccccattgggccagaagatccgccgcgcgtttgtagctgaggagggttggcgtttagtggccctcgattatagccaaattgaattacgtgtccttgcccatctttctggcgatgagaacctcatccgcgtgtttcaggaaggcaaagacattcacactcaaacggcaagctggatgtttggattatcagctgaagcgatcgatcctttgatgcgtcgtgcagcgaagaccgttaatttcggtgttctctacggtatgagtgcccatcgtttgtcgcaggaattaggcattccctatgaagaagctgccgcgttcattcagcgctactttcaaagctatcccaaagttaaagcatggatcgagaagactctcgaagaaggccgcacacgtggttacgtagagaccttatttggacgtcgccgctatgttcccgatttaaacgctcgcgtgaaatctgtccgtgaagccgccgaacgcatggcgttcaacatgcctgtacagggcacggcagctgacctcatgaaacttgcaatggtgcgcctttttccacaattgcgtgaagttggtgcccgcatgctcttgcaggtccacgatgaactcttgttagaagcgccaaaagagcgtgcggaagaggtggcagccctcgcgaaagaggttatggaaggcgtgtggcccttagcggtgcctcttgaagtcgaagttggtattggcgaggattggttggctgccaaaggataatga

SEQ ID NO: 1118 - protein, 841 aa, synthetic construct
  REGION 1..841: note = Variant of DNA polymerase I from Thermus sp. strain 2.9
MHHHHHHGGSGMLPLFEPKGRVLLVDGHHLAYRNFFALKGLTTSRGEPVQGVYGFAKSLLKALKEDGDVVIVVFDAKAPSFRHEAYEAYKAGRAPTPEDFPRQLALMKELVDLLGLERLEVPGFEADDVLATLAKKAEREGYEVQILTADRDLFQLLSPRISVLHPEGHRITPEWLWEKYGLRPEQWVDFRALAGDPSDNIPGVKGIGEKTALKLLKEWGSLENLLKNLDQVKPESVREKILAHLEDLKLSLELSRVRTDLPLEVDFRGRREPDWEGLKAFLERLEFGSLLHEFGLLESPLPAEEAPWPPPEGAFLGYRLSRPEPMWAELLALAASAQERVYRAEDPHGALRGLKEVRGLLAKDLAVVALREGLDLPPTDDPMLLAYLLDPSNTTPEGVARRYGGEWTEDAAKRALLAERLHANLLGRLQGEERLLWLYEEVEKPLSRVLAHMEATGVKLDVAYLENLSLEVAAEMRRLEEEVFRLAGHSFNLNSRDQLERVLFDELGLPPIGKTEKTGKRSTSAAVLEALREVHPIVDKILQYRELAKLKGTYIDPLPALVHPKTGRLHTRFNQTATATGRLSSSDPNLQNIPVRTPLGQKIRRAFVAEEGWRLVALDYSQIELRVLAHLSGDENLIRVFQEGKDIHTQTASWMFGLSAEAIDPLMRRAAKTVNFGVLYGMSAHRLSQELGIPYEEAAAFIQRYFQSYPKVKAWIEKTLEEGRTRGYVETLFGRRRYVPDLNARVKSVREAAERMAFNMPVQGTAADLMKLAMVRLFPQLREVGARMLLQVHDELLLEAPKERAEEVAALAKEVMEGVWPLAVPLEVEVGIGEDWLAAKG

SEQ ID NO: 1119 - DNA, 2529 bp, synthetic construct
  misc_feature 1..2529: note = Variant of DNA polymerase I from Thermus sp. strain 2.9
  source 1..2529: mol_type = other DNA
atgcaccatcatcatcatcatggcggtagcggcatgttaccgttgttcgaacctaaaggtcgcgtgcttctggttgatggccatcatctcgcgtatcgtaacttctttgccctgaaaggattaaccaccagccgtggcgagccggtacagggtgtctacggctttgcaaagtcgctcctgaaagctctgaaagaagacggtgatgtggtgattgttgtctttgatgcgaaagcgccaagttttcgccacgaagcgtacgaagcttacaaagccgggcgtgctccaacgccggaagactttcctcgccaattggcgcttatgaaggaattagtggatttgcttggcctcgaacgcttggaagttcccggtttcgaggcagacgacgtattagcgactctcgcaaagaaagccgaacgtgagggctatgaagtccagatcttgacagcagatcgcgatcttttccagcttttatctccgcgcatctcggtgttacacccggaagggcatcgtatcaccccggaatggctctgggagaaatatggtttgcgtcccgaacaatgggtggattttcgcgccttagcaggcgatccgagcgacaatattccgggagttaaaggtatcggcgagaagacggcgctcaagctccttaaagaatgggggtcgttggagaacttgcttaagaatttagatcaggtcaaaccagagtcagtgcgtgagaagattcttgcacacctcgaagacctcaaattaagccgcgaattgtcccgtgtacgcaccgatttgccgctcgaagttgatttccgtggtcgccgcgaacctgactgggagggtcttaaagcgtttttagagcgtcttgaatttggttcgctcttgcatgaattcggccttttagaaagcccgttaccagccgaagaagcaccttggccaccgcccgaaggcgcgtttttaggttaccgtttgagtcgcccggaaccgatgtgggccgaattactggctcttgcagcgtctgcccaggggcgtgtgtatcgcgcggaagaccctcatggtgcgctcaagggcctcaaagaagtccgtggactccttgccaaagacttagctgttgttgcattgcgcgaaggtcttgatttacctccgactgatgatccaatgcttcttgcgtacctcttggacccgtcaaacacgacgcccgaaggcgtagcccgtcgttacggcggcgagtggaccgaagatgcagctaagcgcgcgttattggccgaacgtttgcacgccaatttattaggacgtttgcaaggcgaggaacgtctcctctggctttacgaagaagtggagaaaccattgagtcgcgtgctcgcgcatatggaagctaccggtgtcaaattagacgtggcgtatttggagaacctcagccttgaagttgctgccgaaatgcgccgcttggaggaagaagtattccgtttagcaggccactcctttaaccttaattctcgcgatcagttagaacgtgtgttgttcgataaccttggtctccctcctatcggcaagacagagaagaccggtaaacgtagcacttcagcggcggttttagaagctcttcgcgaagtccatcccattgtggacaagatcttgcagtaccgcgaactcgcgaaattgaaaggcacctatattgaccctcttccggcattagtccacccgaaaacgggacgcctccatacccgcttcaaccaaacagccacggcgaccggtcgtttgtcctcctctgatccaaaccttcagaatattccagtacgtaccccattgggccagaagatccgccgcgcgtttgtagctgaggagggttggcgtttagtggccctcgattatagccaaattgaattacgtgtccttgcccatctttctggcgatgagaacctcatccgcgtgtttcaggaaggcaaagacattcacactcaaacggcaagctggatgtttggattatcagcagaagcgatcgatcctttgatgcgtcgtgcagcgaagaccattaatttcggtgttctctacggtatgagtgcccatcgtttgtcgcaggaattaggcattccctatgaagaagctgtcgcgttcattcagcgctactttcaaagctatcccaaagttaaagcatggatcgagaagactctcgaagaaggccgcacacgtggttacgtagagaccttatttggacgtcgccgctatgttcccgatttaaacgctcgcgtgaaatctgtccgtgaagccgccgaacgcatggcgttcaacatgcctgtacagggcacggcagctgacctcatgaaacttgcaatggtgcgcctttttccacaattgcgtgaagttggtgcccgcatgctcttgcaggtccacgatgaactcttgttagaagcgccaaaagagcgtgcggaagaggtggcagccctcgcgaaagaggttatggaaggcgtgtggcccttagcggtgcctcttgaagtcgaagttggtattggcgaggattggttggctgccaaaggataatga

SEQ ID NO: 1120 - protein, 841 aa, synthetic construct
  REGION 1..841: note = Variant of DNA polymerase I from Thermus sp. strain 2.9
MHHHHHHGGSGMLPLFEPKGRVLLVDGHHLAYRNFFALKGLTTSRGEPVQGVYGFAKSLLKALKEDGDVVIVVFDAKAPSFRHEAYEAYKAGRAPTPEDFPRQLALMKELVDLLGLERLEVPGFEADDVLATLAKKAEREGYEVQILTADRDLFQLLSPRISVLHPEGHRITPEWLWEKYGLRPEQWVDFRALAGDPSDNIPGVKGIGEKTALKLLKEWGSLENLLKNLDQVKPESVREKILAHLEDLKLSRELSRVRTDLPLEVDFRGRREPDWEGLKAFLERLEFGSLLHEFGLLESPLPAEEAPWPPPEGAFLGYRLSRPEPMWAELLALAASAQGRVYRAEDPHGALKGLKEVRGLLAKDLAVVALREGLDLPPTDDPMLLAYLLDPSNTTPEGVARRYGGEWTEDAAKRALLAERLHANLLGRLQGEERLLWLYEEVEKPLSRVLAHMEATGVKLDVAYLENLSLEVAAEMRRLEEEVFRLAGHSFNLNSRDQLERVLFDNLGLPPIGKTEKTGKRSTSAAVLEALREVHPIVDKILQYRELAKLKGTYIDPLPALVHPKTGRLHTRFNQTATATGRLSSSDPNLQNIPVRTPLGQKIRRAFVAEEGWRLVALDYSQIELRVLAHLSGDENLIRVFQEGKDIHTQTASWMFGLSAEAIDPLMRRAAKTINFGVLYGMSAHRLSQELGIPYEEAVAFIQRYFQSYPKVKAWIEKTLEEGRTRGYVETLFGRRRYVPDLNARVKSVREAAERMAFNMPVQGTAADLMKLAMVRLFPQLREVGARMLLQVHDELLLEAPKERAEEVAALAKEVMEGVWPLAVPLEVEVGIGEDWLAAKG

SEQ ID NO: 1121 - DNA, 2529 bp, synthetic construct
  misc_feature 1..2529: note = Variant of DNA polymerase I from Thermus sp. strain 2.9
  source 1..2529: mol_type = other DNA
atgcaccatcatcatcatcatggcggtagcggcatgttaccgttgttcgaacctaaaggtcgcgtgcttctggttgatggccatcatctcgcgtatcgtaacttctttgccctgaaaggattaaccaccagccgtggcgagccggtacagggtgtctacggctttgcaaagtcgctcctgaaagctctgaaagaagacggtgatgtggtgattgttgtctttgatgcgaaagcgccaagttttcgccacgaagcgtacgaagcttacaaagccgggcgtgctccaacgccggaagactttcctcgccaattggcgcttatgaaggaattagtggatttgcttggcctcgaacgcttggaagttcccggtttcgaggcagacgacgtattagcgactctcgcaaagaaagccgaacgtgagggctatgaagtccagatcttgacagcagatcgcgatcttttccagcttttatctccgcgcatctcggtgttacacccggaagggcatcgtatcaccccggaatggctctgggagaaatatggtttgcgtcccgaacaatgggtggattttcgcgccttagcaggcgatccgagcgacaatattccgggagttaaaggtatcggcgagaagacggcgctcaagctccttaaagaatgggggtcgttggagaacttgcttaagaatttagatcaggtcaaaccagagtcagtgcgtgagaagattcttgcacacctcgaagacctcaaattaagccgcgaattgtcccgtgtacgcaccgatttgccgctcgcggttgatttccgtggccgccgcgaacctgactgggagggtcttaaagcgtttttagagcgtcttgaatttggttcgctcttgcatgaattcggccttttagaaagcccgttaccagccgaagaagcaccttggccaccgcccgaaggcgcgtttttaggttaccgtttgagtcgcccggaaccgatgtgggccgaattattggctcttgcagcgtctgcccagggacgtgtgtatcgcgcggaagaccctcatggtgcgctccgcggcctcaaagaagtccgtggactccttgccaaagacttagctgttgttgcattgcgcgaaggtcttgatttacctccgactgatgatccaatgcttcttgcgtacctcttggacccgtcaaacacgacgcccgaaggcgtagcccgtcgttacggcggcgagtggaccgaagatgcaggcgagcgcgcgttattggccgaacgtttgcacgccaatttattaggacgtttgcaaggcgaggaacgtctcctctggctttacgaagaagtggagaaaccattgagtcgcgtgctcgcgcatatggaagctaccggtgtcaaattagacgtggcgtatttggaggcactcagccttgaagttgctgccgaaatgcgccgcttggaggaagaagtattccgtttagcaggccactcctttaaccttaattctcgcgatcagttagaacgtgtgttgttcgatgaacttggtctccctcctatcggcaagacagagaagaccggtaaacgtagcacttcagcggcggttttagaagctcttcgcgaagtccatcccattgtggacaagatcttgcagtaccgcgaactcgcgaaattgaaaggcacctatattgaccctcttccggcattagtccacccgaaaacgggacgcctccatacccgcttcaaccaaacagccacggcgaccggtcgtttgtcctcctctgatccaaaccttcagaatattccagtacgtaccccattgggccagaagatccgccgcgcgtttgtagctgaggagggttggcgtttagtggccctcgattatagccaaattgaattacgtgtccttgcccatctttctggcgatgagaacctcatccgcgtgtttcaggaaggcaaagacattcacactcaaacggcaagctggatgtttggattatcagctgaagcgatcgatcctttgatgcgtcgtgcagcgaagaccatcaatttcggtgttctctacggtatgagtgcccatcgtttgtcgcaggaattaggcattccctatgaagaagctgcggcgttcattcagcgctactttcaaagctatcccaaagttaaagcatggatcgagaagactctcgaagaaggccgcacacgtggttacgtagagaccttatttggacgtcgccgctatgttcccgatttaaacgctcgcgtgaaatctgtccgtgaagccgccgaacgcatggcgttcaacatgcctgtacagggcacggcagctgacctcatgaaacttgcaatggtgcgcctttttccacaattgcgtgaagttggtgcccgcatgctcttgcaggtccacgatgaactcttgttagaagcgccaaaagagcgtgcggaagaggtggcagccctcgcgaaagaggttatggaaggcgtgtggcccttagcggtgcctcttgaagtcgaagttggtattggcgaggattggttggctgccaaaggataatga

SEQ ID NO: 1122 - protein, 841 aa, synthetic construct
  REGION 1..841: note = Variant of DNA polymerase I from Thermus sp. strain 2.9
MHHHHHHGGSGMLPLFEPKGRVLLVDGHHLAYRNFFALKGLTTSRGEPVQGVYGFAKSLLKALKEDGDVVIVVFDAKAPSFRHEAYEAYKAGRAPTPEDFPRQLALMKELVDLLGLERLEVPGFEADDVLATLAKKAEREGYEVQILTADRDLFQLLSPRISVLHPEGHRITPEWLWEKYGLRPEQWVDFRALAGDPSDNIPGVKGIGEKTALKLLKEWGSLENLLKNLDQVKPESVREKILAHLEDLKLSRELSRVRTDLPLAVDFRGRREPDWEGLKAFLERLEFGSLLHEFGLLESPLPAEEAPWPPPEGAFLGYRLSRPEPMWAELLALAASAQGRVYRAEDPHGALRGLKEVRGLLAKDLAVVALREGLDLPPTDDPMLLAYLLDPSNTTPEGVARRYGGEWTEDAGERALLAERLHANLLGRLQGEERLLWLYEEVEKPLSRVLAHMEATGVKLDVAYLEALSLEVAAEMRRLEEEVFRLAGHSFNLNSRDQLERVLFDELGLPPIGKTEKTGKRSTSAAVLEALREVHPIVDKILQYRELAKLKGTYIDPLPALVHPKTGRLHTRFNQTATATGRLSSSDPNLQNIPVRTPLGQKIRRAFVAEEGWRLVALDYSQIELRVLAHLSGDENLIRVFQEGKDIHTQTASWMFGLSAEAIDPLMRRAAKTINFGVLYGMSAHRLSQELGIPYEEAAAFIQRYFQSYPKVKAWIEKTLEEGRTRGYVETLFGRRRYVPDLNARVKSVREAAERMAFNMPVQGTAADLMKLAMVRLFPQLREVGARMLLQVHDELLLEAPKERAEEVAALAKEVMEGVWPLAVPLEVEVGIGEDWLAAKG

SEQ ID NO: 1123 - DNA, 2529 bp, synthetic construct
  misc_feature 1..2529: note = Variant of DNA polymerase I from Thermus sp. strain 2.9
  source 1..2529: mol_type = other DNA
atgcaccatcatcatcatcatggcggtagcggcatgttaccgttgttcgaacctaaaggtcgcgtgcttctggttgatggccatcatctcgcgtatcgtaacttctttgccctgaaaggattaaccaccagccgtggcgagccggtacagggtgtctacggctttgcaaagtcgctcctgaaagctctgaaagaagacggtgatgtggtgattgttgtctttgatgcgaaagcgccaagttttcgccacgaagcgtacgaagcttacaaagccgggcgtgctccaacgccggaagactttcctcgccaattggcgcttatgaaggaattagtggatttgcttggcctcgaacgcttggaagttcccggtttcgaggcagacgacgtattagcgactctcgcaaagaaagccgaacgtgagggctatgaagtccagatcttgacagcagatcgcgatcttttccagcttttatctccgcgcatctcggtgttacacccggaagggcatcgtatcaccccggaatggctctgggagaaatatggtttgcgtcccgaacaatgggtggattttcgcgccttagcaggcgatccgagcgacaatattccgggagttaaaggtatcggcgagaagacggcgctcaagctccttaaagaatgggggtcgttggagaacttgcttaagaatttagatcaggtcaaaccagagtcagtgcgtgagaagattcttgcacacctcgaagacctcaaattaagccgcgaattgtcccgtgtacgcaccgatttgccgctcgaagttgatttccgtggccgccgcgaacctgactgggagggtcttaaagcgtttttagagcgtcttgaatttggttcgctcttgcatgaattcggccttttagaaagcccgttaccagccgaagaagcaccttggccaccgcccgaaggcgcgtttttaggttaccgtttgagtcgcccggaaccgatgtgggccgaattattggctcttgcagcgtctgcccagggacgtgtgtatcgcgcggaagaccctcatggtgcgctccgcggcctcaaagaagtccgtggactccttgccaaagacttagctgttgttgcattgcgcgaaggtcttgatttacctccgactgatgatccaatgcttcttgcgtacctcttggacccgtcaaacacgacgcccgaaggcgtagcccgtcgttacggcggcgagtggaccgaagatgcaggcgagcgcgcgttattggccgaacgtttgcacgccaatttattaggacgtttgcaaggcgagcctcgtctcctctggctttacgaagaagtggagaaaccattgagtcgcgtgctcgcgcatatggaagctaccggtgtcaaattagacgtggcgtatttggaggcactcagccttgaagttgctgccgaaatgcgccgcttggaggaagaagtattccgtttagcaggccactcctttaaccttaattctcgcaatcagttagaacgtgtgttgttcgatgaacttggtctccctcctatcggcaagacagagaagaccggtaaacgtagcacttcagcggcggttttagaagctcttcgcgaagtccatcccattgtggacaagatcttgcagtaccgcgaactcgcgaaattgaaaggcacctatattgaccctcttccggcattagtccacccgaaaacgggacgcctccatacccgcttcaaccaaacagccacggcgaccggtcgtttgtcctcctctgatccaaaccttcagaatattccagtacgtaccccattgggccagaagatccgccgcgcgtttgtagctgaggagggttggcgtttagtggccctcgattatagccaaattgaattacgtgtccttgcccatctttctggcgatgagaacctcatccgcgtgtttcaggaaggcaaagacattcacactcaaacggcaagctggatgtttggattatcagctgaagcgatcgatcctttgatgcgtcgtgcagcgaagaccatcaatttcggtgttctctacggtatgagtgcccatcgtttgtcgcaggaattaggcattccctatgaagaagctgcggcgttcattcagcgctactttcaaagctatcccaaagttaaagcatggatcgagaagactctcgaagaaggccgcacacgtggttacgtagagaccttatttggacgtcgccgctatgttcccgatttaaacgctcgcgtgaaatctgtccgtgaagccgccgaacgcatggcgttcaacatgcctgtacagggcacggcagctgacctcatgaaacttgcaatggtgcgcctttttccacaattgcgtgaagttggtgcccgcatgctcttgcaggtccacgatgaactcttgttagaagcgccaaaagagcgtgcggaagaggtggcagccctcgcgaaagaggttatggaaggcgtgtggcccttagcggtgcctcttgaagtcgaagttggtattggcgaggattggttggctgccaaaggataatga

SEQ ID NO: 1124 - protein, 841 aa, synthetic construct
  REGION 1..841: note = Variant of DNA polymerase I from Thermus sp. strain 2.9
MHHHHHHGGSGMLPLFEPKGRVLLVDGHHLAYRNFFALKGLTTSRGEPVQGVYGFAKSLLKALKEDGDVVIVVFDAKAPSFRHEAYEAYKAGRAPTPEDFPRQLALMKELVDLLGLERLEVPGFEADDVLATLAKKAEREGYEVQILTADRDLFQLLSPRISVLHPEGHRITPEWLWEKYGLRPEQWVDFRALAGDPSDNIPGVKGIGEKTALKLLKEWGSLENLLKNLDQVKPESVREKILAHLEDLKLSRELSRVRTDLPLEVDFRGRREPDWEGLKAFLERLEFGSLLHEFGLLESPLPAEEAPWPPPEGAFLGYRLSRPEPMWAELLALAASAQGRVYRAEDPHGALRGLKEVRGLLAKDLAVVALREGLDLPPTDDPMLLAYLLDPSNTTPEGVARRYGGEWTEDAGERALLAERLHANLLGRLQGEPRLLWLYEEVEKPLSRVLAHMEATGVKLDVAYLEALSLEVAAEMRRLEEEVFRLAGHSFNLNSRNQLERVLFDELGLPPIGKTEKTGKRSTSAAVLEALREVHPIVDKILQYRELAKLKGTYIDPLPALVHPKTGRLHTRFNQTATATGRLSSSDPNLQNIPVRTPLGQKIRRAFVAEEGWRLVALDYSQIELRVLAHLSGDENLIRVFQEGKDIHTQTASWMFGLSAEAIDPLMRRAAKTINFGVLYGMSAHRLSQELGIPYEEAAAFIQRYFQSYPKVKAWIEKTLEEGRTRGYVETLFGRRRYVPDLNARVKSVREAAERMAFNMPVQGTAADLMKLAMVRLFPQLREVGARMLLQVHDELLLEAPKERAEEVAALAKEVMEGVWPLAVPLEVEVGIGEDWLAAKG

SEQ ID NO: 1125 - DNA, 2529 bp, synthetic construct
  misc_feature 1..2529: note = Variant of DNA polymerase I from Thermus sp. strain 2.9
  source 1..2529: mol_type = other DNA
atgcaccatcatcatcatcatggcggtagcggcatgttaccgttgttcgaacctaaaggtcgcgtgcttctggttgatggccatcatctcgcgtatcgtaacttctttgccctgaaaggattaaccaccagccgtggcgagccggtacagggtgtctacggctttgcaaagtcgctcctgaaagctctgaaagaagacggtgatgtggtgattgttgtctttgatgcgaaagcgccaagttttcgccacgaagcgtacgaagcttacaaagccgggcgtgctccaacgccggaagactttcctcgccaattggcgcttatgaaggaattagtggatttgcttggcctcgaacgcttggaagttcccggtttcgaggcagacgacgtattagcgactctcgcaaagaaagccgaacgtgagggctatgaagtccagatcttgacagcagatcgcgatcttttccagcttttatctccgcgcatctcggtgttacacccggaagggcatcgtatcaccccggaatggctctgggagaaatatggtttgcgtcccgaacaatgggtggattttcgcgccttagcaggcgatccgagcgacaatattccgggagttaaaggtatcggcgagaagacggcgctcaagctccttaaagaatgggggtcgttggagaacttgcttaagaatttagatcaggtcaaaccagagtcagtgcgtgagaagattcttgcacacctcgaagacctcaaattaagccgcgaattgtcccgtgtacgcaccgatttgccgctcgaagttgatttccgtggccgccgcgaacctgactgggagggtcttaaagcgtttttagagcgtcttgaatttggttcgctcttgcatgaattcggccttttagaaagcccgttaccagccgaagaagcaccttggccaccgcccgaaggcgcgtttttaggttaccgtttgagtcgcccggaaccgatgtgggccgaattattggctcttgcagcgtctgcccagggacgtgtgtatcgcgcggaagaccctcatggtgcgctccgcggcctcaaagaagtccgtggactccttgccaaagacttagctgttgttgcattgcgcgaaggtcttgatttacctccgactgatgatccaatgcttcttgcgtacctcttggacccgtcaaacacgacgcccgaaggcgtagcccgtcgttacggcggcgagtggaccgaagatgcagctgagcgcgcgttattggccgaacgtttgcacgccaatttattaggacgtttgcaaggcgaggaacgtctcctctggctttacgaagaagtggagaaaccattgagtcgcgtgctcgcgcatatggaagctaccggtgtcaaattagacgtggcgtatttggagaacctcagccttgaagttgctgccgaaatgcgccgcttggaggaagaagtattccgtttagcaggccactcctttaaccttaattctcgcgatcagttagaacgtgtgttgttcgataaccttggtctccctcctatcggcaagacagagaagaccggtaaacgtagcacttcagcggcggttttagaagctcttcgcgaagtccatcccattgtggacaagatcttgcagtaccgcgaactcgcgaaattgaaaggcacctatattgaccctcttccggcattagtccacccgaaaacgggacgcctccatacccgcttcaaccaaacagccacggcgaccggtcgtttgtcctcctctgatccaaaccttcagaatattccagtacgtaccccattgggccagaagatccgccgcgcgtttgtagctgaggagggttggcgtttagtggccctcgattatagccaaattgaattacgtgtccttgcccatctttctggcgatgagaacctcatccgcgtgtttcaggaaggcaaagacattcacactcaaacggcaagctggatgtttggattatcagcagaagcgatcgatcctttgatgcgtcgtgcagcgaagaccgttaatttcggtgttctctacggtatgagtgcccatcgtttgtcgcaggaattaggcattccctatgaagaagctgcggcgttcattcagaagtactttcaaagctatcccaaagttaaagcatggatcgagaagactctcgaagaaggccgcacacgtggttacgtagagaccttatttggacgtcgccgctatgttcccgatttaaacgctcgcgtgaaatctgtccgtgaagccgccgaacgcatggcgttcaacatgcctgtacagggcacggcagctgacctcatgaaacttgcaatggtgcgcctttttccacaattgcgtgaagttggtgcccgcatgctcttgcaggtccacgatgaactcttgttagaagcgccaaaagagcgtgcggaagaggtggcagccctcgcgaaagaggttatggaaggcgtgtggcccttagcggtgcctcttgaagtcgaagttggtattggcgaggattggttggctgccaaaggataatga

SEQ ID NO: 1126 - protein, 841 aa, synthetic construct
  REGION 1..841: note = Variant of DNA polymerase I from Thermus sp. strain 2.9
MHHHHHHGGSGMLPLFEPKGRVLLVDGHHLAYRNFFALKGLTTSRGEPVQGVYGFAKSLLKALKEDGDVVIVVFDAKAPSFRHEAYEAYKAGRAPTPEDFPRQLALMKELVDLLGLERLEVPGFEADDVLATLAKKAEREGYEVQILTADRDLFQLLSPRISVLHPEGHRITPEWLWEKYGLRPEQWVDFRALAGDPSDNIPGVKGIGEKTALKLLKEWGSLENLLKNLDQVKPESVREKILAHLEDLKLSRELSRVRTDLPLEVDFRGRREPDWEGLKAFLERLEFGSLLHEFGLLESPLPAEEAPWPPPEGAFLGYRLSRPEPMWAELLALAASAQGRVYRAEDPHGALRGLKEVRGLLAKDLAVVALREGLDLPPTDDPMLLAYLLDPSNTTPEGVARRYGGEWTEDAAERALLAERLHANLLGRLQGEERLLWLYEEVEKPLSRVLAHMEATGVKLDVAYLENLSLEVAAEMRRLEEEVFRLAGHSFNLNSRDQLERVLFDNLGLPPIGKTEKTGKRSTSAAVLEALREVHPIVDKILQYRELAKLKGTYIDPLPALVHPKTGRLHTRFNQTATATGRLSSSDPNLQNIPVRTPLGQKIRRAFVAEEGWRLVALDYSQIELRVLAHLSGDENLIRVFQEGKDIHTQTASWMFGLSAEAIDPLMRRAAKTVNFGVLYGMSAHRLSQELGIPYEEAAAFIQKYFQSYPKVKAWIEKTLEEGRTRGYVETLFGRRRYVPDLNARVKSVREAAERMAFNMPVQGTAADLMKLAMVRLFPQLREVGARMLLQVHDELLLEAPKERAEEVAALAKEVMEGVWPLAVPLEVEVGIGEDWLAAKG

SEQ ID NO: 1127 - DNA, 2529 bp, synthetic construct
  misc_feature 1..2529: note = Variant of DNA polymerase I from Thermus sp. strain 2.9
  source 1..2529: mol_type = other DNA
atgcaccatcatcatcatcatggcggtagcggcatgttaccgttgttcgaacctaaaggtcgcgtgcttctggttgatggccatcatctcgcgtatcgtaacttctttgccctgaaaggattaaccaccagccgtggcgagccggtacagggtgtctacggctttgcaaagtcgctcctgaaagctctgaaagaagacggtgatgtggtgattgttgtctttgatgcgaaagcgccaagttttcgccacgaagcgtacgaagcttacaaagccgggcgtgctccaacgccggaagactttcctcgccaattggcgcttatgaaggaattagtggatttgcttggcctcgaacgcttggaagttcccggtttcgaggcagacgacgtattagcgactctcgcaaagaaagccgaacgtgagggctatgaagtccagatcttgacagcagatcgcgatcttttccagcttttatctccgcgcatctcggtgttacacccggaagggcatcgtatcaccccggaatggctctgggagaaatatggtttgcgtcccgaacaatgggtggattttcgcgccttagcaggcgatccgagcgacaatattccgggagttaaaggtatcggcgagaagacggcgctcaagctccttaaagaatgggggtcgttggagaacttgcttaagaatttagatcaggtcaaaccagagtcagtgcgtgagaagattcttgcacacctcgaagacctcaaattaagccgcgaattgtcccgtgtacgcaccgatttgccgctcgaagttgatttccgtggtcgccgcgaacctgactgggagggtcttaaagcgtttttagagcgtcttgaatttggttcgctcttgcatgaattcggccttttagaaagcccgttaccagccgaagaagcaccttggccaccgcccgaaggcgcgtttttaggttaccgtttgagtcgcccggaaccgatgtgggccgaattatcggctcttgcagcgtctgcccagggacgtgtgtatcgcgcggaagaccctcatggtgcgctccgcggcctcaaagaagtccgtggactccttgccaaagacttagctgttgttgcattgcgcgaaggtcttgatttacctccgactgatgatccaatgcttcttgcgtacctcttggacccgtcaaacacgacgcccgaaggcgtagcccgtcgttacggcggcgagtggaccgaagatgcaggcgagcgcgcgttattggccgaacgtttgcacgccaatttattaggacgtttgcaaggcgaggaacgtctcctctggctttacgaagaagtggagaaaccattgagtcgcgtgctcgcgcatatggaagctaccggtgtcaaattagacgtggcgtatttggaggctctcagccttgaagttgctgccgaaatgcgccgcttggaggaagaagtattccgtttagcaggccactcctttaaccttaattctcgcgatcagttagaacgtgtgttgttcgatgaacttggtctccctcctatcggcaagacagagaagaccggtaaacgtagcacttcagcggcggttttagaagctcttcgcgaagtccatcccattgtggacaagatcttgcagtaccgcgaactcgcgaaattgaaaggcacctatattgaccctcttccggcattagtccacccgaaaacgggacgcctccatacccgcttcaaccaaacagccacggcgaccggtcgtttgtcctcctctgatccaaaccttcagaatattccagtacgtaccccattgggccagaagatccgccgcgcgtttgtagctgaggagggttggcgtttagtggccctcgattatagccaaattgaattacgtgtccttgcccatctttctggcgatgagaacctcatccgcgtgtttcaggaaggcaaagacattcacactcaaacggcaagctggatgtttggattatcagctgaagcgatcgatcctttgatgcgtcgtgcagcgaagaccatcaatttcggtgttctctacggtatgagtgcccatcgtttgtcgcaggaattaggcattccctatgaagaagctgcggcgttcattcagcgctactttcaaagctatcccaaagttaaagcatggatcgagaagactctcgaagaaggccgcacacgtggttacgtagagaccttatttggacgtcgccgctatgttcccgatttaaacgctcgcgtgaaatctgtccgtgaagccgccgaacgcatggcgttcaacatgcctgtacagggcacggcagctgacctcatgaaacttgcaatggtgcgcctttttccacaattgcgtgaagttggtgcccgcatgctcttgcaggtccacgatgaactcttgttagaagcgccaaaagagcgtgcggaagaggtggcagccctcgcgaaagaggttatggaaggcgtgtggcccttagcggtgcctcttgaagtcgaagttggtattggcgaggattggttggctgccaaaggataatga

SEQ ID NO: 1128 - protein, 841 aa, synthetic construct
  REGION 1..841: note = Variant of DNA polymerase I from Thermus sp. strain 2.9
MHHHHHHGGSGMLPLFEPKGRVLLVDGHHLAYRNFFALKGLTTSRGEPVQGVYGFAKSLLKALKEDGDVVIVVFDAKAPSFRHEAYEAYKAGRAPTPEDFPRQLALMKELVDLLGLERLEVPGFEADDVLATLAKKAEREGYEVQILTADRDLFQLLSPRISVLHPEGHRITPEWLWEKYGLRPEQWVDFRALAGDPSDNIPGVKGIGEKTALKLLKEWGSLENLLKNLDQVKPESVREKILAHLEDLKLSRELSRVRTDLPLEVDFRGRREPDWEGLKAFLERLEFGSLLHEFGLLESPLPAEEAPWPPPEGAFLGYRLSRPEPMWAELSALAASAQGRVYRAEDPHGALRGLKEVRGLLAKDLAVVALREGLDLPPTDDPMLLAYLLDPSNTTPEGVARRYGGEWTEDAGERALLAERLHANLLGRLQGEERLLWLYEEVEKPLSRVLAHMEATGVKLDVAYLEALSLEVAAEMRRLEEEVFRLAGHSFNLNSRDQLERVLFDELGLPPIGKTEKTGKRSTSAAVLEALREVHPIVDKILQYRELAKLKGTYIDPLPALVHPKTGRLHTRFNQTATATGRLSSSDPNLQNIPVRTPLGQKIRRAFVAEEGWRLVALDYSQIELRVLAHLSGDENLIRVFQEGKDIHTQTASWMFGLSAEAIDPLMRRAAKTINFGVLYGMSAHRLSQELGIPYEEAAAFIQRYFQSYPKVKAWIEKTLEEGRTRGYVETLFGRRRYVPDLNARVKSVREAAERMAFNMPVQGTAADLMKLAMVRLFPQLREVGARMLLQVHDELLLEAPKERAEEVAALAKEVMEGVWPLAVPLEVEVGIGEDWLAAKG

SEQ ID NO: 1129 - DNA, 2529 bp, synthetic construct
  misc_feature 1..2529: note = Variant of DNA polymerase I from Thermus sp. strain 2.9
  source 1..2529: mol_type = other DNA
atgcaccatcatcatcatcatggcggtagcggcatgttaccgttgttcgaacctaaaggtcgcgtgcttctggttgatggccatcatctcgcgtatcgtaacttctttgccctgaaaggattaaccaccagccgtggcgagccggtacagggtgtctacggctttgcaaagtcgctcctgaaagctctgaaagaagacggtgatgtggtgattgttgtctttgatgcgaaagcgccaagttttcgccacgaagcgtacgaagcttacaaagccgggcgtgctccaacgccggaagactttcctcgccaattggcgcttatgaaggaattagtggatttgcttggcctcgaacgcttggaagttcccggtttcgaggcagacgacgtattagcgactctcgcaaagaaagccgaacgtgagggctatgaagtccagatcttgacagcagatcgcgatcttttccagcttttatctccgcgcatctcggtgttacacccggaagggcatcgtatcaccccggaatggctctgggagaaatatggtttgcgtcccgaacaatgggtggattttcgcgccttagcaggcgatccgagcgacaatattccgggagttaaaggtatcggcgagaagacggcgctcaagctccttaaagaatgggggtcgttggagaacttgcttaagaatttagatcaggtcaaaccagagtcagtgcgtgagaagattcttgcacacctcgaagacctcaaattaagccgcgaattgtcccgtgtacgcaccgatttgccgctcgaagttgatttccgtggtcgccgcgaacctgactgggagggtcttaaagcgtttttagagcgtcttgaatttggttcgctcttgcatgaattcggccttttagaaagcccgttaccagccgaagaagcaccttggccaccgcccgaaggcgcgtttttaggttaccgtttgagtcgcccggaaccgatgtgggccgaattactggctcttgcagcgtctgcccagggacgtgtgtatcgcgcggaagaccctcatggtgcgctccgcggcctcaaagaagtccgtggactccttgccaaagacttagctgttgttgcattgcgcgaaggtcttgatttacctccgactgatgatccaatgcttcttgcgtacctcttggacccgtcaaacacgacgcccgaaggcgtagcccgtcgttacggcggcgagtggaccgaagatgcagctgagcgcgcgttattggccgaacgtttgcacgccaatttattaggacgtttgcaaggcgaggaacgtctcctctggctttacgaagaagtggagaaaccattgagtcgcgtgctcgcgcatatggaagctaccggtgtcaaattagacgtggcgtatttggaggcactcagccttgaagttgctgccgaaatgcgccgcttggaggaagaagtattccgtttagcaggccactcctttaaccttaattctcgcgatcagttagaacgtgtgttgttcgatgaacttggtctccctcctatcggcaagacagagaagaccggtaaacgtagcacttcagcggcggttttagaagctcttcgcgaagtccatcccattgtggacaagatcttgcagtaccgcgaactcgcgaaattgaaaggcacctatattgaccctcttccggcattagtccacccgaaaacgggacgcctccatacccgcttcaaccaaacagccacggcgaccggtcgtttgtcctcctctgatccaaaccttcagaatattccagtacgtaccccattgggccagaagatccgccgcgcgtttgtagctgaggagggttggcgtttagtggccctcgattatagccaaattgaattacgtgtccttgcccatctttctggcgatgagaacctcatccgcgtgtttcaggaaggcaaagacattcacactcaaacggcaagctggatgtttggattatcagcagaagcgatcgatcctttgatgcgtcgtgcagcgaagaccgttaatttcggtgttctctacggtatgagtgcccatcgtttgtcgcaggaattaggcattccctatgaagaagctgtcgcgttcattcagcgctactttcaaagctatcccaaagttaaagcatggatcgagaagactctcgaagaaggccgcacacgtggttacgtagagaccttatttggacgtcgccgctatgttcccgatttaaacgctcgcgtgaaatctgtccgtgaagccgccgaacgcatggcgttcaacatgcctgtacagggcacggcagctgacctcatgaaacttgcaatggtgcgcctttttccacaattgcgtgaagttggtgcccgcatgctcttgcaggtccacgatgaactcttgttagaagcgccaaaagagcgtgcggaagaggtggcagccctcgcgaaagaggttatggaaggcgtgtggcccttagcggtgcctcttgaagtcgaagttggtattggcgaggattggttggctgccaaaggataatga

SEQ ID NO: 1130 - protein, 841 aa, synthetic construct
  REGION 1..841: note = Variant of DNA polymerase I from Thermus sp. strain 2.9
MHHHHHHGGSGMLPLFEPKGRVLLVDGHHLAYRNFFALKGLTTSRGEPVQGVYGFAKSLLKALKEDGDVVIVVFDAKAPSFRHEAYEAYKAGRAPTPEDFPRQLALMKELVDLLGLERLEVPGFEADDVLATLAKKAEREGYEVQILTADRDLFQLLSPRISVLHPEGHRITPEWLWEKYGLRPEQWVDFRALAGDPSDNIPGVKGIGEKTALKLLKEWGSLENLLKNLDQVKPESVREKILAHLEDLKLSRELSRVRTDLPLEVDFRGRREPDWEGLKAFLERLEFGSLLHEFGLLESPLPAEEAPWPPPEGAFLGYRLSRPEPMWAELLALAASAQGRVYRAEDPHGALRGLKEVRGLLAKDLAVVALREGLDLPPTDDPMLLAYLLDPSNTTPEGVARRYGGEWTEDAAERALLAERLHANLLGRLQGEERLLWLYEEVEKPLSRVLAHMEATGVKLDVAYLEALSLEVAAEMRRLEEEVFRLAGHSFNLNSRDQLERVLFDELGLPPIGKTEKTGKRSTSAAVLEALREVHPIVDKILQYRELAKLKGTYIDPLPALVHPKTGRLHTRFNQTATATGRLSSSDPNLQNIPVRTPLGQKIRRAFVAEEGWRLVALDYSQIELRVLAHLSGDENLIRVFQEGKDIHTQTASWMFGLSAEAIDPLMRRAAKTVNFGVLYGMSAHRLSQELGIPYEEAVAFIQRYFQSYPKVKAWIEKTLEEGRTRGYVETLFGRRRYVPDLNARVKSVREAAERMAFNMPVQGTAADLMKLAMVRLFPQLREVGARMLLQVHDELLLEAPKERAEEVAALAKEVMEGVWPLAVPLEVEVGIGEDWLAAKG

SEQ ID NO: 1131 - DNA, 2529 bp, synthetic construct
  misc_feature 1..2529: note = Variant of DNA polymerase I from Thermus sp. strain 2.9
  source 1..2529: mol_type = other DNA
atgcaccatcatcatcatcatggcggtagcggcatgttaccgttgttcgaacctaaaggtcgcgtgcttctggttgatggccatcatctcgcgtatcgtaacttctttgccctgaaaggattaaccaccagccgtggcgagccggtacagggtgtctacggctttgcaaagtcgctcctgaaagctctgaaagaagacggtgatgtggtgattgttgtctttgatgcgaaagcgccaagttttcgccacgaagcgtacgaagcttacaaagccgggcgtgctccaacgccggaagactttcctcgccaattggcgcttatgaaggaattagtggatttgcttggcctcgaacgcttggaagttcccggtttcgaggcagacgacgtattagcgactctcgcaaagaaagccgaacgtgagggctatgaagtccagatcttgacagcagatcgcgatcttttccagcttttatctccgcgcatctcggtgttacacccggaagggcatctgatcaccccggaatggctctgggagaaatatggtttgcgtcccgaacaatgggtggattttcgcgccttagtcggcgatccgagcgacaatattccgggagttaaaggtatcggcgagaagacggcgctcaagctccttaaagaatgggggtcgttggagaacttgcttaagaatttagatcaggtcaaaccagagtcagtgcgtgagaagattcttgcacacctcgaagacctcaaattaagccgcgaattgtcccgtgtacgcaccgatttgccgctcgaagttgatttccgtggccgccgcgaacctgactgggagggtcttaaagcgtttttagagcgtcttgaatttggttcgctcttgcatgaattcggccttttagaaagcccgttaccagccgaagaagcaccttggccaccgcccgaaggcgcgtttttaggttaccgtttgagtcgcccggaaccgatgtgggccgaattattggctcttgcagcgtctgcccagggacgtgtgtatcgcgcggaagaccctcatggtgcgctccgcggcctcaaagaagtccgtggactccttgccaaagacttagctgttgttgcattgcgcgaaggtcttgatttacctccgactgatgatccaatgcttcttgcgtacctcttggacccgtcaaacacgacgcccgaaggcgtagcccgtcgttacggcggcgagtggaccgaagatgcaggcgagcgcgcgttattggccgaacgtttgcacgcaaatttattaggacgtttgcaaggcgaggaacgtctcctctggctttacgaagaagtggagaaaccattgagtcgcgtgctccaccatatggaagctaccggtgtcaaattagacgtggcgtatttggaggcactcagccttgaagttgctgccgaaatgcgccgcttggaggaagaagtattccgtttagcaggccactcctttaaccttaattctcgcgatcagttagaacgtgtgttgttcgatgaacttggtctccctcctatcggcaagacagagaagaccggtaaacgtagcacttcagcggcggttttagaagctcttcgcgaagtccatcccattgtggacaagatcttgcagtaccgcgaactcgcgaaattgaaaggcacctatattgaccgtcttccggcattagtccacccgaaaacgggacgcctccatacccgcttcaaccaaacagccacggcgaccggtcgtttgtcctcctctgatccaaaccttcagaatattccagtacgtaccccattgggccagaagatccgccgcgcgtttgtagctgaggagggttggcgtttagtggccctcgattatagccaaattgaattacgtgtccttgcccatctttctggcgatgagaacctcatccgcgtgtttcaggaaggcaaagacattcacactcaaacggcaagctggatgtttggactgccgtcggaagcgatcgatcctttgatgcgtcgtgcagcgaagaccatcaatttcggtgttctctacggtatgagtgcccatcgtttgtcgcaggaattaggcattccctatgaagaagctgcggcgttcattcagcgctactttcaaagctatcccaaagttaaagcatggatcgagaagactctcgaagaaggccgcacacgtggttacgtagagaccttatttggacgtcgccgctatgttcccgatttaaacgctcgcgtgaaatctgtccgtgaagccgccgaacgcatggcgttcaacatgcctgtacagggcacggcagctgacctcatgaaacttgcaatggtgcgcctttttccacaattgcgtgaagttggtgcccgcatgctcttgcaggtccacgatgaactcttgttagaagcgccaaaagagcgtgcggaagaggtggcagccctcgcgaaagaggttatggaaggcgtgtggcccttagcggtgcctcttgaagtcgaagttggtattggcgaggattggttggctgccaaaggataatga

SEQ ID NO: 1132 - protein, 841 aa, synthetic construct
  REGION 1..841: note = Variant of DNA polymerase I from Thermus sp. strain 2.9
MHHHHHHGGSGMLPLFEPKGRVLLVDGHHLAYRNFFALKGLTTSRGEPVQGVYGFAKSLLKALKEDGDVVIVVFDAKAPSFRHEAYEAYKAGRAPTPEDFPRQLALMKELVDLLGLERLEVPGFEADDVLATLAKKAEREGYEVQILTADRDLFQLLSPRISVLHPEGHLITPEWLWEKYGLRPEQWVDFRALVGDPSDNIPGVKGIGEKTALKLLKEWGSLENLLKNLDQVKPESVREKILAHLEDLKLSRELSRVRTDLPLEVDFRGRREPDWEGLKAFLERLEFGSLLHEFGLLESPLPAEEAPWPPPEGAFLGYRLSRPEPMWAELLALAASAQGRVYRAEDPHGALRGLKEVRGLLAKDLAVVALREGLDLPPTDDPMLLAYLLDPSNTTPEGVARRYGGEWTEDAGERALLAERLHANLLGRLQGEERLLWLYEEVEKPLSRVLHHMEATGVKLDVAYLEALSLEVAAEMRRLEEEVFRLAGHSFNLNSRDQLERVLFDELGLPPIGKTEKTGKRSTSAAVLEALREVHPIVDKILQYRELAKLKGTYIDRLPALVHPKTGRLHTRFNQTATATGRLSSSDPNLQNIPVRTPLGQKIRRAFVAEEGWRLVALDYSQIELRVLAHLSGDENLIRVFQEGKDIHTQTASWMFGLPSEAIDPLMRRAAKTINFGVLYGMSAHRLSQELGIPYEEAAAFIQRYFQSYPKVKAWIEKTLEEGRTRGYVETLFGRRRYVPDLNARVKSVREAAERMAFNMPVQGTAADLMKLAMVRLFPQLREVGARMLLQVHDELLLEAPKERAEEVAALAKEVMEGVWPLAVPLEVEVGIGEDWLAAKG

SEQ ID NO: 1133 - DNA, 2529 bp, synthetic construct
  misc_feature 1..2529: note = Variant of DNA polymerase I from Thermus sp. strain 2.9
  source 1..2529: mol_type = other DNA
atgcaccatcatcatcatcatggcggtagcggcatgttaccgttgttcgaacctaaaggtcgcgtgcttctggttgatggccatcatctcgcgtatcgtaacttctttgccctgaaaggattaaccaccagccgtggcgagccggtacagggtgtctacggctttgcaaagtcgctcctgaaagctctgaaagaagacggtgatgtggtgattgttgtctttgatgcgaaagcgccaagttttcgccacgaagcgtacgaagcttacaaagccgggcgtgctccaacgccggaagactttcctcgccaattggcgcttatgaaggaattagtggatttgcttggcctcgaacgcttggaagttcccggtttcgaggcagacgacgtattagcgactctcgcaaagaaagccgaacgtgagggctatgaagtccagatcttgacagcagatcgcgatcttttccagcttttatctccgcgcatctcggtgttacacccggaagggcatcgtatcaccccggaatggctctgggagaaatatggtttgcgtcccgaacaatgggtggattttcgcgccttagcaggcgatccgagcgacaatattccgggagttaaaggtatcggcgagaagacggcgctcaagctccttaaagaatgggggtcgttggagaacttgcttaagaatttagatcaggtcaaaccagagtcagtgcgtgagaagattcttgcacacctcgaagacctcaaattaagcctggaattgtcccgtgtacgcaccgatttgccgctcgaagttgatttccgtggccgccgcgaacctgactgggagggtcttaaagcgtttttagagcgtcttgaatttggttcgctcttgcatgaattcggccttttagaaagcccgttaccagccgaagaagcaccttggccaccgcccgaaggcgcgtttttaggttaccgtttgagtcgcccggaaccgatgtgggccgaattactggctcttgcagcgtctgcccaggagcgtgtgtatcgcgcggaagaccctcatggtgcgctcaagggcctcaaagaagtccgtggactccttgccaaagacttagctgttgttgcattgcgcgaaggtcttgatttacctccgactgatgatccaatgcttcttgcgtacctcttggacccgtcaaacacgacgcccgaaggcgtagcccgtcgttacggcggcgagtggaccgaagatgcaggcgagcgcgcgttattggccgaacgtttgcacgccaatttattaggacgtttgcaaggcgaggaacgtctcctctggctttacgaagaagtggagaaaccattgagtcgcgtgctcgcgcatatggaagctaccggtgtcaaattagacgtggcgtatttggaggcactcagccttgaagttgctgccgaaatgcgccgcttggaggaagaagtattccgtttagcaggccactcctttaaccttaattctcgcgatcagttagaacgtgtgttgttcgatgaacttggtctccctcctatcggcaagacagagaagaccggtaaacgtagcacttcagcggcggttttagaagctcttcgcgaagtccatcccattgtggacaagatcttgcagtaccgcgaactcgcgaaattgaaaggcacctatattgaccctcttccggcattagtccacccgaaaacgggacgcctccatacccgcttcaaccaaacagccacggcgaccggtcgtttgtcctcctctgatccaaaccttcagaatattccagtacgtaccccattgggccagaagatccgccgcgcgtttgtagctgaggagggttggcgtttagtggccctcgattatagccaaattgaattacgtgtccttgcccatctttctggcgatgagaacctcatccgcgtgtttcaggaaggcaaagacattcacactcaaacggcaagctggatgtttggattatcagctgaagcgatcgatcctttgatgcgtcgtgcagcgaagaccgttaatttcggtgttctctacggtatgagtgcccatcgtttgtcgcaggaattaggcattccctatgaagaagctgccgcgttcattcagaagtactttcaaagctatcccaaagttaaagcatggatcgagaagactctcgaagaaggccgcacacgtggttacgtagagaccttatttggacgtcgccgctatgttcccgatttaaacgctcgcgtgaaatctgtccgtgaagccgccgaacgcatggcgttcaacatgcctgtacagggcacggcagctgacctcatgaaacttgcaatggtgcgcctttttccacaattgcgtgaagttggtgcccgcatgctcttgcaggtccacgatgaactcttgttagaagcgccaaaagagcgtgcggaagaggtggcagccctcgcgaaagaggttatggaaggcgtgtggcccttagcggtgcctcttgaagtcgaagttggtattggcgaggattggttggctgccaaaggataatga

SEQ ID NO: 1134 - protein, 841 aa, synthetic construct
  REGION 1..841: note = Variant of DNA polymerase I from Thermus sp. strain 2.9
MHHHHHHGGSGMLPLFEPKGRVLLVDGHHLAYRNFFALKGLTTSRGEPVQGVYGFAKSLLKALKEDGDVVIVVFDAKAPSFRHEAYEAYKAGRAPTPEDFPRQLALMKELVDLLGLERLEVPGFEADDVLATLAKKAEREGYEVQILTADRDLFQLLSPRISVLHPEGHRITPEWLWEKYGLRPEQWVDFRALAGDPSDNIPGVKGIGEKTALKLLKEWGSLENLLKNLDQVKPESVREKILAHLEDLKLSLELSRVRTDLPLEVDFRGRREPDWEGLKAFLERLEFGSLLHEFGLLESPLPAEEAPWPPPEGAFLGYRLSRPEPMWAELLALAASAQERVYRAEDPHGALKGLKEVRGLLAKDLAVVALREGLDLPPTDDPMLLAYLLDPSNTTPEGVARRYGGEWTEDAGERALLAERLHANLLGRLQGEERLLWLYEEVEKPLSRVLAHMEATGVKLDVAYLEALSLEVAAEMRRLEEEVFRLAGHSFNLNSRDQLERVLFDELGLPPIGKTEKTGKRSTSAAVLEALREVHPIVDKILQYRELAKLKGTYIDPLPALVHPKTGRLHTRFNQTATATGRLSSSDPNLQNIPVRTPLGQKIRRAFVAEEGWRLVALDYSQIELRVLAHLSGDENLIRVFQEGKDIHTQTASWMFGLSAEAIDPLMRRAAKTVNFGVLYGMSAHRLSQELGIPYEEAAAFIQKYFQSYPKVKAWIEKTLEEGRTRGYVETLFGRRRYVPDLNARVKSVREAAERMAFNMPVQGTAADLMKLAMVRLFPQLREVGARMLLQVHDELLLEAPKERAEEVAALAKEVMEGVWPLAVPLEVEVGIGEDWLAAKG

SEQ ID NO: 1135 - DNA, 2529 bp, synthetic construct
  misc_feature 1..2529: note = Variant of DNA polymerase I from Thermus sp. strain 2.9
  source 1..2529: mol_type = other DNA
atgcaccatcatcatcatcatggcggtagcggcatgttaccgttgttcgaacctaaaggtcgcgtgcttctggttgatggccatcatctcgcgtatcgtaacttctttgccctgaaaggattaaccaccagccgtggcgagccggtacagggtgtctacggctttgcaaagtcgctcctgaaagctctgaaagaagacggtgatgtggtgattgttgtctttgatgcgaaagcgccaagttttcgccacgaagcgtacgaagcttacaaagccgggcgtgctccaacgccggaagactttcctcgccaattggcgcttatgaaggaattagtggatttgcttggcctcgaacgcttggaagttcccggtttcgaggcagacgacgtattagcgactctcgcaaagaaagccgaacgtgagggctatgaagtccagatcttgacagcagatcgcgatcttttccagcttttatctccgcgcatctcggtgttacacccggaagggcatcgtatcaccccggaatggctctgggagaaatatggtttgcgtcccgaacaatgggtggattttcgcgccttagcaggcgatccgagcgacaatattccgggagttaaaggtatcggcgagaagacggcgctcaagctccttaaagaatgggggtcgttggagaacttgcttaagaatttagatcaggtcaaaccagagtcagtgcgtgagaagattcttgcacacctcgaagacctcaaattaagccgcgaattgtcccgtgtacgcaccgatttgccgctcgaagttgatttccgtggccgccgcgaacctgactgggagggtcttaaagcgtttttagagcgtcttgaatttggttcgctcttgcatgaattcggccttttagaaagcccgttaccagccgaagaagcaccttggccaccgcccgaaggcgcgtttttaggttaccgtttgagtcgcccggaaccgatgtgggccgaattattggctcttgcagcgtctgcccagggacgtgtgtatcgcgcggaagaccctcatggtgcgctccgcggcctcaaagaagtccgtggactccttgccaaagacttagctgttgttgcattgcgcgaaggtcttgatttacctccgactgatgatccaatgcttcttgcgtacctcttggacccgtcaaacacgacgcccgaaggcgtagcccgtcgttacggcggcgagtggaccgaagatgcaggcgagcgcgcgttattggccgaacgtttgcacgccaatttattaggacgtttgcaaggcgaggaacgtctcctctggctttacgaagaagtggagaaaccattgagtcgcgtgctcgcgcatatggaagctaccggtgtcaaattagacgtggcgtatttggaggcactcagccttgaagttgctgccgaaatgcgccgcttggaggaagaagtattccgtttagcaggccactcctttaaccttaattctcgcgatcagttagaacgtgtgttgttcgatgaacttggtctccctcctatcggcaagacagagaagaccggtaaacgtagcacttcagcggcggttttagaagctcttcgcgaagtccatcccattgtggacaagatcttgcagtaccgcgaactcgcgaaattgaaaggcacctatattgaccctcttccggcattagtccacccgaaaacgggacgcctccatacccgcttcaaccaaacagccacggcgaccggtcgtttgtcctcctctgatccaaaccttcagaatattccagtacgtaccaagttgggccagaagatccgccgcgcgtttgtagctgaggagggttggcgtttagtggccctcgattatagccaaattgaattacgtgtccttgcccatctttctggcgatgagaacctcatccgcgtgtttcaggaaggcaaagacattcacactcaaacggcaagctggatgtttggattatcagctgaagcgatcgatcctttgatgcgtcgtgcagcgaagaccatcaatttcggtgttctctacggtatgagtgcccatcgtttgtcgcaggaattaggcattccctatgaagaagctgcggcgttcattcagcgctactttcaaagctatcccaaagttaaagcatggatcgagaagactctcgaagaaggccgcacacgtggttacgtagagaccttatttggacgtcgccgctatgttcccgatttaaacgctcgcgtgaaatctgtccgtgaagccgccgaacgcatggcgttcaacatgcctgtacagggcacggcagctgacctcatgaaacttgcaatggtgcgcctttttccacaattgcgtgaagttggtgcccgcatgctcttgcaggtccacgatgaactcttgttagaagcgccaaaagagcgtgcggaagaggtggcagccctcgcgaaagaggttatggaaggcgtgtggcccttagcggtgcctcttgaagtcgaagttggtattggcgaggattggttggctgccaaaggataatga

SEQ ID NO: 1136 - protein, 841 aa, synthetic construct
  REGION 1..841: note = Variant of DNA polymerase I from Thermus sp. strain 2.9
MHHHHHHGGSGMLPLFEPKGRVLLVDGHHLAYRNFFALKGLTTSRGEPVQGVYGFAKSLLKALKEDGDVVIVVFDAKAPSFRHEAYEAYKAGRAPTPEDFPRQLALMKELVDLLGLERLEVPGFEADDVLATLAKKAEREGYEVQILTADRDLFQLLSPRISVLHPEGHRITPEWLWEKYGLRPEQWVDFRALAGDPSDNIPGVKGIGEKTALKLLKEWGSLENLLKNLDQVKPESVREKILAHLEDLKLSRELSRVRTDLPLEVDFRGRREPDWEGLKAFLERLEFGSLLHEFGLLESPLPAEEAPWPPPEGAFLGYRLSRPEPMWAELLALAASAQGRVYRAEDPHGALRGLKEVRGLLAKDLAVVALREGLDLPPTDDPMLLAYLLDPSNTTPEGVARRYGGEWTEDAGERALLAERLHANLLGRLQGEERLLWLYEEVEKPLSRVLAHMEATGVKLDVAYLEALSLEVAAEMRRLEEEVFRLAGHSFNLNSRDQLERVLFDELGLPPIGKTEKTGKRSTSAAVLEALREVHPIVDKILQYRELAKLKGTYIDPLPALVHPKTGRLHTRFNQTATATGRLSSSDPNLQNIPVRTKLGQKIRRAFVAEEGWRLVALDYSQIELRVLAHLSGDENLIRVFQEGKDIHTQTASWMFGLSAEAIDPLMRRAAKTINFGVLYGMSAHRLSQELGIPYEEAAAFIQRYFQSYPKVKAWIEKTLEEGRTRGYVETLFGRRRYVPDLNARVKSVREAAERMAFNMPVQGTAADLMKLAMVRLFPQLREVGARMLLQVHDELLLEAPKERAEEVAALAKEVMEGVWPLAVPLEVEVGIGEDWLAAKG

SEQ ID NO: 1137 - DNA, 2529 bp, synthetic construct
  misc_feature 1..2529: note = Variant of DNA polymerase I from Thermus sp. strain 2.9
  source 1..2529: mol_type = other DNA
atgcaccatcatcatcatcatggcggtagcggcatgttaccgttgttcgaacctaaaggtcgcgtgcttctggttgatggccatcatctcgcgtatcgtaacttctttgccctgaaaggattaaccaccagccgtggcgagccggtacagggtgtctacggctttgcaaagtcgctcctgaaagctctgaaagaagacggtgatgtggtgattgttgtctttgatgcgaaagcgccaagttttcgccacgaagcgtacgaagcttacaaagccgggcgtgctccaacgccggaagactttcctcgccaattggcgcttatgaaggaattagtggatttgcttggcctcgaacgcttggaagttcccggtttcgaggcagacgacgtattagcgactctcgcaaagaaagccgaacgtgagggctatgaagtccagatcttgacagcagatcgcgatcttttccagcttttatctccgcgcatctcggtgttacacccggaagggcatcgtatcaccccggaatggctctgggagaaatatggtttgcgtcccgaacaatgggtggattttcgcgccttagcaggcgatccgagcgacaatattccgggagttaaaggtatcggcgagaagacggcgctcaagctccttaaagaatgggggtcgttggagaacttgcttaagaatttagatcaggtcaaaccagagtcagtgcgtgagaagattcttgcacacctcgaagacctcaaattaagccgcgaattgtcccgtgtacgcaccgatttgccgctcgaagttgatttccgtcgtcgccgcgaacctgactgggagggtcttaaagcgtttttagagcgtcttgaatttggttcgctcttgcatgaattcggccttttagaaagcccgttaccagccgaagaagcaccttggccaccgcccgaaggcgcgtttttaggttaccgtttgagtcgcccggaaccgatgtgggccgaattactggctcttgcagcgtctgcccaggggcgtgtgtatcgcgcggaagaccctcatggtgcgctcaagggcctcaaagaagtccgtggactccttgccaaagacttagctgttgttgcattgcgcgaaggtcttgatttacctccgactgatgatccaatgcttcttgcgtacctcttggacccgtcaaacacgacgcccgaaggcgtagcccgtcgttacggcggcgagtggaccgaagatgcaggtgagcgcgcgttattggccgaacgtttgcacgccaatttattaggacgtttgcaaggcgaggaacgtctcctctggctttacgaagaagtggagaaaccattgagtcgcgtgctcgcgcatatggaagctaccggtgtcaaattagacgtggcgtatttggagaacctcagccttgaagttgctgccgaaatgcgccgcttggaggaagaagtattccgtttagcaggccactcctttaaccttaattctcgcgatcagttagaacgtgtgttgttcgataaccttggtctccctcctatcggcaagacagagaagaccggtaaacgtagcacttcagcggcggttttagaagctcttcgcgaagtccatcccattgtggacaagatcttgcagtaccgcgaactcgcgaaattgaaaggcacctatattgaccctcttccggcattagtccacccgaaaacgggacgcctccatacccgcttcaaccaaacagccacggcgaccggtcgtttgtcctcctctgatccaaaccttcagaatattccagtacgtaccccattgggccagaagatccgccgcgcgtttgtagctgaggagggttggcgtttagtggccctcgattatagccaaattgaattacgtgtccttgcccatctttctggcgatgagaacctcatccgcgtgtttcaggaaggcaaagacattcacactcaaacggcaagctggatgtttggattatcagctgaagcgatcgatcctttgatgcgtcgtgcagcgaagaccgttaatttcggtgttctctacggtatgagtgcccatcgtttgtcgcaggaattaggcattccctatgaagaagctgcggcgttcattcagcgctactttcaaagctatcccaaagttaaagcatggatcgagaagactctcgaagaaggccgcacacgtggttacgtagagaccttatttggacgtcgccgctatgttcccgatttaaacgctcgcgtgaaatctgtccgtgaagccgccgaacgcatggcgttcaacatgcctgtacagggcacggcagctgacctcatgaaacttgcaatggtgcgcctttttccacaattgcgtgaagttggtgcccgcatgctcttgcaggtccacgatgaactcttgttagaagcgccaaaagagcgtgcggaagaggtggcagccctcgcgaaagaggttatggaaggcgtgtggcccttagcggtgcctcttgaagtcgaagttggtattggcgaggattggttggctgccaaaggataatga

SEQ ID NO: 1138 - protein, 841 aa, synthetic construct
  REGION 1..841: note = Variant of DNA polymerase I from Thermus sp. strain 2.9
MHHHHHHGGSGMLPLFEPKGRVLLVDGHHLAYRNFFALKGLTTSRGEPVQGVYGFAKSLLKALKEDGDVVIVVFDAKAPSFRHEAYEAYKAGRAPTPEDFPRQLALMKELVDLLGLERLEVPGFEADDVLATLAKKAEREGYEVQILTADRDLFQLLSPRISVLHPEGHRITPEWLWEKYGLRPEQWVDFRALAGDPSDNIPGVKGIGEKTALKLLKEWGSLENLLKNLDQVKPESVREKILAHLEDLKLSRELSRVRTDLPLEVDFRRRREPDWEGLKAFLERLEFGSLLHEFGLLESPLPAEEAPWPPPEGAFLGYRLSRPEPMWAELLALAASAQGRVYRAEDPHGALKGLKEVRGLLAKDLAVVALREGLDLPPTDDPMLLAYLLDPSNTTPEGVARRYGGEWTEDAGERALLAERLHANLLGRLQGEERLLWLYEEVEKPLSRVLAHMEATGVKLDVAYLENLSLEVAAEMRRLEEEVFRLAGHSFNLNSRDQLERVLFDNLGLPPIGKTEKTGKRSTSAAVLEALREVHPIVDKILQYRELAKLKGTYIDPLPALVHPKTGRLHTRFNQTATATGRLSSSDPNLQNIPVRTPLGQKIRRAFVAEEGWRLVALDYSQIELRVLAHLSGDENLIRVFQEGKDIHTQTASWMFGLSAEAIDPLMRRAAKTVNFGVLYGMSAHRLSQELGIPYEEAAAFIQRYFQSYPKVKAWIEKTLEEGRTRGYVETLFGRRRYVPDLNARVKSVREAAERMAFNMPVQGTAADLMKLAMVRLFPQLREVGARMLLQVHDELLLEAPKERAEEVAALAKEVMEGVWPLAVPLEVEVGIGEDWLAAKG

SEQ ID NO: 1139 - DNA, 2529 bp, synthetic construct
  misc_feature 1..2529: note = Variant of DNA polymerase I from Thermus sp. strain 2.9
  source 1..2529: mol_type = other DNA
atgcaccatcatcatcatcatggcggtagcggcatgttaccgttgttcgaacctaaaggtcgcgtgcttctggttgatggccatcatctcgcgtatcgtaacttctttgccctgaaaggattaaccaccagccgtggcgagccggtacagggtgtctacggctttgcaaagtcgctcctgaaagctctgaaagaagacggtgatgtggtgattgttgtctttgatgcgaaagcgccaagttttcgccacgaagcgtacgaagcttacaaagccgggcgtgctccaacgccggaagactttcctcgccaattggcgcttatgaaggaattagtggatttgcttggcctcgaacgcttggaagttcccggtttcgaggcagacgacgtattagcgactctcgcaaagaaagccgaacgtgagggctatgaagtccagatcttgacagcagatcgcgatcttttccagcttttatctccgcgcatctcggtgttacacccggaagggcatcgtatcaccccggaatggctctgggagaaatatggtttgcgtcccgaacaatgggtggattttcgcgccttagcaggcgatccgagcgacaatattccgggagttaaaggtatcggcgagaagacggcgctcaagctccttaaagaatgggggtcgttggagaacttgcttaagaatttagatcaggtcaaaccagagtcagtgcgtgagaagattcttgcacacctcgaagacctcaaattaagcctggaattgtcccgtgtacacaccgatttgccgctcgaagttgatttccgtggtcgccgcgaacctgactgggagggtcttaaagcgtttttagagcgtcttgaatttggttcgctcttgcatgaattcggccttttagaaagcccgttaccagccgaagaagcaccttggccaccgcccgaaggcgcgtttttaggttaccgtttgagtcgcccggaaccgatgtgggccgaattatcggctcttgcagcgtctgcccagggacgtgtgtatcgcgcggaagaccctcatggtgcgctcaagggcctcaaagaagtccgtggactccttgccaaagacttagctgttgttgcattgcgcgaaggtcttgatttacctccgactgatgatccaatgcttcttgcgtacctcttggacccgtcaaacacgacgcccgaaggcgtagcccgtcgttacggcggcgagtggaccgaagatgcaggcgagcgcgcgttattggccgaacgtttgcacgccaatttattaggacgtttgcaaggcgaggaacgtctcctctggctttacgaagaagtggagaaaccattgagtcgcgtgctcgcgcatatggaagctaccggtgtcaaattagacgtggcgtatttggagaacctcagccttgaagttgctgccgaaatgcgccgcttggaggaagaagtattccgtttagcaggccactcctttaaccttaattctcgcgatcagttagaacgtgtgttgttcgataaccttggtctccctcctatcggcaagacagagaagaccggtaaacgtagcacttcagcggcggttttagaagctcttcgcgaagtccatcccattgtggacaagatcttgcagtaccgcgaactcgcgaaattgaaaggcacctatattgaccctcttccggcattagtccacccgaaaacgggacgcctccatacccgcttcaaccaaacagccacggcgaccggtcgtttgtcctcctctgatccaaaccttcagaatattccagtacgtaccccattgggccagaagatccgccgcgcgtttgtagctgaggagggttggcgtttagtggccctcgattatagccaaattgaattacgtgtccttgcccatctttctggcgatgagaacctcatccgcgtgtttcaggaaggcaaagacattcacactcaaacggcaagctggatgtttggattatcagcagaagcgatcgatcctttgatgcgtcgtgcagcgaagaccgttaatttcggtgttctctacggtatgagtgcccatcgtttgtcgcaggaattaggcattccctatgaagaagctgcggcgttcattcagcgctactttcaaagctatcccaaagttaaagcatggatcgagaagactctcgaagaaggccgcacacgtggttacgtagagaccttatttggacgtcgccgctatgttcccgatttaaacgctcgcgtgaaatctgtccgtgaagccgccgaacgcatggcgttcaacatgcctgtacagggcacggcagctgacctcatgaaacttgcaatggtgcgcctttttccacaattgcgtgaagttggtgcccgcatgctcttgcaggtccacgatgaactcttgttagaagcgccaaaagagcgtgcggaagaggtggcagccctcgcgaaagaggttatggaaggcgtgtggcccttagcggtgcctcttgaagtcgaagttggtattggcgaggattggttggctgccaaaggataatga

SEQ ID NO: 1140 - protein, 841 aa, synthetic construct
  REGION 1..841: note = Variant of DNA polymerase I from Thermus sp. strain 2.9
MHHHHHHGGSGMLPLFEPKGRVLLVDGHHLAYRNFFALKGLTTSRGEPVQGVYGFAKSLLKALKEDGDVVIVVFDAKAPSFRHEAYEAYKAGRAPTPEDFPRQLALMKELVDLLGLERLEVPGFEADDVLATLAKKAEREGYEVQILTADRDLFQLLSPRISVLHPEGHRITPEWLWEKYGLRPEQWVDFRALAGDPSDNIPGVKGIGEKTALKLLKEWGSLENLLKNLDQVKPESVREKILAHLEDLKLSLELSRVHTDLPLEVDFRGRREPDWEGLKAFLERLEFGSLLHEFGLLESPLPAEEAPWPPPEGAFLGYRLSRPEPMWAELSALAASAQGRVYRAEDPHGALKGLKEVRGLLAKDLAVVALREGLDLPPTDDPMLLAYLLDPSNTTPEGVARRYGGEWTEDAGERALLAERLHANLLGRLQGEERLLWLYEEVEKPLSRVLAHMEATGVKLDVAYLENLSLEVAAEMRRLEEEVFRLAGHSFNLNSRDQLERVLFDNLGLPPIGKTEKTGKRSTSAAVLEALREVHPIVDKILQYRELAKLKGTYIDPLPALVHPKTGRLHTRFNQTATATGRLSSSDPNLQNIPVRTPLGQKIRRAFVAEEGWRLVALDYSQIELRVLAHLSGDENLIRVFQEGKDIHTQTASWMFGLSAEAIDPLMRRAAKTVNFGVLYGMSAHRLSQELGIPYEEAAAFIQRYFQSYPKVKAWIEKTLEEGRTRGYVETLFGRRRYVPDLNARVKSVREAAERMAFNMPVQGTAADLMKLAMVRLFPQLREVGARMLLQVHDELLLEAPKERAEEVAALAKEVMEGVWPLAVPLEVEVGIGEDWLAAKG

SEQ ID NO: 1141 - DNA, 2529 bp, synthetic construct
  misc_feature 1..2529: note = Variant of DNA polymerase I from Thermus sp. strain 2.9
  source 1..2529: mol_type = other DNA
atgcaccatcatcatcatcatggcggtagcggcatgttaccgttgttcgaacctaaaggtcgcgtgcttctggttgatggccatcatctcgcgtatcgtaacttctttgccctgaaaggattaaccaccagccgtggcgagccggtacagggtgtctacggctttgcaaagtcgctcctgaaagctctgaaagaagacggtgatgtggtgattgttgtctttgatgcgaaagcgccaagttttcgccacgaagcgtacgaagcttacaaagccgggcgtgctccaacgccggaagactttcctcgccaattggcgcttatgaaggaattagtggatttgcttggcctcgaacgcttggaagttcccggtttcgaggcagacgacgtattagcgactctcgcaaagaaagccgaacgtgagggctatgaagtccagatcttgacagcagatcgcgatcttttccagcttttatctccgcgcatctcggtgttacacccggaagggcatcgtatcaccccggaatggctctgggagaaatatggtttgcgtcccgaacaatgggtggattttcgcgccttagcaggcgatccgagcgacaatattccgggagttaaaggtatcggcgagaagacggcgctcaagctccttaaagaatgggggtcgttggagaacttgcttaagaatttagatcaggtcaaaccagagtcagtgcgtgagaagattcttgcacacctcgaagacctcaaattaagccgcgaattgtcccgtgtacgcaccgatttgccgctcgaagttgatttccgtcgtcgccgcgaacctgactgggagggtcttaaagcgtttttagagcgtcttgaatttggttcgctcttgcatgaattcggccttttagaaagcccgttaccagccgaagaagcaccttggccaccgcccgaaggcgcgtttttaggttaccgtttgagtcgcccggaaccgatgtgggccgaattatcggctcttgcagcgtctgcccaggggcgtgtgtatcgcgcggaagaccctcatggtgcgctcaagggcctcaaagaagtccgtggactccttgccaaagacttagctgttgttgcattgcgcgaaggtcttgatttacctccgactgatgatccaatgcttcttgcgtacctcttggacccgtcaaacacgacgcccgaaggcgtagcccgtcgttacggcggcgagtggaccgaagatgcaggcgagcgcgcgttattggccgaacgtttgcacgccaatttattaggacgtttgcaaggcgaggaacgtctcctctggctttacgaagaagtggagaaaccattgagtcgcgtgctcgcgcatatggaagctaccggtgtcaaattagacgtggcgtatttggagaacctcagccttgaagttgctgccgaaatgcgccgcttggaggaagaagtattccgtttagcaggccactcctttaaccttaattctcgcgatcagttagaacgtgtgttgttcgataaccttggtctccctcctatcggcaagacagagaagaccggtaaacgtagcacttcagcggcggttttagaagctcttcgcgaagtccatcccattgtggacaagatcttgcagtaccgcgaactcgcgaaattgaaaggcacctatattgaccctcttccggcattagtccacccgaaaacgggacgcctccatacccgcttcaaccaaacagccacggcgaccggtcgtttgtcctcctctgatccaaaccttcagaatattccagtacgtaccccattgggccagaagatccgccgcgcgtttgtagctgaggagggttggcgtttagtggccctcgattatagccaaattgaattacgtgtccttgcccatctttctggcgatgagaacctcatccgcgtgtttcaggaaggcaaagacattcacactcaaacggcaagctggatgtttggattatcagcagaagcgatcgatcctttgatgcgtcgtgcagcgaagaccattaatttcggtgttctctacggtatgagtgcccatcgtttgtcgcaggaattaggcattccctatgaagaagctgtcgcgttcattcagcgctactttcaaagctatcccaaagttaaagcatggatcgagaagactctcgaagaaggccgcacacgtggttacgtagagaccttatttggacgtcgccgctatgttcccgatttaaacgctcgcgtgaaatctgtccgtgaagccgccgaacgcatggcgttcaacatgcctgtacagggcacggcagctgacctcatgaaacttgcaatggtgcgcctttttccacaattgcgtgaagttggtgcccgcatgctcttgcaggtccacgatgaactcttgttagaagcgccaaaagagcgtgcggaagaggtggcagccctcgcgaaagaggttatggaaggcgtgtggcccttagcggtgcctcttgaagtcgaagttggtattggcgaggattggttggctgccaaaggataatga

SEQ ID NO: 1142 - protein, 841 aa, synthetic construct
  REGION 1..841: note = Variant of DNA polymerase I from Thermus sp. strain 2.9
MHHHHHHGGSGMLPLFEPKGRVLLVDGHHLAYRNFFALKGLTTSRGEPVQGVYGFAKSLLKALKEDGDVVIVVFDAKAPSFRHEAYEAYKAGRAPTPEDFPRQLALMKELVDLLGLERLEVPGFEADDVLATLAKKAEREGYEVQILTADRDLFQLLSPRISVLHPEGHRITPEWLWEKYGLRPEQWVDFRALAGDPSDNIPGVKGIGEKTALKLLKEWGSLENLLKNLDQVKPESVREKILAHLEDLKLSRELSRVRTDLPLEVDFRRRREPDWEGLKAFLERLEFGSLLHEFGLLESPLPAEEAPWPPPEGAFLGYRLSRPEPMWAELSALAASAQGRVYRAEDPHGALKGLKEVRGLLAKDLAVVALREGLDLPPTDDPMLLAYLLDPSNTTPEGVARRYGGEWTEDAGERALLAERLHANLLGRLQGEERLLWLYEEVEKPLSRVLAHMEATGVKLDVAYLENLSLEVAAEMRRLEEEVFRLAGHSFNLNSRDQLERVLFDNLGLPPIGKTEKTGKRSTSAAVLEALREVHPIVDKILQYRELAKLKGTYIDPLPALVHPKTGRLHTRFNQTATATGRLSSSDPNLQNIPVRTPLGQKIRRAFVAEEGWRLVALDYSQIELRVLAHLSGDENLIRVFQEGKDIHTQTASWMFGLSAEAIDPLMRRAAKTINFGVLYGMSAHRLSQELGIPYEEAVAFIQRYFQSYPKVKAWIEKTLEEGRTRGYVETLFGRRRYVPDLNARVKSVREAAERMAFNMPVQGTAADLMKLAMVRLFPQLREVGARMLLQVHDELLLEAPKERAEEVAALAKEVMEGVWPLAVPLEVEVGIGEDWLAAKG

SEQ ID NO: 1143 - DNA, 2529 bp, synthetic construct
  misc_feature 1..2529: note = Variant of DNA polymerase I from Thermus sp. strain 2.9
  source 1..2529: mol_type = other DNA
atgcaccatcatcatcatcatggcggtagcggcatgttaccgttgttcgaacctaaaggtcgcgtgcttctggttgatggccatcatctcgcgtatcgtaacttctttgccctgaaaggattaaccaccagccgtggcgagccggtacagggtgtctacggctttgcaaagtcgctcctgaaagctctgaaagaagacggtgatgtggtgattgttgtctttgatgcgaaagcgccaagttttcgccacgaagcgtacgaagcttacaaagccgggcgtgctccaacgccggaagactttcctcgccaattggcgcttatgaaggaattagtggatttgcttggcctcgaacgcttggaagttcccggtttcgaggcagacgacgtattagcgactctcgcaaagaaagccgaacgtgagggctatgaagtccagatcttgacagcagatcgcgatcttttccagcttttatctccgcgcatctcggtgttacacccggaagggcatcgtatcaccccggaatggctctgggagaaatatggtttgcgtcccgaacaatgggtggattttcgcgccttagcaggcgatccgagcgacaatattccgggagttaaaggtatcggcgagaagacggcgctcaagctccttaaagaatgggggtcgttggagaacttgcttaagaatttagatcaggtcaaaccagagtcagtgcgtgagaagattcttgcacacctcgaagacctcaaattaagccgcgaattgtcccgtgtacgcaccgatttgccgctcgaagttgatttccgtggccgccgcgaacctgactgggagggtcttaaagcgtttttagagcgtcttgaatttggttcgctcttacatgaattcggccttttagaaagcccgttaccagccgaagaagcaccttggccaccgcccgaaggcgcgtttttaggttaccgtttgagtcgcccggaaccgatgtgggccgaattattggctcttgcagcgtctgcccagggacgtgtgtatcgcgcggaagaccctcatggtgcgctccgcggcctcaaagaagtccgtggactccttgccaaagacttagctgttgttgcattgcgcgaaggtcttgatttacctccgactgatgatccaatgcttcttgcgtacctcttggacccgtcaaacacgacgcccgaaggcgtagcccgtcgttacggcggcgagtggaccgaagatgcaggcgagcgcgcgttattggccgaacgtttgcacgccaatttattaggacgtttgcaaggcgaggaacgtctcctctggctttacgaagaagtggagaaaccattgagtcgcgtgctcgcgcatatggaagctaccggtgtcaaattagacgtggcgtatttggaggcactcagccttgaagttgctgccgaaatgcgccgcttggaggaagaagtattccgtttagcaggccactcctttaaccttaattctcgcgatcagttagaacgtgtgttgttcgatgaacttggtctccctcctatcggcaagacagagaagaccggtaaacgtagcacttcagcggcggttttagaagctcttcgcgaagtccatcccattgtggacaagatcttgcagtaccgcgaactcgcgaaattgaaaggcacctatattgaccctcttccggcattagtccacccgtctacgggacgcctccatacccgcttcaaccaaacagccacggcgaccggtcgtttgtcctcctctgatccaaaccttcagaatattccagtacgtaccccattgggccagaagatccgccgcgcgtttgtagctgaggagggttggcgtttagtggccctcgattatagccaaattgaattacgtgtccttgcccatctttctggcgatgagaacctcatccgcgtgtttcaggaaggcaaagacattcacactcaaacggcaagctggatgtttggattatcagctgaagcgatcgatcctttgatgcgtcgtgcagcgaagaccatcaatttcggtgttctctacggtatgagtgcccatcgtttgtcgcaggaattaggcattccctatgaagaagctgcggcgttcattcagcgctactttcaaagctatcccaaagttaaagcatggatcgagaagactctcgaagaaggccgcacacgtggttacgtagagaccttatttggacgtcgccgctatgttcccgatttaaacgctcgcgtgaaatctgtccgtgaagccgccgaacgcatggcgttcaacatgcctgtacagggcacggcagctgacctcatgaaacttgcaatggtgcgcctttttccacaattgcgtgaagttggtgcccgcatgctcttgcaggtccacgatgaactcttgttagaagcgccaaaagagcgtgcggaagaggtggcagccctcgcgaaagaggttatggaaggcgtgtggcccttagcggtgcctcttgaagtcgaagttggtattggcgaggattggttggctgccaaaggataatga

SEQ ID NO: 1144 - protein, 841 aa, synthetic construct
  REGION 1..841: note = Variant of DNA polymerase I from Thermus sp. strain 2.9
MHHHHHHGGSGMLPLFEPKGRVLLVDGHHLAYRNFFALKGLTTSRGEPVQGVYGFAKSLLKALKEDGDVVIVVFDAKAPSFRHEAYEAYKAGRAPTPEDFPRQLALMKELVDLLGLERLEVPGFEADDVLATLAKKAEREGYEVQILTADRDLFQLLSPRISVLHPEGHRITPEWLWEKYGLRPEQWVDFRALAGDPSDNIPGVKGIGEKTALKLLKEWGSLENLLKNLDQVKPESVREKILAHLEDLKLSRELSRVRTDLPLEVDFRGRREPDWEGLKAFLERLEFGSLLHEFGLLESPLPAEEAPWPPPEGAFLGYRLSRPEPMWAELLALAASAQGRVYRAEDPHGALRGLKEVRGLLAKDLAVVALREGLDLPPTDDPMLLAYLLDPSNTTPEGVARRYGGEWTEDAGERALLAERLHANLLGRLQGEERLLWLYEEVEKPLSRVLAHMEATGVKLDVAYLEALSLEVAAEMRRLEEEVFRLAGHSFNLNSRDQLERVLFDELGLPPIGKTEKTGKRSTSAAVLEALREVHPIVDKILQYRELAKLKGTYIDPLPALVHPSTGRLHTRFNQTATATGRLSSSDPNLQNIPVRTPLGQKIRRAFVAEEGWRLVALDYSQIELRVLAHLSGDENLIRVFQEGKDIHTQTASWMFGLSAEAIDPLMRRAAKTINFGVLYGMSAHRLSQELGIPYEEAAAFIQRYFQSYPKVKAWIEKTLEEGRTRGYVETLFGRRRYVPDLNARVKSVREAAERMAFNMPVQGTAADLMKLAMVRLFPQLREVGARMLLQVHDELLLEAPKERAEEVAALAKEVMEGVWPLAVPLEVEVGIGEDWLAAKG

SEQ ID NO: 1145 - DNA, 2529 bp, synthetic construct
  misc_feature 1..2529: note = Variant of DNA polymerase I from Thermus sp. strain 2.9
  source 1..2529: mol_type = other DNA
atgcaccatcatcatcatcatggcggtagcggcatgttaccgttgttcgaacctaaaggtcgcgtgcttctggttgatggccatcatctcgcgtatcgtaacttctttgccctgaaaggattaaccaccagccgtggcgagccggtacagggtgtctacggctttgcaaagtcgctcctgaaagctctgaaagaagacggtgatgtggtgattgttgtctttgatgcgaaagcgccaagttttcgccacgaagcgtacgaagcttacaaagccgggcgtgctccaacgccggaagactttcctcgccaattggcgcttatgaaggaattagtggatttgcttggcctcgaacgcttggaagttcccggtttcgaggcagacgacgtattagcgactctcgcaaagaaagccgaacgtgagggctatgaagtccagatcttgacagcagatcgcgatcttttccagcttttatctccgcgcatctcggtgttacacccggaagggcatcgtatcaccccggaatggctctgggagaaatatggtttgcgtcccgaacaatgggtggattttcgcgccttagcaggcgatccgagcgacaatattccgggagttaaaggtatcggcgagaagacggcgctcaagctccttaaagaatgggggtcgttggagaacttgcttaagaatttagatcaggtcaaaccagagtcagtgcgtgagaagattcttgcacacctcgaagacctcaaattaagcctggaattgtcccgtgtacgcaccgatttgccgctcgaagttgatttccgtggtcgccgcgaacctgactgggagggtcttaaagcgtttttagagcgtcttgaatttggttcgctcttgcatgaattcggccttttagaaagcccgttaccagccgaagaagcaccttggccaccgcccgaaggcgcgtttttaggttaccgtttgagtcgcccggaaccgatgtgggccgaattactggctcttgcagcgtctgcccagggacgtgtgtatcgcgcggaagaccctcatggtgcgctccgcggcctcaaagaagtccgtggactccttgccaaagacttagctgttgttgcattgcgcgaaggtcttgatttacctccgactgatgatccaatgcttcttgcgtacctcttggacccgtcaaacacgacgcccgaaggcgtagcccgtcgttacggcggcgagtggaccgaagatgcaggcgagcgcgcgttattggccgaacgtttgcacgccaatttattaggacgtttgcaaggcgaggaacgtctcctctggctttacgaagaagtggagaaaccattgagtcgcgtgctcgcgcatatggaagctaccggtgtcaaattagacgtggcgtatttggaggctctcagccttgaagttgctgccgaaatgcgccgcttggaggaagaagtattccgtttagcaggccactcctttaaccttaattctcgcgatcagttagaacgtgtgttgttcgatgagcttggtctccctcctatcggcaagacagagaagaccggtaaacgtagcacttcagcggcggttttagaagctcttcgcgaagtccatcccattgtggacaagatcttgcagtaccgcgaactcgcgaaattgaaaggcacctatattgaccctcttccggcattagtccacccgaaaacgggacgcctccatacccgcttcaaccaaacagccacggcgaccggtcgtttgtcctcctctgatccaaaccttcagaatattccagtacgtaccccattgggccagaagatccgccgcgcgtttgtagctgaggagggttggcgtttagtggccctcgattatagccaaattgaattacgtgtccttgcccatctttctggcgatgagaacctcatccgcgtgtttcaggaaggcaaagacattcacactcaaacggcaagctggatgtttggattatcagctgaagcgatcgatcctttgatgcgtcgtgcagcgaagaccgttaatttcggtgttctctacggtatgagtgcccatcgtttgtcgcaggaattaggcattccctatgaagaagctgcggcgttcattcagcgctactttcaaagctatcccaaagttaaagcatggatcgagaagactctcgaagaaggccgcacacgtggttacgtagagaccttatttggacgtcgccgctatgttcccgatttaaacgctcgcgtgaaatctgtccgtgaagccgccgaacgcatggcgttcaacatgcctgtacagggcacggcagctgacctcatgaaacttgcaatggtgcgcctttttccacaattgcgtgaagttggtgcccgcatgctcttgcaggtccacgatgaactcttgttagaagcgccaaaagagcgtgcggaagaggtggcagccctcgcgaaagaggttatggaaggcgtgtggcccttagcggtgcctcttgaagtcgaagttggtattggcgaggattggttggctgccaaaggataatga

SEQ ID NO: 1146 - protein, 841 aa, synthetic construct
  REGION 1..841: note = Variant of DNA polymerase I from Thermus sp. strain 2.9
MHHHHHHGGSGMLPLFEPKGRVLLVDGHHLAYRNFFALKGLTTSRGEPVQGVYGFAKSLLKALKEDGDVVIVVFDAKAPSFRHEAYEAYKAGRAPTPEDFPRQLALMKELVDLLGLERLEVPGFEADDVLATLAKKAEREGYEVQILTADRDLFQLLSPRISVLHPEGHRITPEWLWEKYGLRPEQWVDFRALAGDPSDNIPGVKGIGEKTALKLLKEWGSLENLLKNLDQVKPESVREKILAHLEDLKLSLELSRVRTDLPLEVDFRGRREPDWEGLKAFLERLEFGSLLHEFGLLESPLPAEEAPWPPPEGAFLGYRLSRPEPMWAELLALAASAQGRVYRAEDPHGALRGLKEVRGLLAKDLAVVALREGLDLPPTDDPMLLAYLLDPSNTTPEGVARRYGGEWTEDAGERALLAERLHANLLGRLQGEERLLWLYEEVEKPLSRVLAHMEATGVKLDVAYLEALSLEVAAEMRRLEEEVFRLAGHSFNLNSRDQLERVLFDELGLPPIGKTEKTGKRSTSAAVLEALREVHPIVDKILQYRELAKLKGTYIDPLPALVHPKTGRLHTRFNQTATATGRLSSSDPNLQNIPVRTPLGQKIRRAFVAEEGWRLVALDYSQIELRVLAHLSGDENLIRVFQEGKDIHTQTASWMFGLSAEAIDPLMRRAAKTVNFGVLYGMSAHRLSQELGIPYEEAAAFIQRYFQSYPKVKAWIEKTLEEGRTRGYVETLFGRRRYVPDLNARVKSVREAAERMAFNMPVQGTAADLMKLAMVRLFPQLREVGARMLLQVHDELLLEAPKERAEEVAALAKEVMEGVWPLAVPLEVEVGIGEDWLAAKG

SEQ ID NO: 1147 - DNA, 2529 bp, synthetic construct
  misc_feature 1..2529: note = Variant of DNA polymerase I from Thermus sp. strain 2.9
  source 1..2529: mol_type = other DNA
atgcaccatcatcatcatcatggcggtagcggcatgttaccgttgttcgaacctaaaggtcgcgtgcttctggttgatggccatcatctcgcgtatcgtaacttctttgccctgaaaggattaaccaccagccgtggcgagccggtacagggtgtctacggctttgcaaagtcgctcctgaaagctctgaaagaagacggtgatgtggtgattgttgtctttgatgcgaaagcgccaagttttcgccacgaagcgtacgaagcttacaaagccgggcgtgctccaacgccggaagactttcctcgccaattggcgcttatgaaggaattagtggatttgcttggcctcgaacgcttggaagttcccggtttcgaggcagacgacgtattagcgactctcgcaaagaaagccgaacgtgagggctatgaagtccagatcttgacagcagatcgcgatcttttccagcttttatctccgcgcatctcggtgttacacccggaagggcatcgtatcaccccggaatggctctgggagaaatatggtttgcgtcccgaacaatgggtggattttcgcgccttagcaggcgatccgagcgacaatattccgggagttaaaggtatcggcgagaagacggcgctcaagctccttaaagaatgggggtcgttggagaacttgcttaagaatttagatcaggtcaaaccagagtcagtgcgtgagaagattcttgcacacctcgaagacctcaaattaagccgcgaattgtcccgtgtacgcaccgatttgccgctcgaagttgatttccgtcgtcgccgcgaacctgactgggagggtcttaaagcgtttttagagcgtcttgaatttggttcgctcttgcatgaattcggccttttagaaagcccgttaccagccgaagaagcaccttggccaccgcccgaaggcgcgtttttaggttaccgtttgagtcgcccggaaccgatgtgggccgaattactggctcttgcagcgtctgcccaggggcgtgtgtatcgcgcggaagaccctcatggtgcgctccgcggcctcaaagaagtccgtggactccttgccaaagacttagctgttgttgcattgcgcgaaggtcttgatttacctccgactgatgatccaatgcttcttgcgtacctcttggacccgtcaaacacgacgcccgaaggcgtagcccgtcgttacggcggcgagtggaccgaagatgcaggcgagcgcgcgttattggccgaacgtttgcacgccaatttattaggacgtttgcaaggcgaggaacgtctcctctggctttacgaagaagtggagaaaccattgagtcgcgtgctcgcgcatatggaagctaccggtgtcaaattagacgtggcgtatttggaggcactcagccttgaagttgctgccgaaatgcgccgcttggaggaagaagtattccgtttagcaggccactcctttaaccttaattctcgcgatcagttagaacgtgtgttgttcgatgaacttggtctccctcctatcggcaagacagagaagaccggtaaacgtagcacttcagcggcggttttagaagctcttcgcgaagtccatcccattgtggacaagatcttgcagtaccgcgaactcgcgaaattgaaaggcacctatattgaccctcttccggcattagtccacccgaaaacgggacgcctccatacccgcttcaaccaaacagccacggcgaccggtcgtttgtcctcctctgatccaaaccttcagaatattccagtacgtaccccattgggccagaagatccgccgcgcgtttgtagctgaggagggttggcgtttagtggccctcgattatagccaaattgaattacgtgtccttgcccatctttctggcgatgagaacctcatccgcgtgtttcaggaaggcaaagacattcacactcaaacggcaagctggatgtttggattatcagctgaagcgatcgatcctttgatgcgtcgtgcagcgaagaccattaatttcggtgttctctacggtatgagtgcccatcgtttgtcgcaggaattaggcattccctatgaagaagctgtcgcgttcattcagaagtactttcaaagctatcccaaagttaaagcatggatcgagaagactctcgaagaaggccgcacacgtggttacgtagagaccttatttggacgtcgccgctatgttcccgatttaaacgctcgcgtgaaatctgtccgtgaagccgccgaacgcatggcgttcaacatgcctgtacagggcacggcagctgacctcatgaaacttgcaatggtgcgcctttttccacaattgcgtgaagttggtgcccgcatgctcttgcaggtccacgatgaactcttgttagaagcgccaaaagagcgtgcggaagaggtggcagccctcgcgaaagaggttatggaaggcgtgtggcccttagcggtgcctcttgaagtcgaagttggtattggcgaggattggttggctgccaaaggataatga

SEQ ID NO: 1148 - protein, 841 aa, synthetic construct
  REGION 1..841: note = Variant of DNA polymerase I from Thermus sp. strain 2.9
MHHHHHHGGSGMLPLFEPKGRVLLVDGHHLAYRNFFALKGLTTSRGEPVQGVYGFAKSLLKALKEDGDVVIVVFDAKAPSFRHEAYEAYKAGRAPTPEDFPRQLALMKELVDLLGLERLEVPGFEADDVLATLAKKAEREGYEVQILTADRDLFQLLSPRISVLHPEGHRITPEWLWEKYGLRPEQWVDFRALAGDPSDNIPGVKGIGEKTALKLLKEWGSLENLLKNLDQVKPESVREKILAHLEDLKLSRELSRVRTDLPLEVDFRRRREPDWEGLKAFLERLEFGSLLHEFGLLESPLPAEEAPWPPPEGAFLGYRLSRPEPMWAELLALAASAQGRVYRAEDPHGALRGLKEVRGLLAKDLAVVALREGLDLPPTDDPMLLAYLLDPSNTTPEGVARRYGGEWTEDAGERALLAERLHANLLGRLQGEERLLWLYEEVEKPLSRVLAHMEATGVKLDVAYLEALSLEVAAEMRRLEEEVFRLAGHSFNLNSRDQLERVLFDELGLPPIGKTEKTGKRSTSAAVLEALREVHPIVDKILQYRELAKLKGTYIDPLPALVHPKTGRLHTRFNQTATATGRLSSSDPNLQNIPVRTPLGQKIRRAFVAEEGWRLVALDYSQIELRVLAHLSGDENLIRVFQEGKDIHTQTASWMFGLSAEAIDPLMRRAAKTINFGVLYGMSAHRLSQELGIPYEEAVAFIQKYFQSYPKVKAWIEKTLEEGRTRGYVETLFGRRRYVPDLNARVKSVREAAERMAFNMPVQGTAADLMKLAMVRLFPQLREVGARMLLQVHDELLLEAPKERAEEVAALAKEVMEGVWPLAVPLEVEVGIGEDWLAAKG

SEQ ID NO: 1149 - DNA, 2529 bp, synthetic construct
  misc_feature 1..2529: note = Variant of DNA polymerase I from Thermus sp. strain 2.9
  source 1..2529: mol_type = other DNA
atgcaccatcatcatcatcatggcggtagcggcatgttaccgttgttcgaacctaaaggtcgcgtgcttctggttgatggccatcatctcgcgtatcgtaacttctttgccctgaaaggattaaccaccagccgtggcgagccggtacagggtgtctacggctttgcaaagtcgctcctgaaagctctgaaagaagacggtgatgtggtgattgttgtctttgatgcgaaagcgccaagttttcgccacgaagcgtacgaagcttacaaagccgggcgtgctccaacgccggaagactttcctcgccaattggcgcttatgaaggaattagtggatttgcttggcctcgaacgcttggaagttcccggtttcgaggcagacgacgtattagcgactctcgcaaagaaagccgaacgtgagggctatgaagtccagatcttgacagcagatcgcgatcttttccagcttttatctccgcgcatctcggtgttacacccggaagggcatcgtatcaccccggaatggctctgggagaaatatggtttgcgtcccgaacaatgggtggattttcgcgccttagcaggcgatccgagcgacaatattccgggagttaaaggtatcggcgagaagacggcgctcaagctccttaaagaatgggggtcgttggagaacttgcttaagaatttagatcaggtcaaaccagagtcagtgcgtgagaagattcttgcacacctcgaagacctcaaattaagcctggaattgtcccgtgtacgcaccgatttgccgctcgaagttgatttccgtggccgccgcgaacctgactgggagggtcttaaagcgtttttagagcgtcttgaatttggttcgctcttgcatgaattcggccttttagaaagcccgttaccagccgaagaagcaccttggccaccgcccgaaggcgcgtttttaggttaccgtttgagtcgcccggaaccgatgtgggccgaattatcggctcttgcagcgtctgcccaggagcgtgtgtatcgcgcggaagaccctcatggtgcgctcaagggcctcaaagaagtccgtggactccttgccaaagacttagctgttgttgcattgcgcgaaggtcttgatttacctccgactgatgatccaatgcttcttgcgtacctcttggacccgtcaaacacgacgcccgaaggcgtagcccgtcgttacggcggcgagtggaccgaagatgcaggcgagcgcgcgttattggccgaacgtttgcacgccaatttattaggacgtttgcaaggcgaggaacgtctcctctggctttacgaagaagtggagaaaccattgagtcgcgtgctcgcgcatatggaagctaccggtgtcaaattagacgtggcgtatttggagaacctcagccttgaagttgctgccgaaatgcgccgcttggaggaagaagtattccgtttagcaggccactcctttaaccttaattctcgcgatcagttagaacgtgtgttgttcgataaccttggtctccctcctatcggcaagacagagaagaccggtaaacgtagcacttcagcggcggttttagaagctcttcgcgaagtccatcccattgtggacaagatcttgcagtaccgcgaactcgcgaaattgaaaggcacctatattgaccctcttccggcattagtccacccgaaaacgggacgcctccatacccgcttcaaccaaacagccacggcgaccggtcgtttgtcctcctctgatccaaaccttcagaatattccagtacgtaccccattgggccagaagatccgccgcgcgtttgtagctgaggagggttggcgtttagtggccctcgattatagccaaattgaattacgtgtccttgcccatctttctggcgatgagaacctcatccgcgtgtttcaggaaggcaaagacattcacactcaaacggcaagctggatgtttggattatcagctgaagcgatcgatcctttgatgcgtcgtgcagcgaagaccatcaatttcggtgttctctacggtatgagtgcccatcgtttgtcgcaggaattaggcattccctatgaagaagctgccgcgttcattcagcgctactttcaaagctatcccaaagttaaagcatggatcgagaagactctcgaagaaggccgcacacgtggttacgtagagaccttatttggacgtcgccgctatgttcccgatttaaacgctcgcgtgaaatctgtccgtgaagccgccgaacgcatggcgttcaacatgcctgtacagggcacggcagctgacctcatgaaacttgcaatggtgcgcctttttccacaattgcgtgaagttggtgcccgcatgctcttgcaggtccacgatgaactcttgttagaagcgccaaaagagcgtgcggaagaggtggcagccctcgcgaaagaggttatggaaggcgtgtggcccttagcggtgcctcttgaagtcgaagttggtattggcgaggattggttggctgccaaaggataatga

SEQ ID NO: 1150 - protein, 841 aa, synthetic construct
  REGION 1..841: note = Variant of DNA polymerase I from Thermus sp. strain 2.9
MHHHHHHGGSGMLPLFEPKGRVLLVDGHHLAYRNFFALKGLTTSRGEPVQGVYGFAKSLLKALKEDGDVVIVVFDAKAPSFRHEAYEAYKAGRAPTPEDFPRQLALMKELVDLLGLERLEVPGFEADDVLATLAKKAEREGYEVQILTADRDLFQLLSPRISVLHPEGHRITPEWLWEKYGLRPEQWVDFRALAGDPSDNIPGVKGIGEKTALKLLKEWGSLENLLKNLDQVKPESVREKILAHLEDLKLSLELSRVRTDLPLEVDFRGRREPDWEGLKAFLERLEFGSLLHEFGLLESPLPAEEAPWPPPEGAFLGYRLSRPEPMWAELSALAASAQERVYRAEDPHGALKGLKEVRGLLAKDLAVVALREGLDLPPTDDPMLLAYLLDPSNTTPEGVARRYGGEWTEDAGERALLAERLHANLLGRLQGEERLLWLYEEVEKPLSRVLAHMEATGVKLDVAYLENLSLEVAAEMRRLEEEVFRLAGHSFNLNSRDQLERVLFDNLGLPPIGKTEKTGKRSTSAAVLEALREVHPIVDKILQYRELAKLKGTYIDPLPALVHPKTGRLHTRFNQTATATGRLSSSDPNLQNIPVRTPLGQKIRRAFVAEEGWRLVALDYSQIELRVLAHLSGDENLIRVFQEGKDIHTQTASWMFGLSAEAIDPLMRRAAKTINFGVLYGMSAHRLSQELGIPYEEAAAFIQRYFQSYPKVKAWIEKTLEEGRTRGYVETLFGRRRYVPDLNARVKSVREAAERMAFNMPVQGTAADLMKLAMVRLFPQLREVGARMLLQVHDELLLEAPKERAEEVAALAKEVMEGVWPLAVPLEVEVGIGEDWLAAKG

SEQ ID NO: 1151 - DNA, 2529 bp, synthetic construct
  misc_feature 1..2529: note = Variant of DNA polymerase I from Thermus sp. strain 2.9
  source 1..2529: mol_type = other DNA
atgcaccatcatcatcatcatggcggtagcggcatgttaccgttgttcgaacctaaaggtcgcgtgcttctggttgatggccatcatctcgcgtatcgtaacttctttgccctgaaaggattaaccaccagccgtggcgagccggtacagggtgtctacggctttgcaaagtcgctcctgaaagctctgaaagaagacggtgatgtggtgattgttgtctttgatgcgaaagcgccaagttttcgccacgaagcgtacgaagcttacaaagccgggcgtgctccaacgccggaagactttcctcgccaattggcgcttatgaaggaattagtggatttgcttggcctcgaacgcttggaagttcccggtttcgaggcagacgacgtattagcgactctcgcaaagaaagccgaacgtgagggctatgaagtccagatcttgacagcagatcgcgatcttttccagcttttatctccgcgcatctcggtgttacacccggaagggcatcgtatcaccccggaatggctctgggagaaatatggtttgcgtcccgaacaatgggtggattttcgcgccttagcaggcgatccgagcgacaatattccgggagttaaaggtatcggcgagaagacggcgctcaagctccttaaagaatgggggtcgttggagaacttgcttaagaatttagatcaggtcaaaccagagtcagtgcgtgagaagattcttgcacacctcgaagacctcaaattaagccgcgaattgtcccgtgtacgcaccgatttgccgctcgaagttgatttccgtggtcgccgcgaacctgactgggagggtcttaaagcgtttttagagcgtcttgaatttggttcgctcttgcatgaattcggccttttagaaagcccgttaccagccgaagaagcaccttggccaccgcccgaaggcgcgtttttaggttaccgtttgagtcgcccggaaccgatgtgggccgaattattggctcttgcagcgtctgcccaggagcgtgtgtatcgcgcggaagaccctcatggtgcgctccgcggcctcaaagaagtccgtggactccttgccaaagacttagctgttgttgcattgcgcgaaggtcttgatttacctccgactgatgatccaatgcttcttgcgtacctcttggacccgtcaaacacgacgcccgaaggcgtagcccgtcgttacggcggcgagtggaccgaagatgcaggcgagcgcgcgttattggccgaacgtttgcacgccaatttattaggacgtttgcaaggcgaggaacgtctcctctggctttacgaagaagtggagaaaccattgagtcgcgtgctcgcgcatatggaagctaccggtgtcaaattagacgtggcgtatttggagaacctcagccttgaagttgctgccgaaatgcgccgcttggaggaagaagtattccgtttagcaggccactcctttaaccttaattctcgcgatcagttagaacgtgtgttgttcgatgaacttggtctccctcctatcggcaagacagagaagaccggtaaacgtagcacttcagcggcggttttagaagctcttcgcgaagtccatcccattgtggacaagatcttgcagtaccgcgaactcgcgaaattgaaaggcacctatattgaccctcttccggcattagtccacccgaaaacgggacgcctccatacccgcttcaaccaaacagccacggcgaccggtcgtttgtcctcctctgatccaaaccttcagaatattccagtacgtaccccattgggccagaagatccgccgcgcgtttgtagctgaggagggttggcgtttagtggccctcgattatagccaaattgaattacgtgtccttgcccatctttctggcgatgagaacctcatccgcgtgtttcaggaaggcaaagacattcacactcaaacggcaagctggatgtttggattatcagctgaagcgatcgatcctttgatgcgtcgtgcagcgaagaccgttaatttcggtgttctctacggtatgagtgcccatcgtttgtcgcaggaattaggcattccctatgaagaagctgcggcgttcattcagcgctactttcaaagctatcccaaagttaaagcatggatcgagaagactctcgaagaaggccgcacacgtggttacgtagagaccttatttggacgtcgccgctatgttcccgatttaaacgctcgcgtgaaatctgtccgtgaagccgccgaacgcatggcgttcaacatgcctgtacagggcacggcagctgacctcatgaaacttgcaatggtgcgcctttttccacaattgcgtgaagttggtgcccgcatgctcttgcaggtccacgatgaactcttgttagaagcgccaaaagagcgtgcggaagaggtggcagccctcgcgaaagaggttatggaaggcgtgtggcccttagcggtgcctcttgaagtcgaagttggtattggcgaggattggttggctgccaaaggataatga

SEQ ID NO: 1152 - protein, 841 aa, synthetic construct
  REGION 1..841: note = Variant of DNA polymerase I from Thermus sp. strain 2.9
MHHHHHHGGSGMLPLFEPKGRVLLVDGHHLAYRNFFALKGLTTSRGEPVQGVYGFAKSLLKALKEDGDVVIVVFDAKAPSFRHEAYEAYKAGRAPTPEDFPRQLALMKELVDLLGLERLEVPGFEADDVLATLAKKAEREGYEVQILTADRDLFQLLSPRISVLHPEGHRITPEWLWEKYGLRPEQWVDFRALAGDPSDNIPGVKGIGEKTALKLLKEWGSLENLLKNLDQVKPESVREKILAHLEDLKLSRELSRVRTDLPLEVDFRGRREPDWEGLKAFLERLEFGSLLHEFGLLESPLPAEEAPWPPPEGAFLGYRLSRPEPMWAELLALAASAQERVYRAEDPHGALRGLKEVRGLLAKDLAVVALREGLDLPPTDDPMLLAYLLDPSNTTPEGVARRYGGEWTEDAGERALLAERLHANLLGRLQGEERLLWLYEEVEKPLSRVLAHMEATGVKLDVAYLENLSLEVAAEMRRLEEEVFRLAGHSFNLNSRDQLERVLFDELGLPPIGKTEKTGKRSTSAAVLEALREVHPIVDKILQYRELAKLKGTYIDPLPALVHPKTGRLHTRFNQTATATGRLSSSDPNLQNIPVRTPLGQKIRRAFVAEEGWRLVALDYSQIELRVLAHLSGDENLIRVFQEGKDIHTQTASWMFGLSAEAIDPLMRRAAKTVNFGVLYGMSAHRLSQELGIPYEEAAAFIQRYFQSYPKVKAWIEKTLEEGRTRGYVETLFGRRRYVPDLNARVKSVREAAERMAFNMPVQGTAADLMKLAMVRLFPQLREVGARMLLQVHDELLLEAPKERAEEVAALAKEVMEGVWPLAVPLEVEVGIGEDWLAAKG

SEQ ID NO: 1153 - DNA, 2529 bp, synthetic construct
  misc_feature 1..2529: note = Variant of DNA polymerase I from Thermus sp. strain 2.9
  source 1..2529: mol_type = other DNA
atgcaccatcatcatcatcatggcggtagcggcatgttaccgttgttcgaacctaaaggtcgcgtgcttctggttgatggccatcatctcgcgtatcgtaacttctttgccctgaaaggattaaccaccagccgtggcgagccggtacagggtgtctacggctttgcaaagtcgctcctgaaagctctgaaagaagacggtgatgtggtgattgttgtctttgatgcgaaagcgccaagttttcgccacgaagcgtacgaagcttacaaagccgggcgtgctccaacgccggaagactttcctcgccaattggcgcttatgaaggaattagtggatttgcttggcctcgaacgcttggaagttcccggtttcgaggcagacgacgtattagcgactctcgcaaagaaagccgaacgtgagggctatgaagtccagatcttgacagcagatcgcgatcttttccagcttttatctccgcgcatctcggtgttacacccggaagggcatcgtatcaccccggaatggctctgggagaaatatggtttgcgtcccgaacaatgggtggattttcgcgccttagcaggcgatccgagcgacaatattccgggagtttctggtatcggcgagaagacggcgctcaagctccttaaagaatgggggtcgttggagaacttgcttaagaatttagatcaggtcaaaccagagtcagtgcgtgagaagattcttgcacacctcgaagacctcaaattaagccgcgaattgtcccgtgtacgcaccgatttgccgctcgaagttgatttccgtggccgccgcgaacctgactgggagggtcttaaagcgtttttagagcgtcttgaatttggttcgctcttgcatgaattcggccttttagaaagcccgttaccagccgaagaagcaccttggccaccgcccgaaggcgcgtttttaggttaccgtttgagtcgcccggaaccgatgtgggccgaattattggctcttgcagcgtctgcccagggacgtgtgtatcgcgcggaagaccctcatggtgcgctccgcggcctcaaagaagtccgtggactccttgccaaagacttagctgttgttgcattgcgcgaaggtcttgatttacctccgactgatgatccaatgcttcttgcgtacctcttggacccgtcaaacacgacgcccgaaggcgtagcccgtcgttacggcggcgagtggaccgaagatgcaggcgagcgcgcgttattggccgaacgtttgcacgccaatttattaggacgtttgcaaggcgaggaacgtctcctctggctttacgaagaagtggagaaaccattgagtcgcgtgctcgcgcatatggaagctaccggtgtcaaattagacgtggcgtatttggaggcactcagccttgaagttgctgccgaaatgcgccgcttggaggaagaagtattccgtttagcaggccactcctttaaccttaattctcgcgatcagttagaacgtgtgttgttcgatgaacttggtctccctcctatcggcaagacagagaagaccggtaaacgtagcacttcagcggcggttttagaagctcttcgcgaagtccatcccattgtggacaagatcttgcagtaccgcgaactcgcgaaattgaaaggcacctatattgaccctcttccggcattagtccacccgaaaacgggacgcctccatacccgcttcaaccaaacagccacggcgaccggtcgtttgtcctcctctgatccaaaccttcagaatattccagtacgtaccccattgggccagaagatccgccgcgcgtttgtagctgaggagggttggcgtttagtggccctcgattatagccaaattgaattacgtgtccttgcccatctttctggcgatgagaacctcatccgcgtgtttcaggaaggcaaagacattcacactcaaacggcaagctggatgtttggattatcagctgaagcgatcgatcctttgatgcgtcgtgcagcgaagaccatcaatttcggtgttctctacggtatgagtgcccatcgtttgtcgcaggaattaggcattccctatgaagaagctgcggcgttcattcagcgctactttcaaagctatcccaaagttaaagcatggatcgagaagactctcgaagaaggccgcacacgtggttacgtagagaccttatttggacgtcgccgctatgttcccgatttaaacgctcgcgtgaaatctgtccgtgaagccgccgaacgcatggcgttcaacatgcctgtacagggcacggcagctgacctcatgaaacttgcaatggtgcgcctttttccacaattgcgtgaagttggtgcccgcatgctcttgcaggtccacgatgaactcttgttagaagcgccaaaagagcgtgcggaagaggtggcagccctcgcgaaagaggttatggaaggcgtgtggcccttagcggtgcctcttgaagtcgaagttggtattggcgaggattggttggctgccaaaggataatga

SEQ ID NO: 1154 - protein, 841 aa, synthetic construct
  REGION 1..841: note = Variant of DNA polymerase I from Thermus sp. strain 2.9
MHHHHHHGGSGMLPLFEPKGRVLLVDGHHLAYRNFFALKGLTTSRGEPVQGVYGFAKSLLKALKEDGDVVIVVFDAKAPSFRHEAYEAYKAGRAPTPEDFPRQLALMKELVDLLGLERLEVPGFEADDVLATLAKKAEREGYEVQILTADRDLFQLLSPRISVLHPEGHRITPEWLWEKYGLRPEQWVDFRALAGDPSDNIPGVSGIGEKTALKLLKEWGSLENLLKNLDQVKPESVREKILAHLEDLKLSRELSRVRTDLPLEVDFRGRREPDWEGLKAFLERLEFGSLLHEFGLLESPLPAEEAPWPPPEGAFLGYRLSRPEPMWAELLALAASAQGRVYRAEDPHGALRGLKEVRGLLAKDLAVVALREGLDLPPTDDPMLLAYLLDPSNTTPEGVARRYGGEWTEDAGERALLAERLHANLLGRLQGEERLLWLYEEVEKPLSRVLAHMEATGVKLDVAYLEALSLEVAAEMRRLEEEVFRLAGHSFNLNSRDQLERVLFDELGLPPIGKTEKTGKRSTSAAVLEALREVHPIVDKILQYRELAKLKGTYIDPLPALVHPKTGRLHTRFNQTATATGRLSSSDPNLQNIPVRTPLGQKIRRAFVAEEGWRLVALDYSQIELRVLAHLSGDENLIRVFQEGKDIHTQTASWMFGLSAEAIDPLMRRAAKTINFGVLYGMSAHRLSQELGIPYEEAAAFIQRYFQSYPKVKAWIEKTLEEGRTRGYVETLFGRRRYVPDLNARVKSVREAAERMAFNMPVQGTAADLMKLAMVRLFPQLREVGARMLLQVHDELLLEAPKERAEEVAALAKEVMEGVWPLAVPLEVEVGIGEDWLAAKG

SEQ ID NO: 1155 - DNA, 2529 bp, synthetic construct
  misc_feature 1..2529: note = Variant of DNA polymerase I from Thermus sp. strain 2.9
  source 1..2529: mol_type = other DNA
atgcaccatcatcatcatcatggcggtagcggcatgttaccgttgttcgaacctaaaggtcgcgtgcttctggttgatggccatcatctcgcgtatcgtaacttctttgccctgaaaggattaaccaccagccgtggcgagccggtacagggtgtctacggctttgcaaagtcgctcctgaaagctctgaaagaagacggtgatgtggtgattgttgtctttgatgcgaaagcgccaagttttcgccacgaagcgtacgaagcttacaaagccgggcgtgctccaacgccggaagactttcctcgccaattggcgcttatgaaggaattagtggatttgcttggcctcgaacgcttggaagttcccggtttcgaggcagacgacgtattagcgactctcgcaaagaaagccgaacgtgagggctatgaagtccagatcttgacagcagatcgcgatcttttccagcttttatctccgcgcatctcggtgttacacccggaagggcatcgtatcaccccggaatggctctgggagaaatatggtttgcgtcccgaacaatgggtggattttcgcgccttagcaggcgatccgagcgacaatattccgggagttaaaggtatcggcgagaagacggcgctcaagctccttaaagaatgggggtcgttggagaacttgcttaagaatttagatcaggtcaaaccagagtcagtgcgtgagaagattcttgcacacctcgaagacctcaaattaagcctggaattgtcccgtgtacgcaccgatttgccgctcgaagttgatttccgtggccgccgcgaacctgactgggagggtcttaaagcgtttttagagcgtcttgaatttggttcgctcttgcatgaattcggccttttagaaagcccgttaccagccgaagaagcaccttggccaccgcccgaaggcgcgtttttaggttaccgtttgagtcgcccggaaccgatgtgggccgaattactggctcttgcagcgtctgcccagggacgtgtgtatcgcgcggaagaccctcatggtgcgctccgcggcctcaaagaagtccgtggactccttgccaaagacttagctgttgttgcattgcgcgaaggtcttgatttacctccgactgatgatccaatgcttcttgcgtacctcttggacccgtcaaacacgacgcccgaaggcgtagcccgtcgttacggcggcgagtggaccgaagatgcaggtaagcgcgcgttattggccgaacgtttgcacgccaatttattaggacgtttgcaaggcgaggaacgtctcctctggctttacgaagaagtggagaaaccattgagtcgcgtgctcgcgcatatggaagctaccggtgtcaaattagacgtggcgtatttggaggctctcagccttgaagttgctgccgaaatgcgccgcttggaggaagaagtattccgtttagcaggccactcctttaaccttaattctcgcgatcagttagaacgtgtgttgttcgataaccttggtctccctcctatcggcaagacagagaagaccggtaaacgtagcacttcagcggcggttttagaagctcttcgcgaagtccatcccattgtggacaagatcttgcagtaccgcgaactcgcgaaattgaaaggcacctatattgaccctcttccggcattagtccacccgaaaacgggacgcctccatacccgcttcaaccaaacagccacggcgaccggtcgtttgtcctcctctgatccaaaccttcagaatattccagtacgtaccccattgggccagaagatccgccgcgcgtttgtagctgaggagggttggcgtttagtggccctcgattatagccaaattgaattacgtgtccttgcccatctttctggcgatgagaacctcatccgcgtgtttcaggaaggcaaagacattcacactcaaacggcaagctggatgtttggattatcaccagaagcgatcgatcctttgatgcgtcgtgcagcgaagaccatcaatttcggtgttctctacggtatgagtgcccatcgtttgtcgcaggaattaggcattccctatgaagaagctgccgcgttcattcagaagtactttcaaagctatcccaaagttaaagcatggatcgagaagactctcgaagaaggccgcacacgtggttacgtagagaccttatttggacgtcgccgctatgttcccgatttaaacgctcgcgtgaaatctgtccgtgaagccgccgaacgcatggcgttcaacatgcctgtacagggcacggcagctgacctcatgaaacttgcaatggtgcgcctttttccacaattgcgtgaagttggtgcccgcatgctcttgcaggtccacgatgaactcttgttagaagcgccaaaagagcgtgcggaagaggtggcagccctcgcgaaagaggttatggaaggcgtgtggcccttagcggtgcctcttgaagtcgaagttggtattggcgaggattggttggctgccaaaggataatga

SEQ ID NO: 1156 - protein, 841 aa, synthetic construct
  REGION 1..841: note = Variant of DNA polymerase I from Thermus sp. strain 2.9
MHHHHHHGGSGMLPLFEPKGRVLLVDGHHLAYRNFFALKGLTTSRGEPVQGVYGFAKSLLKALKEDGDVVIVVFDAKAPSFRHEAYEAYKAGRAPTPEDFPRQLALMKELVDLLGLERLEVPGFEADDVLATLAKKAEREGYEVQILTADRDLFQLLSPRISVLHPEGHRITPEWLWEKYGLRPEQWVDFRALAGDPSDNIPGVKGIGEKTALKLLKEWGSLENLLKNLDQVKPESVREKILAHLEDLKLSLELSRVRTDLPLEVDFRGRREPDWEGLKAFLERLEFGSLLHEFGLLESPLPAEEAPWPPPEGAFLGYRLSRPEPMWAELLALAASAQGRVYRAEDPHGALRGLKEVRGLLAKDLAVVALREGLDLPPTDDPMLLAYLLDPSNTTPEGVARRYGGEWTEDAGKRALLAERLHANLLGRLQGEERLLWLYEEVEKPLSRVLAHMEATGVKLDVAYLEALSLEVAAEMRRLEEEVFRLAGHSFNLNSRDQLERVLFDNLGLPPIGKTEKTGKRSTSAAVLEALREVHPIVDKILQYRELAKLKGTYIDPLPALVHPKTGRLHTRFNQTATATGRLSSSDPNLQNIPVRTPLGQKIRRAFVAEEGWRLVALDYSQIELRVLAHLSGDENLIRVFQEGKDIHTQTASWMFGLSPEAIDPLMRRAAKTINFGVLYGMSAHRLSQELGIPYEEAAAFIQKYFQSYPKVKAWIEKTLEEGRTRGYVETLFGRRRYVPDLNARVKSVREAAERMAFNMPVQGTAADLMKLAMVRLFPQLREVGARMLLQVHDELLLEAPKERAEEVAALAKEVMEGVWPLAVPLEVEVGIGEDWLAAKG

SEQ ID NO: 1157 - DNA, 2529 bp, synthetic construct
  misc_feature 1..2529: note = Variant of DNA polymerase I from Thermus sp. strain 2.9
  source 1..2529: mol_type = other DNA
atgcaccatcatcatcatcatggcggtagcggcatgttaccgttgttcgaacctaaaggtcgcgtgcttctggttgatggccatcatctcgcgtatcgtaacttctttgccctgaaaggattaaccaccagccgtggcgagccggtacagggtgtctacggctttgcaaagtcgctcctgaaagctctgaaagaagacggtgatgtggtgattgttgtctttgatgcgaaagcgccaagttttcgccacgaagcgtaccctgcttacaaagccgggcgtgctccaacgccggaagactttcctcgccaattggcgcttatgaaggaattagtggatttgcttggcctcgaacgcttggaagttcccggtttcgaggcagacgacgtattagcgactctcgcaaagaaagccgaacgtgagggctatgaagtccagatcttgacagcagatcgcgatcttttccagcttttatctccgcgcatctcggtgttacacccggaagggcatcgtatcaccccggaatggctctgggagaaatatggtttgcgtcccgaacaatgggtggattttcgcgccttagcaggcgatccgagcgacaatattccgggagttaaaggtatcggcgagaagacggcgctcaagctccttaaagaatgggggtcgttggagaacttgcttaagaatttagatcaggtcaaaccagagtcagtgcgtgagaagattcttgcacacctcgaagacctcaaattaagccgcgaattgtcccgtgtacgcaccgatttgccgctcgaagttgatttccgtggccgccgcgaacctgactgggagggtcttaaagcgtttttagagcgtcttgaatttggttcgctcttgcatgaattcggccttttagaaagcccgttaccagccgaagaagcaccttggccaccgcccgaaggcgcgtttttaggttaccgtttgagtcgcccggaaccgatgtgggccgaattattggctcttgcagcgtctgcccagggacgtgtgtatcgcgcggaagaccctcatggtgcgctccgcggcctcaaagaagtccgtggactccttgccaaagacttagctgttgttgcattgcgcgaaggtcttgatttacctccgactgatgatccaatgcttcttgcgtacctcttggacccgtcaaacacgacgcccgaaggcgtagcccgtcgttacggcggcgagtggaccgaagatgcaggcgagcgcgcgttattggccgaacgtttgcacgccaatttattaggacgtttgcaaggcgaggaacgtctcctctggctttacgaagaagtggagaaaccattgagtcgcgtgctcgcgcatatggaagctaccggtgtcaaattagacgtggcgtatttggaggcactcagccttgaagttgctgccgaaatgcgccgcttggaggaagaagtattccgtttagcaggccactcctttaaccttaattctcgcgatcagttagaacgtgtgttgttcgatgaacttggtctccctcctatcggcaagacagagaagaccggtaaacgtagcacttcagcggcggttttagaagctcttcgcgaagtccatcccattgtggacaagatcttgcagtaccgcgaactcgcgaaattgaaaggcacctatattgaccctcttccggcattagtccacccgaaaacgggacgcctccatacccgcttcaaccaaacagccacggcgaccggtcgtttgtcctcctctgatccaaaccttcagaatattccagtacgtaccccattgggccagaagatccgccgcgcgtttgtagctgaggagggttggcgtttagtggccctcgattatagccaaattgaattacgtgtccttgcccatctttctggcgatgagaacctcatccgcgtgtttcaggaaggcaaagacattcacactcaaacggcaagctggatgtttggattatcagctgaagcgatcgatcctttgatgcgtcgtgcagcgaagaccatcaatttcggtgttctctacggtatgagtgcccatcgtttgtcgcaggaattaggcattccctatgaagaagctgcggcgttcattcagcgctactttcaaagctatcccaaagttaaagcatggatcgagaagactctcgaagaaggccgcacacgtggttacgtagagaccttatttggacgtcgccgctatgttcccgatttaaacgctcgcgtgaaatctgtccgtgaagccgccgaacgcatggcgttcaacatgcctgtacagggcacggcagctgacctcatgaaacttgcaatggtgcgcctttttccacaattgcgtgaagttggtgcccgcatgctcttgcaggtccacgatgaactcttgttagaagcgccaaaagagcgtgcggaagaggtggcagccctcgcgaaagaggttatggaaggcgtgtggcccttagcggtgcctcttgaagtcgaagttggtattggcgaggattggttggctgccaaaggataatga

SEQ ID NO: 1158 - protein, 841 aa, synthetic construct
  REGION 1..841: note = Variant of DNA polymerase I from Thermus sp. strain 2.9
MHHHHHHGGSGMLPLFEPKGRVLLVDGHHLAYRNFFALKGLTTSRGEPVQGVYGFAKSLLKALKEDGDVVIVVFDAKAPSFRHEAYPAYKAGRAPTPEDFPRQLALMKELVDLLGLERLEVPGFEADDVLATLAKKAEREGYEVQILTADRDLFQLLSPRISVLHPEGHRITPEWLWEKYGLRPEQWVDFRALAGDPSDNIPGVKGIGEKTALKLLKEWGSLENLLKNLDQVKPESVREKILAHLEDLKLSRELSRVRTDLPLEVDFRGRREPDWEGLKAFLERLEFGSLLHEFGLLESPLPAEEAPWPPPEGAFLGYRLSRPEPMWAELLALAASAQGRVYRAEDPHGALRGLKEVRGLLAKDLAVVALREGLDLPPTDDPMLLAYLLDPSNTTPEGVARRYGGEWTEDAGERALLAERLHANLLGRLQGEERLLWLYEEVEKPLSRVLAHMEATGVKLDVAYLEALSLEVAAEMRRLEEEVFRLAGHSFNLNSRDQLERVLFDELGLPPIGKTEKTGKRSTSAAVLEALREVHPIVDKILQYRELAKLKGTYIDPLPALVHPKTGRLHTRFNQTATATGRLSSSDPNLQNIPVRTPLGQKIRRAFVAEEGWRLVALDYSQIELRVLAHLSGDENLIRVFQEGKDIHTQTASWMFGLSAEAIDPLMRRAAKTINFGVLYGMSAHRLSQELGIPYEEAAAFIQRYFQSYPKVKAWIEKTLEEGRTRGYVETLFGRRRYVPDLNARVKSVREAAERMAFNMPVQGTAADLMKLAMVRLFPQLREVGARMLLQVHDELLLEAPKERAEEVAALAKEVMEGVWPLAVPLEVEVGIGEDWLAAKG

SEQ ID NO: 1159 - DNA, 2529 bp, synthetic construct
  misc_feature 1..2529: note = Variant of DNA polymerase I from Thermus sp. strain 2.9
  source 1..2529: mol_type = other DNA
atgcaccatcatcatcatcatggcggtagcggcatgttaccgttgttcgaacctaaaggtcgcgtgcttctggttgatggccatcatctcgcgtatcgtaacttctttgccctgaaaggattaaccaccagccgtggcgagccggtacagggtgtctacggctttgcaaagtcgctcctgaaagctctgaaagaagacggtgatgtggtgattgttgtctttgatgcgaaagcgccaagttttcgccacgaagcgtacgaagcttacaaagccgggcgtgctccaacgccggaagactttcctcgccaattggcgcttatgaaggaattagtggatttgcttggcctcgaacgcttggaagttcccggtttcgaggcagacgacgtattagcgactctcgcaaagaaagccgaacgtgagggctatgaagtccagatcttgacagcagatcgcgatcttttccagcttttatctccgcgcatctcggtgttacacccggaagggcatcgtatcaccccggaatggctctgggagaaatatggtttgcgtcccgaacaatgggtggattttcgcgccttagcaggcgatccgagcgacaatattccgggagttaaaggtatcggcgagaagacggcgctcaagctccttaaagaatgggggtcgttggagaacttgcttaagaatttagatcaggtcaaaccagagtcagtgcgtgagaagattcttgcacacctcgaagacctcaaattaagccgcgaattgtcccgtgtacgcaccgatttgccgctcgaagttgatttccgtggccgccgcgaacctgactgggagggtcttaaagcgtttttagagcgtcttgaatttggttcgctcttgcatgaattcggccttttagaaagcccgttaccagccgaagaagcaccttggccaccgcccgaaggcgcgtttttaggttaccgtttgagtcgcccggaaccgatgtgggccgaattattggctcttgcagcgtctgcccagggacgtgtgtatcgcgcggaagaccctcatggtgcgctccgcggcctcaaagaagtccgtggactccttgccaaagacttagctgttgttgcattgcgcgaaggtcttgatttacctccgactgatgatccaatgcttcttgcgtacctcttggacccgtcaaacacgacgcccgaaggcgtagcccgtcgttacggcggcgagtggaccgaagatgcaggcgagcgcgcgttattggccgaacgtttgcacgccaatttattaggacgtttgcaaggcgaggaacgtctcctctggctttacgaagaagtggagaaaccattgagtcgcgtgctcgcgcatatggaagctaccggtgtcaaattagacgtggcgtatttggaggcactcagccttgaagttgctgccgaaatgcgccgcttggaggaagaagtattccgtttagcaggccactcctttaaccttaattctcgcgatcagttagaacgtgtgttgttcgatgaacttggtctccctcctatcggcaagacagagaagaccggtaaacgtagcacttcagcggcggttttagaagctcttcgcgaagtccatcccattgtggacaagatcttgcagtaccgcgaactcgcgaaattgaaaggcacctatattgaccctcttccggcattagtccacccgaaaacgggacgcctccatacccgcttcaaccaaacagccacggcgaccggtcgtttgtcctcctctgatccaaaccttcagaatattccagtacgtaccccattgggccagaagatccgccgcgcgtttgtagctgaggagggttggcgtttagtggccctcgattatagccaaattgaattacgtgtccttgcccatctttctggcgatgagaacctcatccgcgtgtttcaggaaggcaaagacattcacactcaaacggcaagctggatgtttggattatcagctgaagcgatcgatcctttgatgcgtcgtgcagcgaagaccatcaatttcggtgttctctacggtatgagtgcccatcgtttgtcgcaggaattaggcattcccactgaagaagctgcggcgttcattcagcgctactttcaaagctatcccaaagttaaagcatggatcgagaagactctcgaagaaggccgcacacgtggttacgtagagaccttatttggacgtcgccgctatgttcccgatttaaacgctcgcgtgaaatctgtccgtgaagccgccgaacgcatggcgttcaacatgcctgtacagggcacggcagctgacctcatgaaacttgcaatggtgcgcctttttccacaattgcgtgaagttggtgcccgcatgctcttgcaggtccacgatgaactcttgttagaagcgccaaaagagcgtgcggaagaggtggcagccctcgcgaaagaggttatggaaggcgtgtggcccttagcggtgcctcttgaagtcgaagttggtattggcgaggattggttggctgccaaaggataatga

SEQ ID NO: 1160 - protein, 841 aa, synthetic construct
  REGION 1..841: note = Variant of DNA polymerase I from Thermus sp. strain 2.9
MHHHHHHGGSGMLPLFEPKGRVLLVDGHHLAYRNFFALKGLTTSRGEPVQGVYGFAKSLLKALKEDGDVVIVVFDAKAPSFRHEAYEAYKAGRAPTPEDFPRQLALMKELVDLLGLERLEVPGFEADDVLATLAKKAEREGYEVQILTADRDLFQLLSPRISVLHPEGHRITPEWLWEKYGLRPEQWVDFRALAGDPSDNIPGVKGIGEKTALKLLKEWGSLENLLKNLDQVKPESVREKILAHLEDLKLSRELSRVRTDLPLEVDFRGRREPDWEGLKAFLERLEFGSLLHEFGLLESPLPAEEAPWPPPEGAFLGYRLSRPEPMWAELLALAASAQGRVYRAEDPHGALRGLKEVRGLLAKDLAVVALREGLDLPPTDDPMLLAYLLDPSNTTPEGVARRYGGEWTEDAGERALLAERLHANLLGRLQGEERLLWLYEEVEKPLSRVLAHMEATGVKLDVAYLEALSLEVAAEMRRLEEEVFRLAGHSFNLNSRDQLERVLFDELGLPPIGKTEKTGKRSTSAAVLEALREVHPIVDKILQYRELAKLKGTYIDPLPALVHPKTGRLHTRFNQTATATGRLSSSDPNLQNIPVRTPLGQKIRRAFVAEEGWRLVALDYSQIELRVLAHLSGDENLIRVFQEGKDIHTQTASWMFGLSAEAIDPLMRRAAKTINFGVLYGMSAHRLSQELGIPTEEAAAFIQRYFQSYPKVKAWIEKTLEEGRTRGYVETLFGRRRYVPDLNARVKSVREAAERMAFNMPVQGTAADLMKLAMVRLFPQLREVGARMLLQVHDELLLEAPKERAEEVAALAKEVMEGVWPLAVPLEVEVGIGEDWLAAKG

SEQ ID NO: 1161 - DNA, 2529 bp, synthetic construct
  misc_feature 1..2529: note = Variant of DNA polymerase I from Thermus sp. strain 2.9
  source 1..2529: mol_type = other DNA
atgcaccatcatcatcatcatggcggtagcggcatgttaccgttgttcgaacctaaaggtcgcgtgcttctggttgatggccatcatctcgcgtatcgtaacttctttgccctgaaaggattaaccaccagccgtggcgagccggtacagggtgtctacggctttgcaaagtcgctcctgaaagctctgaaagaagacggtgatgtggtgattgttgtctttgatgcgaaagcgccaagttttcgccacgaagcgtacgaagcttacaaagccgggcgtgctccaacgccggaagactttcctcgccaattggcgcttatgaaggaattagtggatttgcttggcctcgaacgcttggaagttcccggtttcgaggcagacgacgtattagcgactctcgcaaagaaagccgaacgtgagggctatgaagtccagatcttgacagcagatcgcgatcttttccagcttttatctccgcgcatctcggtgttacacccggaagggcatcgtatcaccccggaatggctctgggagaaatatggtttgcgtcccgaacaatgggtggattttcgcgccttagcaggcgatccgagcgacaatattccgggagttaaaggtatcggcgagaagacggcgctcaagctccttaaagaatgggggtcgttggagaacttgcttaagaatttagatcaggtcaaaccagagtcagtgcgtgagaagattcttgcacacctcgaagacctcaaattaagccgcgaattgtcccgtgtacgcaccgatttgccgctcgaagttgatttccgtggccgccgcgaacctgactgggagggtcttaaagcgtttttagagcgtcttgaatttggttcgctcttgcatgaattcggccttttagaaagcccgttaccagccgaagaagcaccttggccaccgcccgaaggcgcgtttttaggttaccgtttgagtcgcccggaaccgatgtgggccgaattattggctcttgcagcgtctgcccagggacgtgtgtatcgcgcggaagaccctcatggtgcgctccgcggcctcaaagaagtccgtggactccttgccaaagacttagctgttgttgcattgcgcgaaggtcttgatttacctccgactgatgatccaatgcttcttgcgtacctcttggacccgtcaaacacgacgcccgaaggcgtagcccgtcgttacggcggcgagtggaccgaagatgcaggtaagcgcgcgttattggccgaacgtttgcacgccaatttattaggacgtttgcaaggcgaggaacgtctcctctggctttacgaagaagtggagaaaccattgagtcgcgtgctcgcgcatatggaagctaccggtgtcaaattagacgtggcgtatttggaggcactcagccttgaagttgctgccgaaatgcgccgcttggaggaagaagtattccgtttagcaggccactcctttaaccttaattctcgcgatcagttagaacgtgtgttgttcgataaccttggtctccctcctatcggcaagacagagaagaccggtaaacgtagcacttcagcggcggttttagaagctcttcgcgaagtccatcccattgtggacaagatcttgcagtaccgcgaactcgcgaaattgaaaggcacctatattgaccctcttccggcattagtccacccgaaaacgggacgcctccatacccgcttcaaccaaacagccacggcgaccggtcgtttgtcctcctctgatccaaaccttcagaatattccagtacgtaccccattgggccagaagatccgccgcgcgtttgtagctgaggagggttggcgtttagtggccctcgattatagccaaattgaattacgtgtccttgcccatctttctggcgatgagaacctcatccgcgtgtttcaggaaggcaaagacattcacactcaaacggcaagctggatgtttggattatcagctgaagcgatcgatcctttgatgcgtcgtgcagcgaagaccatcaatttcggtgttctctacggtatgagtgcccatcgtttgtcgcaggaattaggcattccctatgaagaagctgcggcgttcattcagcgctactttcaaagctatcccaaagttaaagcatggatcgagaagactctcgaagaaggccgcacacgtggttacgtagagaccttatttggacgtcgccgctatgttcccgatttaaacgctcgcgtgaaatctgtccgtgaagccgccgaacgcatggcgttcaacatgcctgtacagggcacggcagctgacctcatgaaacttgcaatggtgcgcctttttccacaattgcgtgaagttggtgcccgcatgctcttgcaggtccacgatgaactcttgttagaagcgccaaaagagcgtgcggaagaggtggcagccctcgcgaaagaggttatggaaggcgtgtggcccttagcggtgcctcttgaagtcgaagttggtattggcgaggattggttggctgccaaaggataatga

SEQ ID NO: 1162 - protein, 841 aa, synthetic construct
  REGION 1..841: note = Variant of DNA polymerase I from Thermus sp. strain 2.9
MHHHHHHGGSGMLPLFEPKGRVLLVDGHHLAYRNFFALKGLTTSRGEPVQGVYGFAKSLLKALKEDGDVVIVVFDAKAPSFRHEAYEAYKAGRAPTPEDFPRQLALMKELVDLLGLERLEVPGFEADDVLATLAKKAEREGYEVQILTADRDLFQLLSPRISVLHPEGHRITPEWLWEKYGLRPEQWVDFRALAGDPSDNIPGVKGIGEKTALKLLKEWGSLENLLKNLDQVKPESVREKILAHLEDLKLSRELSRVRTDLPLEVDFRGRREPDWEGLKAFLERLEFGSLLHEFGLLESPLPAEEAPWPPPEGAFLGYRLSRPEPMWAELLALAASAQGRVYRAEDPHGALRGLKEVRGLLAKDLAVVALREGLDLPPTDDPMLLAYLLDPSNTTPEGVARRYGGEWTEDAGKRALLAERLHANLLGRLQGEERLLWLYEEVEKPLSRVLAHMEATGVKLDVAYLEALSLEVAAEMRRLEEEVFRLAGHSFNLNSRDQLERVLFDNLGLPPIGKTEKTGKRSTSAAVLEALREVHPIVDKILQYRELAKLKGTYIDPLPALVHPKTGRLHTRFNQTATATGRLSSSDPNLQNIPVRTPLGQKIRRAFVAEEGWRLVALDYSQIELRVLAHLSGDENLIRVFQEGKDIHTQTASWMFGLSAEAIDPLMRRAAKTINFGVLYGMSAHRLSQELGIPYEEAAAFIQRYFQSYPKVKAWIEKTLEEGRTRGYVETLFGRRRYVPDLNARVKSVREAAERMAFNMPVQGTAADLMKLAMVRLFPQLREVGARMLLQVHDELLLEAPKERAEEVAALAKEVMEGVWPLAVPLEVEVGIGEDWLAAKG

SEQ ID NO: 1163 - DNA, 2529 bp, synthetic construct
  misc_feature 1..2529: note = Variant of DNA polymerase I from Thermus sp. strain 2.9
  source 1..2529: mol_type = other DNA
atgcaccatcatcatcatcatggcggtagcggcatgttaccgttgttcgaacctaaaggtcgcgtgcttctggttgatggccatcatctcgcgtatcgtaacttctttgccctgaaaggattaaccaccagccgtggcgagccggtacagggtgtctacggctttgcaaagtcgctcctgaaagctctgaaagaagacggtgatgtggtgattgttgtctttgatgcgaaagcgccaagttttcgccacgaagcgtacgaagcttacaaagccgggcgtgctccaacgccggaagactttcctcgccaattggcgcttatgaaggaattagtggatttgcttggcctcgaacgcttggaagttcccggtttcgaggcagacgacgtattagcgactctcgcaaagaaagccgaacgtgagggctatgaagtccagatcttgacagcagatcgcgatcttttccagcttttatctccgcgcatctcggtgttacacccggaagggcatcgtatcaccccggaatggctctgggagaaatatggtttgcgtcccgaacaatgggtggattttcgcgccttagcaggcgatccgagcgacaatattccgggagttaaaggtatcggcgagaagacggcgctcaagctccttaaagaatgggggtcgttggagaacttgcttaagaatttagatcaggtcaaaccagagtcagtgcgtgagaagattcttgcacacctcgaagacctcaaattaagccgcgaattgtcccgtgtacgcaccgatttgccgctcgaagttgatttccgtcgtcgccgcgaacctgactgggagggtcttaaagcgtttttagagcgtcttgaatttggttcgctcttgcatgaattcggccttttagaaagcccgttaccagccgaagaagcaccttggccaccgcccgaaggcgcgtttttaggttaccgtttgagtcgcccggaaccgatgtgggccgaattatcggctcttgcagcgtctgcccagggacgtgtgtatcgcgcggaagaccctcatggtgcgctccgcggcctcaaagaagtccgtggactccttgccaaagacttagctgttgttgcattgcgcgaaggtcttgatttacctccgactgatgatccaatgcttcttgcgtacctcttggacccgtcaaacacgacgcccgaaggcgtagcccgtcgttacggcggcgagtggaccgaagatgcaggcgagcgcgcgttattggccgaacgtttgcacgccaatttattaggacgtttgcaaggcgaggaacgtctcctctggctttacgaagaagtggagaaaccattgagtcgcgtgctcgcgcatatggaagctaccggtgtcaaattagacgtggcgtatttggaggcactcagccttgaagttgctgccgaaatgcgccgcttggaggaagaagtattccgtttagcaggccactcctttaaccttaattctcgcgatcagttagaacgtgtgttgttcgatgaacttggtctccctcctatcggcaagacagagaagaccggtaaacgtagcacttcagcggcggttttagaagctcttcgcgaagtccatcccattgtggacaagatcttgcagtaccgcgaactcgcgaaattgaaaggcacctatattgaccctcttccggcattagtccacccgaaaacgggacgcctccatacccgcttcaaccaaacagccacggcgaccggtcgtttgtcctcctctgatccaaaccttcagaatattccagtacgtaccccattgggccagaagatccgccgcgcgtttgtagctgaggagggttggcgtttagtggccctcgattatagccaaattgaattacgtgtccttgcccatctttctggcgatgagaacctcatccgcgtgtttcaggaaggcaaagacattcacactcaaacggcaagctggatgtttggattatcaccagaagcgatcgatcctttgatgcgtcgtgcagcgaagaccattaatttcggtgttctctacggtatgagtgcccatcgtttgtcgcaggaattaggcattccctatgaagaagctgtcgcgttcattcagcgctactttcaaagctatcccaaagttaaagcatggatcgagaagactctcgaagaaggccgcacacgtggttacgtagagaccttatttggacgtcgccgctatgttcccgatttaaacgctcgcgtgaaatctgtccgtgaagccgccgaacgcatggcgttcaacatgcctgtacagggcacggcagctgacctcatgaaacttgcaatggtgcgcctttttccacaattgcgtgaagttggtgcccgcatgctcttgcaggtccacgatgaactcttgttagaagcgccaaaagagcgtgcggaagaggtggcagccctcgcgaaagaggttatggaaggcgtgtggcccttagcggtgcctcttgaagtcgaagttggtattggcgaggattggttggctgccaaaggataatga

SEQ ID NO: 1164 - protein, 841 aa, synthetic construct
  REGION 1..841: note = Variant of DNA polymerase I from Thermus sp. strain 2.9
MHHHHHHGGSGMLPLFEPKGRVLLVDGHHLAYRNFFALKGLTTSRGEPVQGVYGFAKSLLKALKEDGDVVIVVFDAKAPSFRHEAYEAYKAGRAPTPEDFPRQLALMKELVDLLGLERLEVPGFEADDVLATLAKKAEREGYEVQILTADRDLFQLLSPRISVLHPEGHRITPEWLWEKYGLRPEQWVDFRALAGDPSDNIPGVKGIGEKTALKLLKEWGSLENLLKNLDQVKPESVREKILAHLEDLKLSRELSRVRTDLPLEVDFRRRREPDWEGLKAFLERLEFGSLLHEFGLLESPLPAEEAPWPPPEGAFLGYRLSRPEPMWAELSALAASAQGRVYRAEDPHGALRGLKEVRGLLAKDLAVVALREGLDLPPTDDPMLLAYLLDPSNTTPEGVARRYGGEWTEDAGERALLAERLHANLLGRLQGEERLLWLYEEVEKPLSRVLAHMEATGVKLDVAYLEALSLEVAAEMRRLEEEVFRLAGHSFNLNSRDQLERVLFDELGLPPIGKTEKTGKRSTSAAVLEALREVHPIVDKILQYRELAKLKGTYIDPLPALVHPKTGRLHTRFNQTATATGRLSSSDPNLQNIPVRTPLGQKIRRAFVAEEGWRLVALDYSQIELRVLAHLSGDENLIRVFQEGKDIHTQTASWMFGLSPEAIDPLMRRAAKTINFGVLYGMSAHRLSQELGIPYEEAVAFIQRYFQSYPKVKAWIEKTLEEGRTRGYVETLFGRRRYVPDLNARVKSVREAAERMAFNMPVQGTAADLMKLAMVRLFPQLREVGARMLLQVHDELLLEAPKERAEEVAALAKEVMEGVWPLAVPLEVEVGIGEDWLAAKG

SEQ ID NO: 1165 - DNA, 2529 bp, synthetic construct
  misc_feature 1..2529: note = Variant of DNA polymerase I from Thermus sp. strain 2.9
  source 1..2529: mol_type = other DNA
atgcaccatcatcatcatcatggcggtagcggcatgttaccgttgttcgaacctaaaggtcgcgtgcttctggttgatggccatcatctcgcgtatcgtaacttctttgccctgaaaggattaaccaccagccgtggcgagccggtacagggtgtctacggctttgcaaagtcgctcctgaaagctctgaaagaagacggtgatgtggtgattgttgtctttgatgcgaaagcgccaagttttcgccacgaagcgtacgaagcttacaaagccgggcgtgctccaacgccggaagactttcctcgccaattggcgcttatgaaggaattagtggatttgcttggcctcgaacgcttggaagttcccggtttcgaggcagacgacgtattagcgactctcgcaaagaaagccgaacgtgagggctatgaagtccagatcttgacagcagatcgcgatcttttccagcttttatctccgcgcatctcggtgttacacccggaagggcatcgtatcaccccggaatggctctgggagaaatatggtttgcgtcccgaacaatgggtggattttcgcgccttagcaggcgatccgagcgacaatattccgggagttaaaggtatcggcgagaagacggcgctcaagctccttaaagaatgggggtcgttggagaacttgcttaagaatttagatcaggtcaaaccagagtcagtgcgtgagaagattcttgcacacctcgaagacctcaaattaagccgcgaattgtcccgtgtacgcaccgatttgccgctcgaagttgatttccgtggccgccgcgaacctgactgggagggtcttaaagcgtttttagagcgtcttgaatttggttcgctcttgcatgaattcggccttttagaaagcccgttaccagccgaagaagcaccttggccaccgcccgaaggcgcgtttttaggttaccgtttgagtcgcccggaaccgatgtgggccgaattattggctcttgcagcgtctgcccagggacgtgtgtatcgcgcggaagaccctcatggtgcgctccgcggcctcaaagaagtccgtggactccttgccaaagacttagctgttgttgcattgcgcgaaggtcttgatttacctccgactgatgatccaatgcttcttgcgtacctcttggacccgtcaaacacgacgcccgaaggcgtagcccgtcgttacggcggcgagtggaccgaagatgcaggcgagcgcgcgttattggccgaacgtttgcacgccaatttattaggacgtttgcaaggcgaggaacgtctcctctggctttacgaagaagtggagaaaccattgagtcgcgtgctcgcgcatatggaagctaccggtgtcaaattagacgtggcgtatttggaggcactcagccttgaagttgctgccgaaatgcgccgcttggaggaagaagtattccgtttagcaggccactcctttaaccttaattctcgcgatcagttagaacgtgtgttgttcgatgaacttggtctccctcctatcggcaagacagagatgaccggtaaacgtagcacttcagcggcggttttagaagctcttcgcgaagtccatcccattgtggacaagatcttgcagtaccgcgaactcgcgaaattgaaaggcacctatattgaccctcttccggcattagtccacccgaaaacgggacgcctccatacccgcttcaaccaaacagccacggcgaccggtcgtttgtcctcctctgatccaaaccttcagaatattccagtacgtaccccattgggccagaagatccgccgcgcgtttgtagctgaggagggttggcgtttagtggccctcgattatagccaaattgaattacgtgtccttgcccatctttctggcgatgagaacctcatccgcgtgtttcaggaaggcaaagacattcacactcaaacggcaagctggatgtttggattatcagctgaagcgatcgatcctttgatgcgtcgtgcagcgaagaccatcaatttcggtgttctctacggtatgagtgcccatcgtttgtcgcaggaattaggcattccctatgaagaagctgcggcgttcattcagcgctactttcaaagctatcccaaagttaaagcatggatcgagaagactctcgaagaaggccgcacacgtggttacgtagagaccttatttggacgtcgccgctatgttcccgatttaaacgctcgcgtgaaatctgtccgtgaagccgccgaacgcatggcgttcaacatgcctgtacagggcacggcagctgacctcatgaaacttgcaatggtgcgcctttttccacaattgcgtgaagttggtgcccgcatgctcttgcaggtccacgatgaactcttgttagaagcgccaaaagagcgtgcggaagaggtggcagccctcgcgaaagaggttatggaaggcgtgtggcccttagcggtgcctcttgaagtcgaagttggtattggcgaggattggttggctgccaaaggataatga

SEQ ID NO: 1166 - protein, 841 aa, synthetic construct
  REGION 1..841: note = Variant of DNA polymerase I from Thermus sp. strain 2.9
MHHHHHHGGSGMLPLFEPKGRVLLVDGHHLAYRNFFALKGLTTSRGEPVQGVYGFAKSLLKALKEDGDVVIVVFDAKAPSFRHEAYEAYKAGRAPTPEDFPRQLALMKELVDLLGLERLEVPGFEADDVLATLAKKAEREGYEVQILTADRDLFQLLSPRISVLHPEGHRITPEWLWEKYGLRPEQWVDFRALAGDPSDNIPGVKGIGEKTALKLLKEWGSLENLLKNLDQVKPESVREKILAHLEDLKLSRELSRVRTDLPLEVDFRGRREPDWEGLKAFLERLEFGSLLHEFGLLESPLPAEEAPWPPPEGAFLGYRLSRPEPMWAELLALAASAQGRVYRAEDPHGALRGLKEVRGLLAKDLAVVALREGLDLPPTDDPMLLAYLLDPSNTTPEGVARRYGGEWTEDAGERALLAERLHANLLGRLQGEERLLWLYEEVEKPLSRVLAHMEATGVKLDVAYLEALSLEVAAEMRRLEEEVFRLAGHSFNLNSRDQLERVLFDELGLPPIGKTEMTGKRSTSAAVLEALREVHPIVDKILQYRELAKLKGTYIDPLPALVHPKTGRLHTRFNQTATATGRLSSSDPNLQNIPVRTPLGQKIRRAFVAEEGWRLVALDYSQIELRVLAHLSGDENLIRVFQEGKDIHTQTASWMFGLSAEAIDPLMRRAAKTINFGVLYGMSAHRLSQELGIPYEEAAAFIQRYFQSYPKVKAWIEKTLEEGRTRGYVETLFGRRRYVPDLNARVKSVREAAERMAFNMPVQGTAADLMKLAMVRLFPQLREVGARMLLQVHDELLLEAPKERAEEVAALAKEVMEGVWPLAVPLEVEVGIGEDWLAAKG

SEQ ID NO: 1167 - DNA, 2529 bp, synthetic construct
  misc_feature 1..2529: note = Variant of DNA polymerase I from Thermus sp. strain 2.9
  source 1..2529: mol_type = other DNA
atgcaccatcatcatcatcatggcggtagcggcatgttaccgttgttcgaacctaaaggtcgcgtgcttctggttgatggccatcatctcgcgtatcgtaacttctttgccctgaaaggattaaccaccagccgtggcgagccggtacagggtgtctacggctttgcaaagtcgctcctgaaagctctgaaagaagacggtgatgtggtgattgttgtctttgatgcgaaagcgccaagttttcgccacgaagcgtacgaagcttacaaagccgggcgtgctccaacgccggaagactttcctcgccaattggcgcttatgaaggaattagtggatttgcttggcctcgaacgcttggaagttcccggtttcgaggcagacgacgtattagcgactctcgcaaagaaagccgaacgtgagggctatgaagtccagatcttgacagcagatcgcgatcttttccagcttttatctccgcgcatctcggtgttacacccggaagggcatcgtatcaccccggaatggctctgggagaaatatggtttgcgtcccgaacaatgggtggattttcgcgccttagccggcgatccgagcgacaatattccgggagttaaaggtatcggcgagaagacggcgctcaagctccttaaagaatgggggtcgttggagaacttgcttaagaatttagatcaggtcaaaccagagtcagtgcgtgagaagattcttgcacacctcgaagacctcaaattaagccgcgaattgtcccgtgtacgcaccgatttgccgctcgaagttgatttccgtggccgccgcgaacctgactgggagggtcttaaagcgtttttagagcgtcttgaatttggttcgctcttgcatgaattcggccttttagaaagcccgttaccagccgaagaagcaccttggccaccgcccgaaggcgcgtttttaggttaccgtttgagtcgcccggaaccgatgtgggccgaattattggctcttgcagcgtctgcccagggacgtgtgtatcgcgcggaagaccctcatggtgcgctccgcggcctcaaagaagtccgtggactccttgccaaagacttagctgttgttgcattgcgcgaaggtcttgatttacctccgactgatgatccaatgcttcttgcgtacctcttggacccgtcaaacacgacgcccgaaggcgtagcccgtcgttacggcggcgagtggaccgaagatgcaggcgagcgcgcgttattggccgaacgtttgcaccagaatttattaggacgtttgcaaggcgaggaacgtctcctctggctttacgaagaagtggagaaaccattgagtcgcgtgctccaccatatggaagctaccggtgtcaaattagacgtggcgtatttggaggcactcagccttgaagttgctgccgaactgcgccgcttggaggaagaagtattccgtttagcaggccactcctttaaccttaattctcgcgatcagttagaacgtgtgttgttcgatgaacttggtctccctcctatcggcaagacagagaagaccggtaaacgtagcacttcagcggcggttttagaagctcttcgcgaagtccatcccattgtggacaagatcttgcagtaccgcgaactcgcgaaattgaaaggcacctatattgaccctcttccggcattagtccacccgaaaacgggacgcctccatacccgcttcaaccaaacagccacggcgaccggtcgtttgtcctcctctgatccaaaccttcagaatattccagtacgtaccccattgggccagaagatccgccgcgcgtttgtagctgaggagggttggcgtttagtggccctcgattatagccaaattgaattacgtgtccttgcccatctttctggcgatgagaacctcatccgcgtgtttcaggaaggcaaagacattcacactcaaacggcaagctggatgtttggagtgtcggcggaagcgatcgatcctttgatgcgtcgtgcagcgaagaccatcaatttcggtgttctctacggtatgagtgccgctcgtttgtcgcaggaattaggcattccctatgaagaagctgcggcgttcattcagcgctactttcaaagctatcccaaagttaaagcatggatcgagaagactctcgaagaaggccgcacacgtggttacgtagagaccttatttggacgtcgccgctatgttcccgatttaaacgctcgcgtgaaatctgtccgtgaagccgccgaacgcatggcgttcaacatgcctgtacagggcacggcagctgacctcatgaaacttgcaatggtgcgcctttttccacaattgcgtgaagttggtgcccgcatgctcttgcaggtccacgatgaactcttgttagaagcgccaaaagagcgtgcggaagaggtggcagccctcgcgaaagaggttatggaaggcgtgtggcccttagcggtgcctcttgaagtcgaagttggtattggcgaggattggttggctgccaaaggataatga

SEQ ID NO: 1168 - protein, 841 aa, synthetic construct
  REGION 1..841: note = Variant of DNA polymerase I from Thermus sp. strain 2.9
MHHHHHHGGSGMLPLFEPKGRVLLVDGHHLAYRNFFALKGLTTSRGEPVQGVYGFAKSLLKALKEDGDVVIVVFDAKAPSFRHEAYEAYKAGRAPTPEDFPRQLALMKELVDLLGLERLEVPGFEADDVLATLAKKAEREGYEVQILTADRDLFQLLSPRISVLHPEGHRITPEWLWEKYGLRPEQWVDFRALAGDPSDNIPGVKGIGEKTALKLLKEWGSLENLLKNLDQVKPESVREKILAHLEDLKLSRELSRVRTDLPLEVDFRGRREPDWEGLKAFLERLEFGSLLHEFGLLESPLPAEEAPWPPPEGAFLGYRLSRPEPMWAELLALAASAQGRVYRAEDPHGALRGLKEVRGLLAKDLAVVALREGLDLPPTDDPMLLAYLLDPSNTTPEGVARRYGGEWTEDAGERALLAERLHQNLLGRLQGEERLLWLYEEVEKPLSRVLHHMEATGVKLDVAYLEALSLEVAAELRRLEEEVFRLAGHSFNLNSRDQLERVLFDELGLPPIGKTEKTGKRSTSAAVLEALREVHPIVDKILQYRELAKLKGTYIDPLPALVHPKTGRLHTRFNQTATATGRLSSSDPNLQNIPVRTPLGQKIRRAFVAEEGWRLVALDYSQIELRVLAHLSGDENLIRVFQEGKDIHTQTASWMFGVSAEAIDPLMRRAAKTINFGVLYGMSAARLSQELGIPYEEAAAFIQRYFQSYPKVKAWIEKTLEEGRTRGYVETLFGRRRYVPDLNARVKSVREAAERMAFNMPVQGTAADLMKLAMVRLFPQLREVGARMLLQVHDELLLEAPKERAEEVAALAKEVMEGVWPLAVPLEVEVGIGEDWLAAKG

SEQ ID NO: 1169 - DNA, 2529 bp, synthetic construct
  misc_feature 1..2529: note = Variant of DNA polymerase I from Thermus sp. strain 2.9
  source 1..2529: mol_type = other DNA
atgcaccatcatcatcatcatggcggtagcggcatgttaccgttgttcgaacctaaaggtcgcgtgcttctggttgatggccatcatctcgcgtatcgtaacttctttgccctgaaaggattaaccaccagccgtggcgagccggtacagggtgtctacggctttgcaaagtcgctcctgaaagctctgaaagaagacggtgatgtggtgattgttgtctttgatgcgaaagcgccaagttttcgccacgaagcgtacgaagcttacaaagccgggcgtgctccaacgccggaagactttcctcgccaattggcgcttatgaaggaattagtggatttgcttggcctcgaacgcttggaagttcccggtttcgaggcagacgacgtattagcgactctcgcaaagaaagccgaacgtgagggctatgaagtccagatcttgacagcagatcgcgatcttttccagcttttatctccgcgcatctcggtgttacacccggaagggcatcgtatcaccccggaatggctctgggagaaatatggtttgcgtcccgaacaatgggtggattttcgcgccttagcaggcgatccgagcgacaatattccgggagttaaaggtatcggcgagaagacggcgctcaagctccttaaagaatgggggtcgttggagaacttgcttaagaatttagatcaggtcaaaccagagtcagtgcgtgagaagattcttgcacacctcgaagacctcaaattaagcctggaattgtcccgtgtacgcaccgatttgccgctcgaagttgatttccgtggccgccgcgaacctgactgggagggtcttaaagcgtttttagagcgtcttgaatttggttcgctcttgcatgaattcggccttttagaaagcccgttaccagccgaagaagcaccttggccaccgcccgaaggcgcgtttttaggttaccgtttgagtcgcccggaaccgatgtgggccgaattactggctcttgcagcgtctgcccagggacgtgtgtatcgcgcggaagaccctcatggtgcgctccgcggcctcaaagaagtccgtggactccttgccaaagacttagctgttgttgcattgcgcgaaggtcttgatttacctccgactgatgatccaatgcttcttgcgtacctcttggacccgtcaaacacgacgcccgaaggcgtagcccgtcgttacggcggcgagtggaccgaagatgcaggtaagcgcgcgttattggccgaacgtttgcacgccaatttattaggacgtttgcaaggcgaggaacgtctcctctggctttacgaagaagtggagaaaccattgagtcgcgtgctcgcgcatatggaagctaccggtgtcaaattagacgtggcgtatttggaggcactcagccttgaagttgctgccgaaatgcgccgcttggaggaagaagtattccgtttagcaggccactcctttaaccttaattctcgcgatcagttagaacgtgtgttgttcgatgaacttggtctccctcctatcggcaagacagagaagaccggtaaacgtagcacttcagcggcggttttagaagctcttcgcgaagtccatcccattgtggacaagatcttgcagtaccgcgaactcgcgaaattgaaaggcacctatattgaccctcttccggcattagtccacccgaaaacgggacgcctccatacccgcttcaaccaaacagccacggcgaccggtcgtttgtcctcctctgatccaaaccttcagaatattccagtacgtaccccattgggccagaagatccgccgcgcgtttgtagctgaggagggttggcgtttagtggccctcgattatagccaaattgaattacgtgtccttgcccatctttctggcgatgagaacctcatccgcgtgtttcaggaaggcaaagacattcacactcaaacggcaagctggatgtttggattatcagctgaagcgatcgatcctttgatgcgtcgtgcagcgaagaccattaatttcggtgttctctacggtatgagtgcccatcgtttgtcgcaggaattaggcattccctatgaagaagctgcggcgttcattcagcgctactttcaaagctatcccaaagttaaagcatggatcgagaagactctcgaagaaggccgcacacgtggttacgtagagaccttatttggacgtcgccgctatgttcccgatttaaacgctcgcgtgaaatctgtccgtgaagccgccgaacgcatggcgttcaacatgcctgtacagggcacggcagctgacctcatgaaacttgcaatggtgcgcctttttccacaattgcgtgaagttggtgcccgcatgctcttgcaggtccacgatgaactcttgttagaagcgccaaaagagcgtgcggaagaggtggcagccctcgcgaaagaggttatggaaggcgtgtggcccttagcggtgcctcttgaagtcgaagttggtattggcgaggattggttggctgccaaaggataatga

SEQ ID NO: 1170 - protein, 841 aa, synthetic construct
  REGION 1..841: note = Variant of DNA polymerase I from Thermus sp. strain 2.9
MHHHHHHGGSGMLPLFEPKGRVLLVDGHHLAYRNFFALKGLTTSRGEPVQGVYGFAKSLLKALKEDGDVVIVVFDAKAPSFRHEAYEAYKAGRAPTPEDFPRQLALMKELVDLLGLERLEVPGFEADDVLATLAKKAEREGYEVQILTADRDLFQLLSPRISVLHPEGHRITPEWLWEKYGLRPEQWVDFRALAGDPSDNIPGVKGIGEKTALKLLKEWGSLENLLKNLDQVKPESVREKILAHLEDLKLSLELSRVRTDLPLEVDFRGRREPDWEGLKAFLERLEFGSLLHEFGLLESPLPAEEAPWPPPEGAFLGYRLSRPEPMWAELLALAASAQGRVYRAEDPHGALRGLKEVRGLLAKDLAVVALREGLDLPPTDDPMLLAYLLDPSNTTPEGVARRYGGEWTEDAGKRALLAERLHANLLGRLQGEERLLWLYEEVEKPLSRVLAHMEATGVKLDVAYLEALSLEVAAEMRRLEEEVFRLAGHSFNLNSRDQLERVLFDELGLPPIGKTEKTGKRSTSAAVLEALREVHPIVDKILQYRELAKLKGTYIDPLPALVHPKTGRLHTRFNQTATATGRLSSSDPNLQNIPVRTPLGQKIRRAFVAEEGWRLVALDYSQIELRVLAHLSGDENLIRVFQEGKDIHTQTASWMFGLSAEAIDPLMRRAAKTINFGVLYGMSAHRLSQELGIPYEEAAAFIQRYFQSYPKVKAWIEKTLEEGRTRGYVETLFGRRRYVPDLNARVKSVREAAERMAFNMPVQGTAADLMKLAMVRLFPQLREVGARMLLQVHDELLLEAPKERAEEVAALAKEVMEGVWPLAVPLEVEVGIGEDWLAAKG

SEQ ID NO: 1171 - DNA, 2529 bp, synthetic construct
  misc_feature 1..2529: note = Variant of DNA polymerase I from Thermus sp. strain 2.9
  source 1..2529: mol_type = other DNA
atgcaccatcatcatcatcatggcggtagcggcatgttaccgttgttcgaacctaaaggtcgcgtgcttctggttgatggccatcatctcgcgtatcgtaacttctttgccctgaaaggattaaccaccagccgtggcgagccggtacagggtgtctacggctttgcaaagtcgctcctgaaagctctgaaagaagacggtgatgtggtgattgttgtctttgatgcgaaagcgccaagttttcgccacgaagcgtacgaagcttacaaagccgggcgtgctccaacgccggaagactttcctcgccaattggcgcttatgaaggaattagtggatttgcttggcctcgaacgcttggaagttcccggtttcgaggcagacgacgtattagcgactctcgcaaagaaagccgaacgtgagggctatgaagtccagatcttgacagcagatcgcgatcttttccagcttttatctccgcgcatctcggtgttacacccggaagggcatcgtatcaccccggaatggctctgggagaaatatggtttgcgtcccgaacaatgggtggattttcgcgccttagcaggcgatccgagcgacaatattccgggagttaaaggtatcggcgagaagacggcgctcaagctccttaaagaatgggggtcgttggagaacttgcttaagaatttagatcaggtcaaaccagagtcagtgcgtgagaagattcttgcacacctcgaagacctcaaattaagccgcgaattgtcccgtgtacgcaccgatttgccgctcgaagttgatttccgtggccgccgcgaacctgactgggagggtcttaaagcgtttttagagcgtcttgaatttggttcgctcttgcatgaattcggccttttagaaagcccgttaccagccgaagaagcaccttggccaccgcccgaaggcgcgtttttaggttaccgtttgagtcgcccggaaccgatgtgggccgaattactggctcttgcagcgtctgcccaggagcgtgtgtatcgcgcggaagaccctcatggtgcgctccgcggcctcaaagaagtccgtggactccttgccaaagacttagctgttgttgcattgcgcgaaggtcttgatttacctccgactgatgatccaatgcttcttgcgtacctcttggacccgtcaaacacgacgcccgaaggcgtagcccgtcgttacggcggcgagtggaccgaagatgcagctaagcgcgcgttattggccgaacgtttgcacgccaatttattaggacgtttgcaaggcgaggaacgtctcctctggctttacgaagaagtggagaaaccattgagtcgcgtgctcgcgcatatggaagctaccggtgtcaaattagacgtggcgtatttggaggcactcagccttgaagttgctgccgaaatgcgccgcttggaggaagaagtattccgtttagcaggccactcctttaaccttaattctcgcgatcagttagaacgtgtgttgttcgatgaacttggtctccctcctatcggcaagacagagaagaccggtaaacgtagcacttcagcggcggttttagaagctcttcgcgaagtccatcccattgtggacaagatcttgcagtaccgcgaactcgcgaaattgaaaggcacctatattgaccctcttccggcattagtccacccgaaaacgggacgcctccatacccgcttcaaccaaacagccacggcgaccggtcgtttgtcctcctctgatccaaaccttcagaatattccagtacgtaccccattgggccagaagatccgccgcgcgtttgtagctgaggagggttggcgtttagtggccctcgattatagccaaattgaattacgtgtccttgcccatctttctggcgatgagaacctcatccgcgtgtttcaggaaggcaaagacattcacactcaaacggcaagctggatgtttggattatcagctgaagcgatcgatcctttgatgcgtcgtgcagcgaagaccatcaatttcggtgttctctacggtatgagtgcccatcgtttgtcgcaggaattaggcattccctatgaagaagctgcggcgttcattcagcgctactttcaaagctatcccaaagttaaagcatggatcgagaagactctcgaagaaggccgcacacgtggttacgtagagaccttatttggacgtcgccgctatgttcccgatttaaacgctcgcgtgaaatctgtccgtgaagccgccgaacgcatggcgttcaacatgcctgtacagggcacggcagctgacctcatgaaacttgcaatggtgcgcctttttccacaattgcgtgaagttggtgcccgcatgctcttgcaggtccacgatgaactcttgttagaagcgccaaaagagcgtgcggaagaggtggcagccctcgcgaaagaggttatggaaggcgtgtggcccttagcggtgcctcttgaagtcgaagttggtattggcgaggattggttggctgccaaaggataatga

SEQ ID NO: 1172 - protein, 841 aa, synthetic construct
  REGION 1..841: note = Variant of DNA polymerase I from Thermus sp. strain 2.9
MHHHHHHGGSGMLPLFEPKGRVLLVDGHHLAYRNFFALKGLTTSRGEPVQGVYGFAKSLLKALKEDGDVVIVVFDAKAPSFRHEAYEAYKAGRAPTPEDFPRQLALMKELVDLLGLERLEVPGFEADDVLATLAKKAEREGYEVQILTADRDLFQLLSPRISVLHPEGHRITPEWLWEKYGLRPEQWVDFRALAGDPSDNIPGVKGIGEKTALKLLKEWGSLENLLKNLDQVKPESVREKILAHLEDLKLSRELSRVRTDLPLEVDFRGRREPDWEGLKAFLERLEFGSLLHEFGLLESPLPAEEAPWPPPEGAFLGYRLSRPEPMWAELLALAASAQERVYRAEDPHGALRGLKEVRGLLAKDLAVVALREGLDLPPTDDPMLLAYLLDPSNTTPEGVARRYGGEWTEDAAKRALLAERLHANLLGRLQGEERLLWLYEEVEKPLSRVLAHMEATGVKLDVAYLEALSLEVAAEMRRLEEEVFRLAGHSFNLNSRDQLERVLFDELGLPPIGKTEKTGKRSTSAAVLEALREVHPIVDKILQYRELAKLKGTYIDPLPALVHPKTGRLHTRFNQTATATGRLSSSDPNLQNIPVRTPLGQKIRRAFVAEEGWRLVALDYSQIELRVLAHLSGDENLIRVFQEGKDIHTQTASWMFGLSAEAIDPLMRRAAKTINFGVLYGMSAHRLSQELGIPYEEAAAFIQRYFQSYPKVKAWIEKTLEEGRTRGYVETLFGRRRYVPDLNARVKSVREAAERMAFNMPVQGTAADLMKLAMVRLFPQLREVGARMLLQVHDELLLEAPKERAEEVAALAKEVMEGVWPLAVPLEVEVGIGEDWLAAKG

SEQ ID NO: 1173 - DNA, 2529 bp, synthetic construct
  misc_feature 1..2529: note = Variant of DNA polymerase I from Thermus sp. strain 2.9
  source 1..2529: mol_type = other DNA
atgcaccatcatcatcatcatggcggtagcggcatgttaccgttgttcgaacctaaaggtcgcgtgcttctggttgatggccatcatctcgcgtatcgtaacttctttgccctgaaaggattaaccaccagccgtggcgagccggtacagggtgtctacggctttgcaaagtcgctcctgaaagctctgaaagaagacggtgatgtggtgattgttgtctttgatgcgaaagcgccaagttttcgccacgaagcgtacgaagcttacaaagccgggcgtgctccaacgccggaagactttcctcgccaattggcgcttatgaaggaattagtggatttgcttggcctcgaacgcttggaagttcccggtttcgaggcagacgacgtattagcgactctcgcaaagaaagccgaacgtgagggctatgaagtccagatcttgacagcagatcgcgatcttttccagcttttatctccgcgcatctcggtgttacacccggaagggcatcgtatcaccccggaatggctctgggagaaatatggtttgcgtcccgaacaatgggtggattttcgcgccttagcaggcgatccgagcgacaatattccgggagttaaaggtatcggcgagaagacggcgctcaagctccttaaagaatgggggtcgttggagaacttgcttaagaatttagatcaggtcaaaccagagtcagtgcgtgagaagattcttgcacacctcgaagacctcaaattaagccgcgaattgtcccgtgtacgcaccgatttgccgctcgaagttgatttccgtggccgccgcgaacctgactgggagggtcttaaagcgtttttagagcgtcttgaatttggttcgctcttgcatgaattcggccttttagaaagcccgttaccagccgaagaagcaccttggccaccgcccgaaggcgcgtttttaggttaccgtttgagtcgcccggaaccgatgtgggccgaattattggctcttgcagcgtctgcccagggacgtgtgtatcgcgcggaagaccctcatggtgcgctccgcggcctcaaagaagtccgtggactccttgccaaagacttagctgttgttgcattgcgcgaaggtcttgatttacctccgactgatgatccaatgcttcttgcgtacctcttggacccgtcaaacacgacgcccgaaggcgtagcccgtcgttacggcggcgagtggaccgaagatgcaggcgagcgcgcgttattggccgaacgtttgcacgccaatttattaggacgtttgcaaggcgaggaacgtctcctctggctttacgaagaagtggagaaaccattgagtcgcgtgctcgcgcatatggaagctaccggtgtcaaattagacgtggcgtatttggaggcactcagccttgaagttgctgccgaaatgcgccgcttggaggaagaagtattccgtttagcaggccactcctttaaccttaattctcgcgatcagttagaacgtgtgttgttcgatgaacttggtctccctcctatcggcaagacagagaagaccggtgttcgtagcacttcagcggcggttttagaagctcttcgcgaagtccatcccattgtggacaagatcttgcagtaccgcgaactcgcgaaattgaaaggcacctatattgaccctcttccggcattagtccacccgaaaacgggacgcctccatacccgcttcaaccaaacagccacggcgaccggtcgtttgtcctcctctgatccaaaccttcagaatattccagtacgtaccccattgggccagaagatccgccgcgcgtttgtagctgaggagggttggcgtttagtggccctcgattatagccaaattgaattacgtgtccttgcccatctttctggcgatgagaacctcatccgcgtgtttcaggaaggcaaagacattcacactcaaacggcaagctggatgtttggattatcagctgaagcgatcgatcctttgatgcgtcgtgcagcgaagaccatcaatttcggtgttctctacggtatgagtgcccatcgtttgtcgcaggaattaggcattccctatgaagaagctgcggcgttcattcagcgctactttcaaagctatcccaaagttaaagcatggatcgagaagactctcgaagaaggccgcacacgtggttacgtagagaccttatttggacgtcgccgctatgttcccgatttaaacgctcgcgtgaaatctgtccgtgaagccgccgaacgcatggcgttcaacatgcctgtacagggcacggcagctgacctcatgaaacttgcaatggtgcgcctttttccacaattgcgtgaagttggtgcccgcatgctcttgcaggtccacgatgaactcttgttagaagcgccaaaagagcgtgcggaagaggtggcagccctcgcgaaagaggttatggaaggcgtgtggcccttagcggtgcctcttgaagtcgaagttggtattggcgaggattggttggctgccaaaggataatga

SEQ ID NO: 1174 - protein, 841 aa, synthetic construct
  REGION 1..841: note = Variant of DNA polymerase I from Thermus sp. strain 2.9
MHHHHHHGGSGMLPLFEPKGRVLLVDGHHLAYRNFFALKGLTTSRGEPVQGVYGFAKSLLKALKEDGDVVIVVFDAKAPSFRHEAYEAYKAGRAPTPEDFPRQLALMKELVDLLGLERLEVPGFEADDVLATLAKKAEREGYEVQILTADRDLFQLLSPRISVLHPEGHRITPEWLWEKYGLRPEQWVDFRALAGDPSDNIPGVKGIGEKTALKLLKEWGSLENLLKNLDQVKPESVREKILAHLEDLKLSRELSRVRTDLPLEVDFRGRREPDWEGLKAFLERLEFGSLLHEFGLLESPLPAEEAPWPPPEGAFLGYRLSRPEPMWAELLALAASAQGRVYRAEDPHGALRGLKEVRGLLAKDLAVVALREGLDLPPTDDPMLLAYLLDPSNTTPEGVARRYGGEWTEDAGERALLAERLHANLLGRLQGEERLLWLYEEVEKPLSRVLAHMEATGVKLDVAYLEALSLEVAAEMRRLEEEVFRLAGHSFNLNSRDQLERVLFDELGLPPIGKTEKTGVRSTSAAVLEALREVHPIVDKILQYRELAKLKGTYIDPLPALVHPKTGRLHTRFNQTATATGRLSSSDPNLQNIPVRTPLGQKIRRAFVAEEGWRLVALDYSQIELRVLAHLSGDENLIRVFQEGKDIHTQTASWMFGLSAEAIDPLMRRAAKTINFGVLYGMSAHRLSQELGIPYEEAAAFIQRYFQSYPKVKAWIEKTLEEGRTRGYVETLFGRRRYVPDLNARVKSVREAAERMAFNMPVQGTAADLMKLAMVRLFPQLREVGARMLLQVHDELLLEAPKERAEEVAALAKEVMEGVWPLAVPLEVEVGIGEDWLAAKG

SEQ ID NO: 1175 - DNA, 2529 bp, synthetic construct
  misc_feature 1..2529: note = Variant of DNA polymerase I from Thermus sp. strain 2.9
  source 1..2529: mol_type = other DNA
atgcaccatcatcatcatcatggcggtagcggcatgttaccgttgttcgaacctaaaggtcgcgtgcttctggttgatggccatcatctcgcgtatcgtaacttctttgccctgaaaggattaaccaccagccgtggcgagccggtacagggtgtctacggctttgcaaagtcgctcctgaaagctctgaaagaagacggtgatgtggtgattgttgtctttgatgcgaaagcgccaagttttcgccacgaagcgtacgaagcttacaaagccgggcgtgctccaacgccggaagactttcctcgccaattggcgcttatgaaggaattagtggatttgcttggcctcgaacgcttggaagttcccggtttcgaggcagacgacgtattagcgactctcgcaaagaaagccgaacgtgagggctatgaagtccagatcttgacagcagatcgcgatcttttccagcttttatctccgcgcatctcggtgttacacccggaagggcatcgtatcaccccggaatggctctgggagaaatatggtttgcgtcccgaacaatgggtggattttcgcgccttagcaggcgatccgagcgacaatattccgggagttaaaggtatcggcgagaagacggcgctcaagctccttaaagaatgggggtcgttggagaacttgcttaagaatttagatcaggtcaaaccagagtcagtgcgtgagaagattcttgcacacctcgaagacctcaaattaagccgcgaattgtcccgtgtacgcaccgatttgccgctcgaagttgatttccgtcgtcgccgcgaacctgactgggagggtcttaaagcgtttttagagcgtcttgaatttggttcgctcttgcatgaattcggccttttagaaagcccgttaccagccgaagaagcaccttggccaccgcccgaaggcgcgtttttaggttaccgtttgagtcgcccggaaccgatgtgggccgaattatcggctcttgcagcgtctgcccagggacgtgtgtatcgcgcggaagaccctcatggtgcgctccgcggcctcaaagaagtccgtggactccttgccaaagacttagctgttgttgcattgcgcgaaggtcttgatttacctccgactgatgatccaatgcttcttgcgtacctcttggacccgtcaaacacgacgcccgaaggcgtagcccgtcgttacggcggcgagtggaccgaagatgcaggcgagcgcgcgttattggccgaacgtttgcacgccaatttattaggacgtttgcaaggcgaggaacgtctcctctggctttacgaagaagtggagaaaccattgagtcgcgtgctcgcgcatatggaagctaccggtgtcaaattagacgtggcgtatttggaggcactcagccttgaagttgctgccgaaatgcgccgcttggaggaagaagtattccgtttagcaggccactcctttaaccttaattctcgcgatcagttagaacgtgtgttgttcgatgaacttggtctccctcctatcggcaagacagagaagaccggtaaacgtagcacttcagcggcggttttagaagctcttcgcgaagtccatcccattgtggacaagatcttgcagtaccgcgaactcgcgaaattgaaaggcacctatattgaccctcttccggcattagtccacccgaaaacgggacgcctccatacccgcttcaaccaaacagccacggcgaccggtcgtttgtcctcctctgatccaaaccttcagaatattccagtacgtaccccattgggccagaagatccgccgcgcgtttgtagctgaggagggttggcgtttagtggccctcgattatagccaaattgaattacgtgtccttgcccatctttctggcgatgagaacctcatccgcgtgtttcaggaaggcaaagacattcacactcaaacggcaagctggatgtttggattatcagctgaagcgatcgatcctttgatgcgtcgtgcagcgaagaccgttaatttcggtgttctctacggtatgagtgcccatcgtttgtcgcaggaattaggcattccctatgaagaagctgtcgcgttcattcagcgctactttcaaagctatcccaaagttaaagcatggatcgagaagactctcgaagaaggccgcacacgtggttacgtagagaccttatttggacgtcgccgctatgttcccgatttaaacgctcgcgtgaaatctgtccgtgaagccgccgaacgcatggcgttcaacatgcctgtacagggcacggcagctgacctcatgaaacttgcaatggtgcgcctttttccacaattgcgtgaagttggtgcccgcatgctcttgcaggtccacgatgaactcttgttagaagcgccaaaagagcgtgcggaagaggtggcagccctcgcgaaagaggttatggaaggcgtgtggcccttagcggtgcctcttgaagtcgaagttggtattggcgaggattggttggctgccaaaggataatga

SEQ ID NO: 1176 - protein, 841 aa, synthetic construct
  REGION 1..841: note = Variant of DNA polymerase I from Thermus sp. strain 2.9
MHHHHHHGGSGMLPLFEPKGRVLLVDGHHLAYRNFFALKGLTTSRGEPVQGVYGFAKSLLKALKEDGDVVIVVFDAKAPSFRHEAYEAYKAGRAPTPEDFPRQLALMKELVDLLGLERLEVPGFEADDVLATLAKKAEREGYEVQILTADRDLFQLLSPRISVLHPEGHRITPEWLWEKYGLRPEQWVDFRALAGDPSDNIPGVKGIGEKTALKLLKEWGSLENLLKNLDQVKPESVREKILAHLEDLKLSRELSRVRTDLPLEVDFRRRREPDWEGLKAFLERLEFGSLLHEFGLLESPLPAEEAPWPPPEGAFLGYRLSRPEPMWAELSALAASAQGRVYRAEDPHGALRGLKEVRGLLAKDLAVVALREGLDLPPTDDPMLLAYLLDPSNTTPEGVARRYGGEWTEDAGERALLAERLHANLLGRLQGEERLLWLYEEVEKPLSRVLAHMEATGVKLDVAYLEALSLEVAAEMRRLEEEVFRLAGHSFNLNSRDQLERVLFDELGLPPIGKTEKTGKRSTSAAVLEALREVHPIVDKILQYRELAKLKGTYIDPLPALVHPKTGRLHTRFNQTATATGRLSSSDPNLQNIPVRTPLGQKIRRAFVAEEGWRLVALDYSQIELRVLAHLSGDENLIRVFQEGKDIHTQTASWMFGLSAEAIDPLMRRAAKTVNFGVLYGMSAHRLSQELGIPYEEAVAFIQRYFQSYPKVKAWIEKTLEEGRTRGYVETLFGRRRYVPDLNARVKSVREAAERMAFNMPVQGTAADLMKLAMVRLFPQLREVGARMLLQVHDELLLEAPKERAEEVAALAKEVMEGVWPLAVPLEVEVGIGEDWLAAKG

SEQ ID NO: 1177 - DNA, 2529 bp, synthetic construct
  misc_feature 1..2529: note = Variant of DNA polymerase I from Thermus sp. strain 2.9
  source 1..2529: mol_type = other DNA
atgcaccatcatcatcatcatggcggtagcggcatgttaccgttgttcgaacctaaaggtcgcgtgcttctggttgatggccatcatctcgcgtatcgtaacttctttgccctgaaaggattaaccaccagccgtggcgagccggtacagggtgtctacggctttgcaaagtcgctcctgaaagctctgaaagaagacggtgatgtggtgattgttgtctttgatgcgaaagcgccaagttttcgccacgaagcgtacgaagcttacaaagccgggcgtgctccaacgccggaagactttcctcgccaattggcgcttatgaaggaattagtggatttgcttggcctcgaacgcttggaagttcccggtttcgaggcagacgacgtattagcgactctcgcaaagaaagccgaacgtgagggctatgaagtccagatcttgacagcagatcgcgatcttttccagcttttatctccgcgcatctcggtgttacacccggaagggcatcgtatcaccccggaatggctctgggagaaatatggtttgcgtcccgaacaatgggtggattttcgcgccttagcaggcgatccgagcgacaatattccgggagttaaaggtatcggcgagaagacggcgctcaagctccttaaagaatgggggtcgttggagaacttgcttaagaatttagatcaggtcaaaccagagtcagtgcgtgagaagattcttgcacacctcgaagacctcaaattaagccgcgaattgtcccgtgtacgcaccgatttgccgctcgaagttgatttccgtggccgccgcgaacctgactgggagggtcttaaagcgtttttagagcgtcttgaatttggttcgctcttgcatgaattcggccttttagaaagcccgttaccagccgaagaagcaccttggccaccgcccgaaggcgcgtttttaggttaccgtttgagtcgcccggaaccgatgtgggccgaattattggctcttgcagcgtctgcccagggacgtgtgtatcgcgcggaagaccctcatggtgcgctccgcggcctcaaagaagtccgtggactccttgccaaagacttagctgttgttgcattgcgcgaaggtcttgatttacctccgactgatgatccaatgcttcttgcgtacctcttggacccgtcaaacacgacgcccgaaggcgtagcccgtcgttacggcggcgagtggaccgaagatgcaggcgagcgcgcgttattggccgaacgtttgcacgccaatttattaggacgtttgcaaggcgaggaacgtctcctctggctttacgaagaagtggagaaaccattgagtcgcgtgctcgcgcatatggaagctaccggtgtcaaattagacgtggcgtatttggaggcactcagccttgaagttgctgccgaaatggagcgcttggaggaagaagtattccgtttagcaggccactcctttaaccttaattctcgcgatcagttagaacgtgtgttgttcgatgaacttggtctccctcctatcggcaagacagagaagaccggtaaacgtagcacttcagcggcggttttagaagctcttcgcgaagtccatcccattgtggacaagatcttgcagtaccgcgaactcgcgaaattgaaaggcacctatattgaccctcttccggcattagtccacccgaaaacgggacgcctccatacccgcttcaaccaaacagccacggcgaccggtcgtttgtcctcctctgatccaaaccttcagaatattccagtacgtaccccattgggccagaagatccgccgcgcgtttgtagctgaggagggttggcgtttagtggccctcgattatagccaaattgaattacgtgtccttgcccatctttctggcgatgagaacctcatccgcgtgtttcaggaaggcaaagacattcacactcaaacggcaagctggatgtttggattatcagctgaagcgatcgatcctttgatgcgtcgtgcagcgaagaccatcaatttcggtgttctctacggtatgagtgcccatcgtttgtcgcaggaattaggcattccctatgaagaagctgcggcgttcattcagcgctactttcaaagctatcccaaagttaaagcatggatcgagaagactctcgaagaaggccgcacacgtggttacgtagagaccttatttggacgtcgccgctatgttcccgatttaaacgctcgcgtgaaatctgtccgtgaagccgccgaacgcatggcgttcaacatgcctgtacagggcacggcagctgacctcatgaaacttgcaatggtgcgcctttttccacaattgcgtgaagttggtgcccgcatgctcttgcaggtccacgatgaactcttgttagaagcgccaaaagagcgtgcggaagaggtggcagccctcgcgaaagaggttatggaaggcgtgtggcccttagcggtgcctcttgaagtcgaagttggtattggcgaggattggttggctgccaaaggataatga

SEQ ID NO: 1178 - protein, 841 aa, synthetic construct
  REGION 1..841: note = Variant of DNA polymerase I from Thermus sp. strain 2.9
MHHHHHHGGSGMLPLFEPKGRVLLVDGHHLAYRNFFALKGLTTSRGEPVQGVYGFAKSLLKALKEDGDVVIVVFDAKAPSFRHEAYEAYKAGRAPTPEDFPRQLALMKELVDLLGLERLEVPGFEADDVLATLAKKAEREGYEVQILTADRDLFQLLSPRISVLHPEGHRITPEWLWEKYGLRPEQWVDFRALAGDPSDNIPGVKGIGEKTALKLLKEWGSLENLLKNLDQVKPESVREKILAHLEDLKLSRELSRVRTDLPLEVDFRGRREPDWEGLKAFLERLEFGSLLHEFGLLESPLPAEEAPWPPPEGAFLGYRLSRPEPMWAELLALAASAQGRVYRAEDPHGALRGLKEVRGLLAKDLAVVALREGLDLPPTDDPMLLAYLLDPSNTTPEGVARRYGGEWTEDAGERALLAERLHANLLGRLQGEERLLWLYEEVEKPLSRVLAHMEATGVKLDVAYLEALSLEVAAEMERLEEEVFRLAGHSFNLNSRDQLERVLFDELGLPPIGKTEKTGKRSTSAAVLEALREVHPIVDKILQYRELAKLKGTYIDPLPALVHPKTGRLHTRFNQTATATGRLSSSDPNLQNIPVRTPLGQKIRRAFVAEEGWRLVALDYSQIELRVLAHLSGDENLIRVFQEGKDIHTQTASWMFGLSAEAIDPLMRRAAKTINFGVLYGMSAHRLSQELGIPYEEAAAFIQRYFQSYPKVKAWIEKTLEEGRTRGYVETLFGRRRYVPDLNARVKSVREAAERMAFNMPVQGTAADLMKLAMVRLFPQLREVGARMLLQVHDELLLEAPKERAEEVAALAKEVMEGVWPLAVPLEVEVGIGEDWLAAKG

SEQ ID NO: 1179 - DNA, 2529 bp, synthetic construct
  misc_feature 1..2529: note = Variant of DNA polymerase I from Thermus sp. strain 2.9
  source 1..2529: mol_type = other DNA
atgcaccatcatcatcatcatggcggtagcggcatgttaccgttgttcgaacctaaaggtcgcgtgcttctggttgatggccatcatctcgcgtatcgtaacttctttgccctgaaaggattaaccaccagccgtggcgagccggtacagggtgtctacggctttgcaaagtcgctcctgaaagctctgaaagaagacggtgatgtggtgattgttgtctttgatgcgaaagcgccaagttttcgccacgaagcgtacgaagcttacaaagccgggcgtgctccaacgccggaagactttcctcgccaattggcgcttatgaaggaattagtggatttgcttggcctcgaacgcttggaagttcccggtttcgaggcagacgacgtattagcgactctcgcaaagaaagccgaacgtgagggctatgaagtccagatcttgacagcagatcgcgatcttttccagcttttatctccgcgcatctcggtgttacacccggaagggcatcgtatcaccccggaatggctctgggagaaatatggtttgcgtcccgaacaatgggtggattttcgcgccttagcaggcgatccgagcgacaatattccgggagttaaaggtatcggcgagaagacggcgctcaagctccttaaagaatgggggtcgttggagaacttgcttaagaatttagatcaggtcaaaccagagtcagtgcgtgagaagattcttgcacacctcgaagacctcaaattaagccgcgaattgtcccgtgtacgcaccgatttgccgctcgaagttgatttcgctggccgccgcgaacctgactgggagggtcttaaagcgtttttagagcgtcttgaatttggttcgctcttgcatgaattcggccttttagaaagcccgttaccagccgaagaagcaccttggccaccgcccgaaggcgcgtttttaggttaccgtttgagtcgcccggaaccgatgtgggccgaattattggctcttgcagcgtctgcccagggacgtgtgtatcgcgcggaagaccctcatggtgcgctccgcggcctcaaagaagtccgtggactccttgccaaagacttagctgttgttgcattgcgcgaaggtcttgatttacctccgactgatgatccaatgcttcttgcgtacctcttggacccgtcaaacacgacgcccgaaggcgtagcccgtcgttacggcggcgagtggaccgaagatgcaggcgagcgcgcgttattggccgaacgtttgcacgccaatttattaggacgtttgcaaggcgaggaacgtctcctctggctttacgaagaagtggagaaaccattgagtcgcgtgctcgcgcatatggaagctaccggtgtcaaattagacgtggcgtatttggaggcactcagccttgaagttgctgccgaaatgcgccgcttggaggaagaagtattccgtttagcaggccactcctttaaccttaattctcgcgatcagttagaacgtgtgttgttcgatgaacttggtctccctcctatcggcaagacagagaagaccggtaaacgtagcacttcagcggcggttttagaagctcttcgcgaagtccatcccattgtggacaagatcttgcagtaccgcgaactcgcgaaattgaaaggcacctatattgaccctcttccggcattagtccacccgaaaacgggacgcctccatacccgcttcaaccaaacagccacggcgaccggtcgtttgtcctcctctgatccaaaccttcagaatattccagtacgtaccccattgggccagaagatccgccgcgcgtttgtagctgaggagggttggcgtttagtggccctcgattataaccaaattgaattacgtgtccttgcccatctttctggcgatgagaacctcatccgcgtgtttcaggaaggcaaagacattcacactcaaacggcaagctggatgtttggattatcagctgaagcgatcgatcctttgatgcgtcgtgcagcgaagaccatcaatttcggtgttctctacggtatgagtgcccatcgtttgtcgcaggaattaggcattccctatgaagaagctgcggcgttcattcagcgctactttcaaagctatcccaaagttaaagcatggatcgagaagactctcgaagaaggccgcacacgtggttacgtagagaccttatttggacgtcgccgctatgttcccgatttaaacgctcgcgtgaaatctgtccgtgaagccgccgaacgcatggcgttcaacatgcctgtacagggcacggcagctgacctcatgaaacttgcaatggtgcgcctttttccacaattgcgtgaagttggtgcccgcatgctcttgcaggtccacgatgaactcttgttagaagcgccaaaagagcgtgcggaagaggtggcagccctcgcgaaagaggttatggaaggcgtgtggcccttagcggtgcctcttgaagtcgaagttggtattggcgaggattggttggctgccaaaggataatga

SEQ ID NO: 1180 - protein, 841 aa, synthetic construct
  REGION 1..841: note = Variant of DNA polymerase I from Thermus sp. strain 2.9
MHHHHHHGGSGMLPLFEPKGRVLLVDGHHLAYRNFFALKGLTTSRGEPVQGVYGFAKSLLKALKEDGDVVIVVFDAKAPSFRHEAYEAYKAGRAPTPEDFPRQLALMKELVDLLGLERLEVPGFEADDVLATLAKKAEREGYEVQILTADRDLFQLLSPRISVLHPEGHRITPEWLWEKYGLRPEQWVDFRALAGDPSDNIPGVKGIGEKTALKLLKEWGSLENLLKNLDQVKPESVREKILAHLEDLKLSRELSRVRTDLPLEVDFAGRREPDWEGLKAFLERLEFGSLLHEFGLLESPLPAEEAPWPPPEGAFLGYRLSRPEPMWAELLALAASAQGRVYRAEDPHGALRGLKEVRGLLAKDLAVVALREGLDLPPTDDPMLLAYLLDPSNTTPEGVARRYGGEWTEDAGERALLAERLHANLLGRLQGEERLLWLYEEVEKPLSRVLAHMEATGVKLDVAYLEALSLEVAAEMRRLEEEVFRLAGHSFNLNSRDQLERVLFDELGLPPIGKTEKTGKRSTSAAVLEALREVHPIVDKILQYRELAKLKGTYIDPLPALVHPKTGRLHTRFNQTATATGRLSSSDPNLQNIPVRTPLGQKIRRAFVAEEGWRLVALDYNQIELRVLAHLSGDENLIRVFQEGKDIHTQTASWMFGLSAEAIDPLMRRAAKTINFGVLYGMSAHRLSQELGIPYEEAAAFIQRYFQSYPKVKAWIEKTLEEGRTRGYVETLFGRRRYVPDLNARVKSVREAAERMAFNMPVQGTAADLMKLAMVRLFPQLREVGARMLLQVHDELLLEAPKERAEEVAALAKEVMEGVWPLAVPLEVEVGIGEDWLAAKG

SEQ ID NO: 1181 - DNA, 2529 bp, synthetic construct
  misc_feature 1..2529: note = Variant of DNA polymerase I from Thermus sp. strain 2.9
  source 1..2529: mol_type = other DNA
atgcaccatcatcatcatcatggcggtagcggcatgttaccgttgttcgaacctaaaggtcgcgtgcttctggttgatggccatcatctcgcgtatcgtaacttctttgccctgaaaggattaaccaccagccgtggcgagccggtacagggtgtctacggctttgcaaagtcgctcctgaaagctctgaaagaagacggtgatgtggtgattgttgtctttgatgcgaaagcgccaagttttcgccacgaagcgtacgaagcttacaaagccgggcgtgctccaacgccggaagactttcctcgccaattggcgcttatgaaggaattagtggatttgcttggcctcgaacgcttggaagttcccggtttcgaggcagacgacgtattagcgactctcgcaaagaaagccgaacgtgagggctatgaagtccagatcttgacagcagatcgcgatcttttccagcttttatctccgcgcatctcggtgttacacccggaagggcatcgtatcaccccggaatggctctgggagaaatatggtttgcgtcccgaacaatgggtggattttcgcgccttagcaggcgatccgagcgacaatattccgggagttaaaggtatcggcgagaagacggcgctcaagctccttaaagaatgggggtcgttggagaacttgcttaagaatttagatcaggtcaaaccagagtcagtgcgtgagaagattcttgcacacctcgaagacctcaaattaagcctggaattgtcccgtgtacgcaccgatttgccgctcgaagttgatttccgtggtcgccgcgaacctgactgggagggtcttaaagcgtttttagagcgtcttgaatttggttcgctcttgcatgaattcggccttttagaaagcccgttaccagccgaagaagcaccttggccaccgcccgaaggcgcgtttttaggttaccgtttgagtcgcccggaaccgatgtgggccgaattatcggctcttgcagcgtctgcccaggggcgtgtgtatcgcgcggaagaccctcatggtgcgctccgcggcctcaaagaagtccgtggactccttgccaaagacttagctgttgttgcattgcgcgaaggtcttgatttacctccgactgatgatccaatgcttcttgcgtacctcttggacccgtcaaacacgacgcccgaaggcgtagcccgtcgttacggcggcgagtggaccgaagatgcaggcgagcgcgcgttattggccgaacgtttgcacgccaatttattaggacgtttgcaaggcgaggaacgtctcctctggctttacgaagaagtggagaaaccattgagtcgcgtgctcgcgcatatggaagctaccggtgtcaaattagacgtggcgtatttggaggctctcagccttgaagttgctgccgaaatgcgccgcttggaggaagaagtattccgtttagcaggccactcctttaaccttaattctcgcgatcagttagaacgtgtgttgttcgatgagcttggtctccctcctatcggcaagacagagaagaccggtaaacgtagcacttcagcggcggttttagaagctcttcgcgaagtccatcccattgtggacaagatcttgcagtaccgcgaactcgcgaaattgaaaggcacctatattgaccctcttccggcattagtccacccgaaaacgggacgcctccatacccgcttcaaccaaacagccacggcgaccggtcgtttgtcctcctctgatccaaaccttcagaatattccagtacgtaccccattgggccagaagatccgccgcgcgtttgtagctgaggagggttggcgtttagtggccctcgattatagccaaattgaattacgtgtccttgcccatctttctggcgatgagaacctcatccgcgtgtttcaggaaggcaaagacattcacactcaaacggcaagctggatgtttggattatcaccagaagcgatcgatcctttgatgcgtcgtgcagcgaagaccattaatttcggtgttctctacggtatgagtgcccatcgtttgtcgcaggaattaggcattccctatgaagaagctgcggcgttcattcagcgctactttcaaagctatcccaaagttaaagcatggatcgagaagactctcgaagaaggccgcacacgtggttacgtagagaccttatttggacgtcgccgctatgttcccgatttaaacgctcgcgtgaaatctgtccgtgaagccgccgaacgcatggcgttcaacatgcctgtacagggcacggcagctgacctcatgaaacttgcaatggtgcgcctttttccacaattgcgtgaagttggtgcccgcatgctcttgcaggtccacgatgaactcttgttagaagcgccaaaagagcgtgcggaagaggtggcagccctcgcgaaagaggttatggaaggcgtgtggcccttagcggtgcctcttgaagtcgaagttggtattggcgaggattggttggctgccaaaggataatga

SEQ ID NO: 1182 - protein, 841 aa, synthetic construct
  REGION 1..841: note = Variant of DNA polymerase I from Thermus sp. strain 2.9
MHHHHHHGGSGMLPLFEPKGRVLLVDGHHLAYRNFFALKGLTTSRGEPVQGVYGFAKSLLKALKEDGDVVIVVFDAKAPSFRHEAYEAYKAGRAPTPEDFPRQLALMKELVDLLGLERLEVPGFEADDVLATLAKKAEREGYEVQILTADRDLFQLLSPRISVLHPEGHRITPEWLWEKYGLRPEQWVDFRALAGDPSDNIPGVKGIGEKTALKLLKEWGSLENLLKNLDQVKPESVREKILAHLEDLKLSLELSRVRTDLPLEVDFRGRREPDWEGLKAFLERLEFGSLLHEFGLLESPLPAEEAPWPPPEGAFLGYRLSRPEPMWAELSALAASAQGRVYRAEDPHGALRGLKEVRGLLAKDLAVVALREGLDLPPTDDPMLLAYLLDPSNTTPEGVARRYGGEWTEDAGERALLAERLHANLLGRLQGEERLLWLYEEVEKPLSRVLAHMEATGVKLDVAYLEALSLEVAAEMRRLEEEVFRLAGHSFNLNSRDQLERVLFDELGLPPIGKTEKTGKRSTSAAVLEALREVHPIVDKILQYRELAKLKGTYIDPLPALVHPKTGRLHTRFNQTATATGRLSSSDPNLQNIPVRTPLGQKIRRAFVAEEGWRLVALDYSQIELRVLAHLSGDENLIRVFQEGKDIHTQTASWMFGLSPEAIDPLMRRAAKTINFGVLYGMSAHRLSQELGIPYEEAAAFIQRYFQSYPKVKAWIEKTLEEGRTRGYVETLFGRRRYVPDLNARVKSVREAAERMAFNMPVQGTAADLMKLAMVRLFPQLREVGARMLLQVHDELLLEAPKERAEEVAALAKEVMEGVWPLAVPLEVEVGIGEDWLAAKG

SEQ ID NO: 1183 - DNA, 2529 bp, synthetic construct
  misc_feature 1..2529: note = Variant of DNA polymerase I from Thermus sp. strain 2.9
  source 1..2529: mol_type = other DNA
atgcaccatcatcatcatcatggcggtagcggcatgttaccgttgttcgaacctaaaggtcgcgtgcttctggttgatggccatcatctcgcgtatcgtaacttctttgccctgaaaggattaaccaccagccgtggcgagccggtacagggtgtctacggctttgcaaagtcgctcctgaaagctctgaaagaagacggtgatgtggtgattgttgtctttgatgcgaaagcgccaagttttcgccacgaagcgtacgaagcttacaaagccgggcgtgctccaacgccggaagactttcctcgccaattggcgcttatgaaggaattagtggatttgcttggcctcgaacgcttggaagttcccggtttcgaggcagacgacgtattagcgactctcgcaaagaaagccgaacgtgagggctatgaagtccagatcttgacagcagatcgcgatcttttccagcttttatctccgcgcatctcggtgttacacccggaagggcatcgtatcaccccggaatggctctgggagaaatatggtttgcgtcccgaacaatgggtggattttcgcgccttagcaggcgatccgagcgacaatattccgggagttaaaggtatcggcgagaagacggcgctcaagctccttaaagaatgggggtcgttggagaacttgcttaagagtttagatcaggtcaaaccagagtcagtgcgtgagaagattcttgcacacctcgaagacctcaaattaagccgcgaattgtcccgtgtacgcaccgatttgccgctcgaagttgatttccgtggccgccgcgaacctgactgggagggtcttaaagcgtttttagagcgtcttgaatttggttcgctcttgcatgaattcggccttttagaaagcccgttaccagccgaagaagcaccttggccaccgcccgaaggcgcgtttttaggttaccgtttgagtcgcccggaaccgatgtgggccgaattattggctcttgcagcgtctgcccagggacgtgtgtatcgcgcggaagaccctcatggtgcgctccgcggcctcaaagaagtccgtggactccttgccaaagacttagctgttgttgcattgcgcgaaggtcttgatttacctccgactgatgatccaatgcttcttgcgtacctcttggacccgtcaaacacgacgcccgaaggcgtagcccgtcgttacggcggcgagtggaccgaagatgcaggcgagcgcgcgttattggccgaacgtttgcacgccaatttattaggacgtttgcaaggcgaggaacgtctcctctggctttacgaagaagtggagaaaccattgagtcgcgtgctcgcgcatatggaagctaccggtgtcaaattagacgtggcgtatttggaggcactcagccttgaagttgctgccgaaatgcgccgcttggaggaagaagtattccgtttagcaggccactcctttaaccttaattctcgcgatcagttagaacgtgtgttgttcgatgaacttggtctccctcctatcggcaagacagagaagaccggtaaacgtagcacttcagcggcggttttagaagctcttcgcgaagtccatcccattgtggacaagatcttgcagtaccgcgaactcgcgaaattgaaaggcacctatattgaccctcttccggcattagtccacccgaaaacgggacgcctccatacccgcttcaaccaaacagccacggcgaccggtcgtttgtcctcctctgatccaaaccttcagaatattccagtacgtaccccattgggccagaagatccgccgcgcgtttgtagctgaggagggttggcgtttagtggccctcgattatagccaaattgaattacgtgtccttgcccatctttctggcgatgagaacctcatccgcgtgtttcaggaaggcaaagacattcacactcaaacggcaagctggatgtttggattatcagctgaagcgatcgatcctttgatgcgtcgtgcagcgaagaccatcaatttcggtgttctctacggtatgagtgcccatcgtttgtcgcaggaattaggcattccctatgaagaagctgcggcgttcattcagcgctactttcaaagctatcccaaagttaaagcatggatcgagaagactctcgaagaaggccgcacacgtggttacgtagagaccttatttggacgtcgccgctatgttcccgatttaaacgctcgcgtgaaatctgtccgtgaagccgccgaacgcatggcgttcaacatgcctgtacagggcacggcagctgacctcatgaaacttgcaatggtgcgcctttttccacaattgcgtgaagttggtgcccgcatgctcttgcaggtccacgatgaactcttgttagaagcgccaaaagagcgtgcggaagaggtggcagccctcgcgaaagaggttatggaaggcgtgtggcccttagcggtgcctcttgaagtcgaagttggtattggcgaggattggttggctgccaaaggataatga

SEQ ID NO: 1184 - protein, 841 aa, synthetic construct
  REGION 1..841: note = Variant of DNA polymerase I from Thermus sp. strain 2.9
MHHHHHHGGSGMLPLFEPKGRVLLVDGHHLAYRNFFALKGLTTSRGEPVQGVYGFAKSLLKALKEDGDVVIVVFDAKAPSFRHEAYEAYKAGRAPTPEDFPRQLALMKELVDLLGLERLEVPGFEADDVLATLAKKAEREGYEVQILTADRDLFQLLSPRISVLHPEGHRITPEWLWEKYGLRPEQWVDFRALAGDPSDNIPGVKGIGEKTALKLLKEWGSLENLLKSLDQVKPESVREKILAHLEDLKLSRELSRVRTDLPLEVDFRGRREPDWEGLKAFLERLEFGSLLHEFGLLESPLPAEEAPWPPPEGAFLGYRLSRPEPMWAELLALAASAQGRVYRAEDPHGALRGLKEVRGLLAKDLAVVALREGLDLPPTDDPMLLAYLLDPSNTTPEGVARRYGGEWTEDAGERALLAERLHANLLGRLQGEERLLWLYEEVEKPLSRVLAHMEATGVKLDVAYLEALSLEVAAEMRRLEEEVFRLAGHSFNLNSRDQLERVLFDELGLPPIGKTEKTGKRSTSAAVLEALREVHPIVDKILQYRELAKLKGTYIDPLPALVHPKTGRLHTRFNQTATATGRLSSSDPNLQNIPVRTPLGQKIRRAFVAEEGWRLVALDYSQIELRVLAHLSGDENLIRVFQEGKDIHTQTASWMFGLSAEAIDPLMRRAAKTINFGVLYGMSAHRLSQELGIPYEEAAAFIQRYFQSYPKVKAWIEKTLEEGRTRGYVETLFGRRRYVPDLNARVKSVREAAERMAFNMPVQGTAADLMKLAMVRLFPQLREVGARMLLQVHDELLLEAPKERAEEVAALAKEVMEGVWPLAVPLEVEVGIGEDWLAAKG

SEQ ID NO: 1185 - DNA, 2529 bp, synthetic construct
  misc_feature 1..2529: note = Variant of DNA polymerase I from Thermus sp. strain 2.9
  source 1..2529: mol_type = other DNA
atgcaccatcatcatcatcatggcggtagcggcatgttaccgttgttcgaacctaaaggtcgcgtgcttctggttgatggccatcatctcgcgtatcgtaacttctttgccctgaaaggattaaccaccagccgtggcgagccggtacagggtgtctacggctttgcaaagtcgctcctgaaagctctgaaagaagacggtgatgtggtgattgttgtctttgatgcgaaagcgccaagttttcgccacgaagcgtacgaagcttacaaagccgggcgtgctccaacgccggaagactttcctcgccaattggcgcttatgaaggaattagtggatttgcttggcctcgaacgcttggaagttcccggtttcgaggcagacgacgtattagcgactctcgcaaagaaagccgaacgtgagggctatgaagtccagatcttgacagcagatcgcgatcttttccagcttttatctccgcgcatctcggtgttacacccggaagggcatcgtatcaccccggaatggctctgggagaaatatggtttgcgtcccgaacaatgggtggattttcgcgccttagcaggcgatccgagcgacaatattccgggagttaaaggtatcggcgagaagacggcgctcaagctccttaaagaatgggggtcgttggagaacttgcttaagaatttagatcaggtcaaaccagagtcagtgcgtgagaagattcttgcacacctcgaagacctcaaattaagcctggaattgtcccgtgtacgcaccgatttgccgctcgaagttgatttccgtggccgccgcgaacctgactgggagggtcttaaagcgtttttagagcgtcttgaatttggttcgctcttgcatgaattcggccttttagaaagcccgttaccagccgaagaagcaccttggccaccgcccgaaggcgcgtttttaggttaccgtttgagtcgcccggaaccgatgtgggccgaattattggctcttgcagcgtctgcccagggacgtgtgtatcgcgcggaagaccctcatggtgcgctcaagggcctcaaagaagtccgtggactccttgccaaagacttagctgttgttgcattgcgcgaaggtcttgatttacctccgactgatgatccaatgcttcttgcgtacctcttggacccgtcaaacacgacgcccgaaggcgtagcccgtcgttacggcggcgagtggaccgaagatgcagctgagcgcgcgttattggccgaacgtttgcacgccaatttattaggacgtttgcaaggcgaggaacgtctcctctggctttacgaagaagtggagaaaccattgagtcgcgtgctcgcgcatatggaagctaccggtgtcaaattagacgtggcgtatttggaggcactcagccttgaagttgctgccgaaatgcgccgcttggaggaagaagtattccgtttagcaggccactcctttaaccttaattctcgcgatcagttagaacgtgtgttgttcgatgaacttggtctccctcctatcggcaagacagagaagaccggtaaacgtagcacttcagcggcggttttagaagctcttcgcgaagtccatcccattgtggacaagatcttgcagtaccgcgaactcgcgaaattgaaaggcacctatattgaccctcttccggcattagtccacccgaaaacgggacgcctccatacccgcttcaaccaaacagccacggcgaccggtcgtttgtcctcctctgatccaaaccttcagaatattccagtacgtaccccattgggccagaagatccgccgcgcgtttgtagctgaggagggttggcgtttagtggccctcgattatagccaaattgaattacgtgtccttgcccatctttctggcgatgagaacctcatccgcgtgtttcaggaaggcaaagacattcacactcaaacggcaagctggatgtttggattatcagcagaagcgatcgatcctttgatgcgtcgtgcagcgaagaccattaatttcggtgttctctacggtatgagtgcccatcgtttgtcgcaggaattaggcattccctatgaagaagctgcggcgttcattcagcgctactttcaaagctatcccaaagttaaagcatggatcgagaagactctcgaagaaggccgcacacgtggttacgtagagaccttatttggacgtcgccgctatgttcccgatttaaacgctcgcgtgaaatctgtccgtgaagccgccgaacgcatggcgttcaacatgcctgtacagggcacggcagctgacctcatgaaacttgcaatggtgcgcctttttccacaattgcgtgaagttggtgcccgcatgctcttgcaggtccacgatgaactcttgttagaagcgccaaaagagcgtgcggaagaggtggcagccctcgcgaaagaggttatggaaggcgtgtggcccttagcggtgcctcttgaagtcgaagttggtattggcgaggattggttggctgccaaaggataatga

SEQ ID NO: 1186 - protein, 841 aa, synthetic construct
  REGION 1..841: note = Variant of DNA polymerase I from Thermus sp. strain 2.9
MHHHHHHGGSGMLPLFEPKGRVLLVDGHHLAYRNFFALKGLTTSRGEPVQGVYGFAKSLLKALKEDGDVVIVVFDAKAPSFRHEAYEAYKAGRAPTPEDFPRQLALMKELVDLLGLERLEVPGFEADDVLATLAKKAEREGYEVQILTADRDLFQLLSPRISVLHPEGHRITPEWLWEKYGLRPEQWVDFRALAGDPSDNIPGVKGIGEKTALKLLKEWGSLENLLKNLDQVKPESVREKILAHLEDLKLSLELSRVRTDLPLEVDFRGRREPDWEGLKAFLERLEFGSLLHEFGLLESPLPAEEAPWPPPEGAFLGYRLSRPEPMWAELLALAASAQGRVYRAEDPHGALKGLKEVRGLLAKDLAVVALREGLDLPPTDDPMLLAYLLDPSNTTPEGVARRYGGEWTEDAAERALLAERLHANLLGRLQGEERLLWLYEEVEKPLSRVLAHMEATGVKLDVAYLEALSLEVAAEMRRLEEEVFRLAGHSFNLNSRDQLERVLFDELGLPPIGKTEKTGKRSTSAAVLEALREVHPIVDKILQYRELAKLKGTYIDPLPALVHPKTGRLHTRFNQTATATGRLSSSDPNLQNIPVRTPLGQKIRRAFVAEEGWRLVALDYSQIELRVLAHLSGDENLIRVFQEGKDIHTQTASWMFGLSAEAIDPLMRRAAKTINFGVLYGMSAHRLSQELGIPYEEAAAFIQRYFQSYPKVKAWIEKTLEEGRTRGYVETLFGRRRYVPDLNARVKSVREAAERMAFNMPVQGTAADLMKLAMVRLFPQLREVGARMLLQVHDELLLEAPKERAEEVAALAKEVMEGVWPLAVPLEVEVGIGEDWLAAKG

SEQ ID NO: 1187 - DNA, 2529 bp, synthetic construct
  misc_feature 1..2529: note = Variant of DNA polymerase I from Thermus sp. strain 2.9
  source 1..2529: mol_type = other DNA
atgcaccatcatcatcatcatggcggtagcggcatgttaccgttgttcgaacctaaaggtcgcgtgcttctggttgatggccatcatctcgcgtatcgtaacttctttgccctgaaaggattaaccaccagccgtggcgagccggtacagggtgtctacggctttgcaaagtcgctcctgaaagctctgaaagaagacggtgatgtggtgattgttgtctttgatgcgaaagcgccaagttttcgccacgaagcgtacgaagcttacaaagccgggcgtgctccaacgccggaagactttcctcgccaattggcgcttatgaaggaattagtggatttgcttggcctcgaacgcttggaagttcccggtttcgaggcagacgacgtattagcgactctcgcaaagaaagccgaacgtgagggctatgaagtccagatcttgacagcagatcgcgatcttttccagcttttatctccgcgcatctcggtgttacacccggaagggcatcgtatcaccccggaatggctctgggagaaatatggtttgcgtcccgaacaatgggtggattttcgcgccttagcaggcgatccgagcgacaatattccgggagttaaaggtatcggcgagaagacggcgctcaagctccttaaagaatgggggtcgttggagaacttgcttaagaatttagatcaggtcaaaccagagtcagtgcgtgagaagattcttgcacacctcgaagacctcaaattaagccgcgaattgtcccgtgtacgcaccgatttgccgctcgaagttgatttccgtggccgccgcgaacctgactgggagggtcttaaagcgtttttagagcgtcttgaatttggttcgctcttgcatgaattcggccttttagaaagcccgttaccagccgaagaagcaccttggccaccgcccgaaggcgcgtttttaggttaccgtttgagtcgcccggaaccgatgtgggccgaattattggctcttgcagcgtctgcccagggacgtgtgtatcgcgcggaagaccctcatggtgcgctccgcggcctcaaagaagtccgtggactccttgccaaagacttagctgttgttgcattgcgcgaaggtcttgatttacctccgactgatgatccaatgcttcttgcgtacctcttggacccgtcaaacacgacgcccgaaggcgtagcccgtcgttacggcggcgagtggaccgaagatgcaggcgagcgcgcgttattggccgaacgtttgcacgccaatttattaggacgtttgcaaggcgaggaacgtctcctctggctttacgaagaagtggagaaaccattgagtcgcgtgctcgcgcatatggaagctaccggtgtcaaattagacgtggcgtatttggaggcactcagccttgaagttgctgccgaaatgcgccgcttggaggaagaagtattccgtttagcaggccactcctttaaccttaattctcgcgatcagttagaacgtgtgttgttcgatgaacttggtctccctcctatcggcaagacagagaagaccggtaaacgtagcacttcagcggcggttttagaagctcttcgcgaagtccatcccattgtggacaagatcttgcagtaccgcgaactcgcgaaattgaaaggcacctatattgaccctcttccggcattagtccacccgaaaacgggacgcctccatacccgcttcaaccaaacagccacggcgaccggtcgtttgtcctcctctgatccaaaccttcagaatattccagtacgtaccccattgggccagaagatccgccgcgcgtttgtagctgaggagggttggcgtttagtggccctcgattatagccaaattgaattacgtgtccttgcccatctttctggcgatgagaacctcatccgcgtgtttcaggaaggcaaagacattcacactcaaacggcaagctggatgtttggattatcagctgaagcgatcgatcctttgatgcgtcgtgcagcgaagaccatcaatttcggtgttctctacggtatgagtgcccatcgtttgtcgcaggaattaggcattccctatgaagaagctgcggcgttcattcagcgctactttgcgagctatcccaaagttaaagcatggatcgagaagactctcgaagaaggccgcacacgtggttacgtagagaccttatttggacgtcgccgctatgttcccgatttaaacgctcgcgtgaaatctgtccgtgaagccgccgaacgcatggcgttcaacatgcctgtacagggcacggcagctgacctcatgaaacttgcaatggtgcgcctttttccacaattgcgtgaagttggtgcccgcatgctcttgcaggtccacgatgaactcttgttagaagcgccaaaagagcgtgcggaagaggtggcagccctcgcgaaagaggttatggaaggcgtgtggcccttagcggtgcctcttgaagtcgaagttggtattggcgaggattggttggctgccaaaggataatga

SEQ ID NO: 1188 - protein, 841 aa, synthetic construct
  REGION 1..841: note = Variant of DNA polymerase I from Thermus sp. strain 2.9
MHHHHHHGGSGMLPLFEPKGRVLLVDGHHLAYRNFFALKGLTTSRGEPVQGVYGFAKSLLKALKEDGDVVIVVFDAKAPSFRHEAYEAYKAGRAPTPEDFPRQLALMKELVDLLGLERLEVPGFEADDVLATLAKKAEREGYEVQILTADRDLFQLLSPRISVLHPEGHRITPEWLWEKYGLRPEQWVDFRALAGDPSDNIPGVKGIGEKTALKLLKEWGSLENLLKNLDQVKPESVREKILAHLEDLKLSRELSRVRTDLPLEVDFRGRREPDWEGLKAFLERLEFGSLLHEFGLLESPLPAEEAPWPPPEGAFLGYRLSRPEPMWAELLALAASAQGRVYRAEDPHGALRGLKEVRGLLAKDLAVVALREGLDLPPTDDPMLLAYLLDPSNTTPEGVARRYGGEWTEDAGERALLAERLHANLLGRLQGEERLLWLYEEVEKPLSRVLAHMEATGVKLDVAYLEALSLEVAAEMRRLEEEVFRLAGHSFNLNSRDQLERVLFDELGLPPIGKTEKTGKRSTSAAVLEALREVHPIVDKILQYRELAKLKGTYIDPLPALVHPKTGRLHTRFNQTATATGRLSSSDPNLQNIPVRTPLGQKIRRAFVAEEGWRLVALDYSQIELRVLAHLSGDENLIRVFQEGKDIHTQTASWMFGLSAEAIDPLMRRAAKTINFGVLYGMSAHRLSQELGIPYEEAAAFIQRYFASYPKVKAWIEKTLEEGRTRGYVETLFGRRRYVPDLNARVKSVREAAERMAFNMPVQGTAADLMKLAMVRLFPQLREVGARMLLQVHDELLLEAPKERAEEVAALAKEVMEGVWPLAVPLEVEVGIGEDWLAAKG

SEQ ID NO: 1189 - DNA, 2529 bp, synthetic construct
  misc_feature 1..2529: note = Variant of DNA polymerase I from Thermus sp. strain 2.9
  source 1..2529: mol_type = other DNA
atgcaccatcatcatcatcatggcggtagcggcatgttaccgttgttcgaacctaaaggtcgcgtgcttctggttgatggccatcatctcgcgtatcgtaacttctttgccctgaaaggattaaccaccagccgtggcgagccggtacagggtgtctacggctttgcaaagtcgctcctgaaagctctgaaagaagacggtgatgtggtgattgttgtctttgatgcgaaagcgccaagttttcgccacgaagcgtacgaagcttacaaagccgggcgtgctccaacgccggaagactttcctcgccaattggcgcttatgaaggaattagtggatttgcttggcctcgaacgcttggaagttcccggtttcgaggcagacgacgtattagcgactctcgcaaagaaagccgaacgtgagggctatgaagtccagatcttgacagcagatcgcgatcttttccagcttttatctccgcgcatctcggtgttacacccggaagggcatcgtatcaccccggaatggctctgggagaaatatggtttgcgtcccgaacaatgggtggattttcgcgccttagcaggcgatccgagcgacaatattccgggagttaaaggtatcggcgagaagacggcgctcaagctccttaaagaatgggggtcgttggagaacttgcttaagaatttagatcaggtcaaaccagagtcagtgcgtgagaagattcttgcacacctcgaagacctcaaattaagcctggaattgtcccgtgtacgcaccgatttgccgctcgaagttgatttccgtggtcgccgcgaacctgactgggagggtcttaaagcgtttttagagcgtcttgaatttggttcgctcttgcatgaattcggccttttagaaagcccgttaccagccgaagaagcaccttggccaccgcccgaaggcgcgtttttaggttaccgtttgagtcgcccggaaccgatgtgggccgaattactggctcttgcagcgtctgcccagggacgtgtgtatcgcgcggaagaccctcatggtgcgctccgcggcctcaaagaagtccgtggactccttgccaaagacttagctgttgttgcattgcgcgaaggtcttgatttacctccgactgatgatccaatgcttcttgcgtacctcttggacccgtcaaacacgacgcccgaaggcgtagcccgtcgttacggcggcgagtggaccgaagatgcagctgagcgcgcgttattggccgaacgtttgcacgccaatttattaggacgtttgcaaggcgaggaacgtctcctctggctttacgaagaagtggagaaaccattgagtcgcgtgctcgcgcatatggaagctaccggtgtcaaattagacgtggcgtatttggagaacctcagccttgaagttgctgccgaaatgcgccgcttggaggaagaagtattccgtttagcaggccactcctttaaccttaattctcgcgatcagttagaacgtgtgttgttcgatgaacttggtctccctcctatcggcaagacagagaagaccggtaaacgtagcacttcagcggcggttttagaagctcttcgcgaagtccatcccattgtggacaagatcttgcagtaccgcgaactcgcgaaattgaaaggcacctatattgaccctcttccggcattagtccacccgaaaacgggacgcctccatacccgcttcaaccaaacagccacggcgaccggtcgtttgtcctcctctgatccaaaccttcagaatattccagtacgtaccccattgggccagaagatccgccgcgcgtttgtagctgaggagggttggcgtttagtggccctcgattatagccaaattgaattacgtgtccttgcccatctttctggcgatgagaacctcatccgcgtgtttcaggaaggcaaagacattcacactcaaacggcaagctggatgtttggattatcaccagaagcgatcgatcctttgatgcgtcgtgcagcgaagaccattaatttcggtgttctctacggtatgagtgcccatcgtttgtcgcaggaattaggcattccctatgaagaagctgtcgcgttcattcagaagtactttcaaagctatcccaaagttaaagcatggatcgagaagactctcgaagaaggccgcacacgtggttacgtagagaccttatttggacgtcgccgctatgttcccgatttaaacgctcgcgtgaaatctgtccgtgaagccgccgaacgcatggcgttcaacatgcctgtacagggcacggcagctgacctcatgaaacttgcaatggtgcgcctttttccacaattgcgtgaagttggtgcccgcatgctcttgcaggtccacgatgaactcttgttagaagcgccaaaagagcgtgcggaagaggtggcagccctcgcgaaagaggttatggaaggcgtgtggcccttagcggtgcctcttgaagtcgaagttggtattggcgaggattggttggctgccaaaggataatga

SEQ ID NO: 1190 - protein, 841 aa, synthetic construct
  REGION 1..841: note = Variant of DNA polymerase I from Thermus sp. strain 2.9
MHHHHHHGGSGMLPLFEPKGRVLLVDGHHLAYRNFFALKGLTTSRGEPVQGVYGFAKSLLKALKEDGDVVIVVFDAKAPSFRHEAYEAYKAGRAPTPEDFPRQLALMKELVDLLGLERLEVPGFEADDVLATLAKKAEREGYEVQILTADRDLFQLLSPRISVLHPEGHRITPEWLWEKYGLRPEQWVDFRALAGDPSDNIPGVKGIGEKTALKLLKEWGSLENLLKNLDQVKPESVREKILAHLEDLKLSLELSRVRTDLPLEVDFRGRREPDWEGLKAFLERLEFGSLLHEFGLLESPLPAEEAPWPPPEGAFLGYRLSRPEPMWAELLALAASAQGRVYRAEDPHGALRGLKEVRGLLAKDLAVVALREGLDLPPTDDPMLLAYLLDPSNTTPEGVARRYGGEWTEDAAERALLAERLHANLLGRLQGEERLLWLYEEVEKPLSRVLAHMEATGVKLDVAYLENLSLEVAAEMRRLEEEVFRLAGHSFNLNSRDQLERVLFDELGLPPIGKTEKTGKRSTSAAVLEALREVHPIVDKILQYRELAKLKGTYIDPLPALVHPKTGRLHTRFNQTATATGRLSSSDPNLQNIPVRTPLGQKIRRAFVAEEGWRLVALDYSQIELRVLAHLSGDENLIRVFQEGKDIHTQTASWMFGLSPEAIDPLMRRAAKTINFGVLYGMSAHRLSQELGIPYEEAVAFIQKYFQSYPKVKAWIEKTLEEGRTRGYVETLFGRRRYVPDLNARVKSVREAAERMAFNMPVQGTAADLMKLAMVRLFPQLREVGARMLLQVHDELLLEAPKERAEEVAALAKEVMEGVWPLAVPLEVEVGIGEDWLAAKG

SEQ ID NO: 1191 - DNA, 2529 bp, synthetic construct
  misc_feature 1..2529: note = Variant of DNA polymerase I from Thermus sp. strain 2.9
  source 1..2529: mol_type = other DNA
atgcaccatcatcatcatcatggcggtagcggcatgttaccgttgttcgaacctaaaggtcgcgtgcttctggttgatggccatcatctcgcgtatcgtaacttctttgccctgaaaggattaaccaccagccgtggcgagccggtacagggtgtctacggctttgcaaagtcgctcctgaaagctctgaaagaagacggtgatgtggtgattgttgtctttgatgcgaaagcgccaagttttcgccacgaagcgtacgaagcttacaaagccgggcgtgctccaacgccggaagactttcctcgccaattggcgcttatgaaggaattagtggatttgcttggcctcgaacgcttggaagttcccggtttcgaggcagacgacgtattagcgactctcgcaaagaaagccgaacgtgagggctatgaagtccagatcttgacagcagatcgcgatcttttccagcttttatctccgcgcatctcggtgttacacccggaagggcatcgtatcaccccggaatggctctgggagaaatatggtttgcgtcccgaacaatgggtggattttcgcgccttagcaggcgatccgagcgacaatattccgggagttaaaggtatcggcgagaagacggcgctcaagctccttaaagaatgggggtcgttggagaacttgcttaagaatttagatcaggtcaaaccagagtcagtgcgtgagaagattcttgcacacctcgaagacctcaaattaagccgcgaattgtcccgtgtacgcaccgatttgccgctcgaagttgatttccgtggccgccgcgaacctgactgggagggtcttaaagcgtttttagagcgtcttgaatttggttcgctcttgcatgaattcggccttttagaaagcccgttaccagccgaagaagcaccttggccaccgcccgaaggcgcgtttttaggttaccgtttgagtcgcccggaaccgatgtgggccgaattattggctcttgcagcgtctgcccagggacgtgtgtatcgcgcggaagaccctcatggtgcgctccgcggcctcaaagaagtccgtggactccttgccaaagacttagctgttgttgcattgcgcgaaggtcttgatttacctccgactgatgatccaatgcttcttgcgtacctcttggacccgtcaaacacgacgcccgaaggcgtagcccgtcgttacggcggcgagtggaccgaagatgcaggcgagcgcgcgttattggccgaacgtttgcacgcaaatttattaggacgtttgcaaggcgaggaacgtctcctctggctttacgaagaagtggagaaaccattgagtcgcgtgctcgcgcatatggaagctaccggtgtcaaattagacgtggcgtatttggaggcactcagccttgaagttgctgccgaaatgcgccgcttggaggaagaagtattccgtttagcaggccactcctttaaccttaattctcgcgatcagttagaacgtgtgttgttcgatgaacttggtctccctcctatcggcaagacagagaagaccggtaaacgtagcacttcagcggcggttttagaagctcttcgcgaagtccatcccattgtggacaagatcttgcagtaccgcgaactcgcgaaattgaaaggcacctatattgaccgtcttccggcattagtccacccgaaaacgggacgcctccatacccgcttcaaccaaacagccacggcgaccggtcgtttgtcctcctctgatccaaaccttcagaatattccagtacgtaccccattgggccagaagatccgccgcgcgtttgtagctgaggagggttggcgtttagtggccctcgattatagccaaattgaattacgtgtccttgcccatctttctggcgatgagaacctcatccgcgtgtttcaggaaggcaaagacattcacactcaaacggcaagctggatgtttggactgtcgtcggaagcgatcgatcctttgatgcgtcgtgcagcgaagaccatcaatttcggtgttctctacggtatgagtgcccatcgtttgtcgcaggaattaggcattccctatgaagaagctgcggcgttcattcagcgctactttcaaagctatcccaaagttaaagcatggatcgagaagactctcgaagaaggccgcacacgtggttacgtagagaccttatttggacgtcgccgctatgttcccgatttaaacgctcgcgtgaaatctgtccgtgaagccgccgaacgcatggcgttcaacatgcctgtacagggcacggcagctgacctcatgaaacttgcaatggtgcgcctttttccacaattgcgtgaagttggtgcccgcatgctcttgcaggtccacgatgaactcttgttagaagcgccaaaagagcgtgcggaagaggtggcagccctcgcgaaagaggttatggaaggcgtgtggcccttagcggtgcctcttgaagtcgaagttggtattggcgaggattggttggctgccaaaggataatga

SEQ ID NO: 1192 - protein, 841 aa, synthetic construct
  REGION 1..841: note = Variant of DNA polymerase I from Thermus sp. strain 2.9
MHHHHHHGGSGMLPLFEPKGRVLLVDGHHLAYRNFFALKGLTTSRGEPVQGVYGFAKSLLKALKEDGDVVIVVFDAKAPSFRHEAYEAYKAGRAPTPEDFPRQLALMKELVDLLGLERLEVPGFEADDVLATLAKKAEREGYEVQILTADRDLFQLLSPRISVLHPEGHRITPEWLWEKYGLRPEQWVDFRALAGDPSDNIPGVKGIGEKTALKLLKEWGSLENLLKNLDQVKPESVREKILAHLEDLKLSRELSRVRTDLPLEVDFRGRREPDWEGLKAFLERLEFGSLLHEFGLLESPLPAEEAPWPPPEGAFLGYRLSRPEPMWAELLALAASAQGRVYRAEDPHGALRGLKEVRGLLAKDLAVVALREGLDLPPTDDPMLLAYLLDPSNTTPEGVARRYGGEWTEDAGERALLAERLHANLLGRLQGEERLLWLYEEVEKPLSRVLAHMEATGVKLDVAYLEALSLEVAAEMRRLEEEVFRLAGHSFNLNSRDQLERVLFDELGLPPIGKTEKTGKRSTSAAVLEALREVHPIVDKILQYRELAKLKGTYIDRLPALVHPKTGRLHTRFNQTATATGRLSSSDPNLQNIPVRTPLGQKIRRAFVAEEGWRLVALDYSQIELRVLAHLSGDENLIRVFQEGKDIHTQTASWMFGLSSEAIDPLMRRAAKTINFGVLYGMSAHRLSQELGIPYEEAAAFIQRYFQSYPKVKAWIEKTLEEGRTRGYVETLFGRRRYVPDLNARVKSVREAAERMAFNMPVQGTAADLMKLAMVRLFPQLREVGARMLLQVHDELLLEAPKERAEEVAALAKEVMEGVWPLAVPLEVEVGIGEDWLAAKG

SEQ ID NO: 1193 - DNA, 2529 bp, synthetic construct
  misc_feature 1..2529: note = Variant of DNA polymerase I from Thermus sp. strain 2.9
  source 1..2529: mol_type = other DNA
atgcaccatcatcatcatcatggcggtagcggcatgttaccgttgttcgaacctaaaggtcgcgtgcttctggttgatggccatcatctcgcgtatcgtaacttctttgccctgaaaggattaaccaccagccgtggcgagccggtacagggtgtctacggctttgcaaagtcgctcctgaaagctctgaaagaagacggtgatgtggtgattgttgtctttgatgcgaaagcgccaagttttcgccacgaagcgtacgaagcttacaaagccgggcgtgctccaacgccggaagactttcctcgccaattggcgcttatgaaggaattagtggatttgcttggcctcgaacgcttggaagttcccggtttcgaggcagacgacgtattagcgactctcgcaaagaaagccgaacgtgagggctatgaagtccagatcttgacagcagatcgcgatcttttccagcttttatctccgcgcatctcggtgttacacccggaagggcatcgtatcaccccggaatggctctgggagaaatatggtttgcgtcccgaacaatgggtggattttcgcgccttagcaggcgatccgagcgacaatattccgggagttaaaggtatcggcgagaagacggcgctcaagctccttaaagaatgggggtcgttggagaacttgcttaagaatttagatcaggtcaaaccagagtcagtgcgtgagaagattcttgcacacctcgaagacctcaaattaagccgcgaattgtcccgtgtacgcaccgatttgccgctcgaagttgatttccgtcgtcgccgcgaacctgactgggagggtcttaaagcgtttttagagcgtcttgaatttggttcgctcttgcatgaattcggccttttagaaagcccgttaccagccgaagaagcaccttggccaccgcccgaaggcgcgtttttaggttaccgtttgagtcgcccggaaccgatgtgggccgaattatcggctcttgcagcgtctgcccagggacgtgtgtatcgcgcggaagaccctcatggtgcgctccgtggcctcaaagaagtccgtggactccttgccaaagacttagctgttgttgcattgcgcgaaggtcttgatttacctccgactgatgatccaatgcttcttgcgtacctcttggacccgtcaaacacgacgcccgaaggcgtagcccgtcgttacggcggcgagtggaccgaagatgcagctaagcgcgcgttattggccgaacgtttgcacgccaatttattaggacgtttgcaaggcgaggaacgtctcctctggctttacgaagaagtggagaaaccattgagtcgcgtgctcgcgcatatggaagctaccggtgtcaaattagacgtggcgtatttggagaacctcagccttgaagttgctgccgaaatgcgccgcttggaggaagaagtattccgtttagcaggccactcctttaaccttaattctcgcgatcagttagaacgtgtgttgttcgataaccttggtctccctcctatcggcaagacagagaagaccggtaaacgtagcacttcagcggcggttttagaagctcttcgcgaagtccatcccattgtggacaagatcttgcagtaccgcgaactcgcgaaattgaaaggcacctatattgaccctcttccggcattagtccacccgaaaacgggacgcctccatacccgcttcaaccaaacagccacggcgaccggtcgtttgtcctcctctgatccaaaccttcagaatattccagtacgtaccccattgggccagaagatccgccgcgcgtttgtagctgaggagggttggcgtttagtggccctcgattatagccaaattgaattacgtgtccttgcccatctttctggcgatgagaacctcatccgcgtgtttcaggaaggcaaagacattcacactcaaacggcaagctggatgtttggattatcaccagaagcgatcgatcctttgatgcgtcgtgcagcgaagaccgttaatttcggtgttctctacggtatgagtgcccatcgtttgtcgcaggaattaggcattccctatgaagaagctgcggcgttcattcagcgctactttcaaagctatcccaaagttaaagcatggatcgagaagactctcgaagaaggccgcacacgtggttacgtagagaccttatttggacgtcgccgctatgttcccgatttaaacgctcgcgtgaaatctgtccgtgaagccgccgaacgcatggcgttcaacatgcctgtacagggcacggcagctgacctcatgaaacttgcaatggtgcgcctttttccacaattgcgtgaagttggtgcccgcatgctcttgcaggtccacgatgaactcttgttagaagcgccaaaagagcgtgcggaagaggtggcagccctcgcgaaagaggttatggaaggcgtgtggcccttagcggtgcctcttgaagtcgaagttggtattggcgaggattggttggctgccaaaggataatga

SEQ ID NO: 1194 - protein, 841 aa, synthetic construct
  REGION 1..841: note = Variant of DNA polymerase I from Thermus sp. strain 2.9
MHHHHHHGGSGMLPLFEPKGRVLLVDGHHLAYRNFFALKGLTTSRGEPVQGVYGFAKSLLKALKEDGDVVIVVFDAKAPSFRHEAYEAYKAGRAPTPEDFPRQLALMKELVDLLGLERLEVPGFEADDVLATLAKKAEREGYEVQILTADRDLFQLLSPRISVLHPEGHRITPEWLWEKYGLRPEQWVDFRALAGDPSDNIPGVKGIGEKTALKLLKEWGSLENLLKNLDQVKPESVREKILAHLEDLKLSRELSRVRTDLPLEVDFRRRREPDWEGLKAFLERLEFGSLLHEFGLLESPLPAEEAPWPPPEGAFLGYRLSRPEPMWAELSALAASAQGRVYRAEDPHGALRGLKEVRGLLAKDLAVVALREGLDLPPTDDPMLLAYLLDPSNTTPEGVARRYGGEWTEDAAKRALLAERLHANLLGRLQGEERLLWLYEEVEKPLSRVLAHMEATGVKLDVAYLENLSLEVAAEMRRLEEEVFRLAGHSFNLNSRDQLERVLFDNLGLPPIGKTEKTGKRSTSAAVLEALREVHPIVDKILQYRELAKLKGTYIDPLPALVHPKTGRLHTRFNQTATATGRLSSSDPNLQNIPVRTPLGQKIRRAFVAEEGWRLVALDYSQIELRVLAHLSGDENLIRVFQEGKDIHTQTASWMFGLSPEAIDPLMRRAAKTVNFGVLYGMSAHRLSQELGIPYEEAAAFIQRYFQSYPKVKAWIEKTLEEGRTRGYVETLFGRRRYVPDLNARVKSVREAAERMAFNMPVQGTAADLMKLAMVRLFPQLREVGARMLLQVHDELLLEAPKERAEEVAALAKEVMEGVWPLAVPLEVEVGIGEDWLAAKG

SEQ ID NO: 1195 - DNA, 2529 bp, synthetic construct
  misc_feature 1..2529: note = Variant of DNA polymerase I from Thermus sp. strain 2.9
  source 1..2529: mol_type = other DNA
atgcaccatcatcatcatcatggcggtagcggcatgttaccgttgttcgaacctaaaggtcgcgtgcttctggttgatggccatcatctcgcgtatcgtaacttctttgccctgaaaggattaaccaccttgcgtggcgagccggtacagggtgtctacggctttgcaaagtcgctcctgaaagctctgaaagaagacggtgatgtggtgattgttgtctttgatgcgaaagcgccaagttttcgccacgaagcgtacgaagcttacaaagccgggcgtgctccaacgccggaagactttcctcgccaattggcgcttatgaaggaattagtggatttgcttggcctcgaacgcttggaagttcccggtttcgaggcagacgacgtattagcgactctcgcaaagaaagccgaacgtgagggctatgaagtccagatcttgacagcagatcgcgatcttttccagcttttatctccgcgcatctcggtgttacacccggaagggcatcgtatcaccccggaatggctctgggagaaatatggtttgcgtcccgaacaatgggtggattttcgcgccttagcaggcgatccgagcgacaatattccgggagttaaaggtatcggcgagaagacggcgctcaagctccttaaagaatgggggtcgttggagaacttgcttaagaatttagatcaggtcaaaccagagtcagtgcgtgagaagattcttgcacacctcgaagacctcaaattaagccgcgaattgtcccgtgtacgcaccgatttgccgctcgaagttgatttccgtggccgccgcgaacctgactgggagggtcttaaagcgtttttagagcgtcttgaatttggttcgctcttgcatgaattcggccttttagaaagcccgttaccagccgaagaagcaccttggccaccgcccgaaggcgcgtttttaggttaccgtttgagtcgcccggaaccgatgtgggccgaattattggctcttgcagcgtctgcccagggacgtgtgtatcgcgcggaagaccctcatggtgcgctccgcggcctcaaagaagtccgtggactccttgccaaagacttagctgttgttgcattgcgcgaaggtcttgatttacctccgactgatgatccaatgcttcttgcgtacctcttggacccgtcaaacacgacgcccgaaggcgtagcccgtcgttacggcggcgagtggaccgaagatgcaggcgagcgcgcgttattggccgaacgtttgcacgccaatttattaggacgtttgcaaggcgaggaacgtctcctctggctttacgaagaagtggagaaaccattgagtcgcgtgctcgcgcatatggaagctaccggtgtcaaattagacgtggcgtatttggaggcactcagccttgaagttgctgccgaaatgcgccgcttggaggaagaagtattccgtttagcaggccactcctttaaccttaattctcgcgatcagttagaacgtgtgttgttcgatgaacttggtctccctcctatcggcaagacagagaagaccggtaaacgtagcacttcagcggcggttttagaagctcttcgcgaagtccatcccattgtggacaagatcttgcagtaccgcgaactcgcgaaattgaaaggcacctatattgaccctcttccggcattagtccacccgaaaacgggacgcctccatacccgcttcaaccaaacagccacggcgaccggtcgtttgtcctcctctgatccaaaccttcagaatattccagtacgtaccccattgggccagaagatccgccgcgcgtttgtagctgaggagggttggcgtttagtggccctcgattatagccaaattgaattacgtgtccttgcccatctttctggcgatgagaacctcatccgcgtgtttcaggaaggcaaagacattcacactcaaacggcaagctggatgtttggattatcagctgaagcgatcgatcctttgatgcgtcgtgcagcgaagaccatcaatttcggtgttctctacggtatgagtgcccatcgtttgtcgcaggaattaggcattccctatgaagaagctgcggcgttcattcagcgctactttcaaagctatcccaaagttaaagcatggatcgagaagactctcgaagaaggccgcacacgtggttacgtagagaccttatttggacgtcgccgctatgttcccgatttaaacgctcgcgtgaaatctgtccgtgaagccgccgaacgcatggcgttcaacatgcctgtacagggcacggcagctgacctcatgaaacttgcaatggtgcgcctttttccacaattgcgtgaagttggtgcccgcatgctcttgcaggtccacgatgaactcttgttagaagcgccaaaagagcgtgcggaagaggtggcagccctcgcgaaagaggttatggaaggcgtgtggcccttagcggtgcctcttgaagtcgaagttggtattggcgaggattggttggctgccaaaggataatga

SEQ ID NO: 1196 - protein, 841 aa, synthetic construct
  REGION 1..841: note = Variant of DNA polymerase I from Thermus sp. strain 2.9
MHHHHHHGGSGMLPLFEPKGRVLLVDGHHLAYRNFFALKGLTTLRGEPVQGVYGFAKSLLKALKEDGDVVIVVFDAKAPSFRHEAYEAYKAGRAPTPEDFPRQLALMKELVDLLGLERLEVPGFEADDVLATLAKKAEREGYEVQILTADRDLFQLLSPRISVLHPEGHRITPEWLWEKYGLRPEQWVDFRALAGDPSDNIPGVKGIGEKTALKLLKEWGSLENLLKNLDQVKPESVREKILAHLEDLKLSRELSRVRTDLPLEVDFRGRREPDWEGLKAFLERLEFGSLLHEFGLLESPLPAEEAPWPPPEGAFLGYRLSRPEPMWAELLALAASAQGRVYRAEDPHGALRGLKEVRGLLAKDLAVVALREGLDLPPTDDPMLLAYLLDPSNTTPEGVARRYGGEWTEDAGERALLAERLHANLLGRLQGEERLLWLYEEVEKPLSRVLAHMEATGVKLDVAYLEALSLEVAAEMRRLEEEVFRLAGHSFNLNSRDQLERVLFDELGLPPIGKTEKTGKRSTSAAVLEALREVHPIVDKILQYRELAKLKGTYIDPLPALVHPKTGRLHTRFNQTATATGRLSSSDPNLQNIPVRTPLGQKIRRAFVAEEGWRLVALDYSQIELRVLAHLSGDENLIRVFQEGKDIHTQTASWMFGLSAEAIDPLMRRAAKTINFGVLYGMSAHRLSQELGIPYEEAAAFIQRYFQSYPKVKAWIEKTLEEGRTRGYVETLFGRRRYVPDLNARVKSVREAAERMAFNMPVQGTAADLMKLAMVRLFPQLREVGARMLLQVHDELLLEAPKERAEEVAALAKEVMEGVWPLAVPLEVEVGIGEDWLAAKG

SEQ ID NO: 1197 - DNA, 2529 bp, synthetic construct
  misc_feature 1..2529: note = Variant of DNA polymerase I from Thermus sp. strain 2.9
  source 1..2529: mol_type = other DNA
atgcaccatcatcatcatcatggcggtagcggcatgttaccgttgttcgaacctaaaggtcgcgtgcttctggttgatggccatcatctcgcgtatcgtaacttctttgccctgaaaggattaaccaccagccgtggcgagccggtacagggtgtctacggctttgcaaagtcgctcctgaaagctctgaaagaagacggtgatgtggtgattgttgtctttgatgcgaaagcgccaagttttcgccacgaagcgtacgaagcttacaaagccgggcgtgctccaacgccggaagactttcctcgccaattggcgcttatgaaggaattagtggatttgcttggcctcgaacgcttggaagttcccggtttcgaggcagacgacgtattagcgactctcgcaaagaaagccgaacgtgagggctatgaagtccagatcttgacagcagatcgcgatcttttccagcttttatctccgcgcatctcggtgttacacccggaagggcatcgtatcaccccggaatggctctgggagaaatatggtttgcgtcccgaacaatgggtggattttcgcgccttagcaggcgatccgagcgacaatattccgggagttaaaggtatcggcgagaagacggcgctcaagctccttaaagaatgggggtcgttggagaacttgcttaagaatttagatcaggtcaaaccagagtcagtgcgtgagaagattcttgcacacctcgaagacctcaaattaagccgcgaattgtcccgtgtacgcaccgatttgccgctcgaagttgatttccgtggtcgccgcgaacctgactgggagggtcttaaagcgtttttagagcgtcttgaatttggttcgctcttgcatgaattcggccttttagaaagcccgttaccagccgaagaagcaccttggccaccgcccgaaggcgcgtttttaggttaccgtttgagtcgcccggaaccgatgtgggccgaattactggctcttgcagcgtctgcccaggggcgtgcgtatcgcgcggaagaccctcatggtgcgctcaagggcctcaaagaagtccgtggactccttgccaaagacttagctgttgttgcattgcgcgaaggtcttgatttacctccgactgatgatccaatgcttcttgcgtacctcttggacccgtcaaacacgacgcccgaaggcgtagcccgtcgttacggcggcgagtggaccgaagatgcaggcgagcgcgcgttattggccgaacgtttgcacgccaatttattaggacgtttgcaaggcgaggaacgtctcctctggctttacgaagaagtggagaaaccattgagtcgcgtgctcgcgcatatggaagctaccggtgtcaaattagacgtggcgtatttggaggctctcagccttgaagttgctgccgaaatgcgccgcttggaggaagaagtattccgtttagcaggccactcctttaaccttaattctcgcgatcagttagaacgtgtgttgttcgatgagcttggtctccctcctatcggcaagacagagaagaccggtaaacgtagcacttcagcggcggttttagaagctcttcgcgaagtccatcccattgtggacaagatcttgcagtaccgcgaactcgcgaaattgaaaggcacctatattgaccctcttccggcattagtccacccgaaaacgggacgcctccatacccgcttcaaccaaacagccacggcgaccggtcgtttgtcctcctctgatccaaaccttcagaatattccagtacgtaccccattgggccagaagatccgccgcgcgtttgtagctgaggagggttggcgtttagtggccctcgattatagccaaattgaattacgtgtccttgcccatctttctggcgatgagaacctcatccgcgtgtttcaggaaggcaaagacattcacactcaaacggcaagctggatgtttggattatcagctgaagcgatcgatcctttgatgcgtcgtgcagcgaagaccattaatttcggtgttctctacggtatgagtgcccatcgtttgtcgcaggaattaggcattccctatgaagaagctgccgcgttcattcagaagtactttcaaagctatcccaaagttaaagcatggatcgagaagactctcgaagaaggccgcacacgtggttacgtagagaccttatttggacgtcgccgctatgttcccgatttaaacgctcgcgtgaaatctgtccgtgaagccgccgaacgcatggcgttcaacatgcctgtacagggcacggcagctgacctcatgaaacttgcaatggtgcgcctttttccacaattgcgtgaagttggtgcccgcatgctcttgcaggtccacgatgaactcttgttagaagcgccaaaagagcgtgcggaagaggtggcagccctcgcgaaagaggttatggaaggcgtgtggcccttagcggtgcctcttgaagtcgaagttggtattggcgaggattggttggctgccaaaggataatga

SEQ ID NO: 1198 - protein, 841 aa, synthetic construct
  REGION 1..841: note = Variant of DNA polymerase I from Thermus sp. strain 2.9
MHHHHHHGGSGMLPLFEPKGRVLLVDGHHLAYRNFFALKGLTTSRGEPVQGVYGFAKSLLKALKEDGDVVIVVFDAKAPSFRHEAYEAYKAGRAPTPEDFPRQLALMKELVDLLGLERLEVPGFEADDVLATLAKKAEREGYEVQILTADRDLFQLLSPRISVLHPEGHRITPEWLWEKYGLRPEQWVDFRALAGDPSDNIPGVKGIGEKTALKLLKEWGSLENLLKNLDQVKPESVREKILAHLEDLKLSRELSRVRTDLPLEVDFRGRREPDWEGLKAFLERLEFGSLLHEFGLLESPLPAEEAPWPPPEGAFLGYRLSRPEPMWAELLALAASAQGRAYRAEDPHGALKGLKEVRGLLAKDLAVVALREGLDLPPTDDPMLLAYLLDPSNTTPEGVARRYGGEWTEDAGERALLAERLHANLLGRLQGEERLLWLYEEVEKPLSRVLAHMEATGVKLDVAYLEALSLEVAAEMRRLEEEVFRLAGHSFNLNSRDQLERVLFDELGLPPIGKTEKTGKRSTSAAVLEALREVHPIVDKILQYRELAKLKGTYIDPLPALVHPKTGRLHTRFNQTATATGRLSSSDPNLQNIPVRTPLGQKIRRAFVAEEGWRLVALDYSQIELRVLAHLSGDENLIRVFQEGKDIHTQTASWMFGLSAEAIDPLMRRAAKTINFGVLYGMSAHRLSQELGIPYEEAAAFIQKYFQSYPKVKAWIEKTLEEGRTRGYVETLFGRRRYVPDLNARVKSVREAAERMAFNMPVQGTAADLMKLAMVRLFPQLREVGARMLLQVHDELLLEAPKERAEEVAALAKEVMEGVWPLAVPLEVEVGIGEDWLAAKG

SEQ ID NO: 1199 - DNA, 2529 bp, synthetic construct
  misc_feature 1..2529: note = Variant of DNA polymerase I from Thermus sp. strain 2.9
  source 1..2529: mol_type = other DNA
atgcaccatcatcatcatcatggcggtagcggcatgttaccgttgttcgaacctaaaggtcgcgtgcttctggttgatggccatcatctcgcgtatcgtaacttctttgccctgaaaggattaaccaccagccgtggcgagccggtacagggtgtctacggctttgcaaagtcgctcctgaaagctctgaaagaagacggtgatgtggtgattgttgtctttgatgcgaaagcgccaagttttcgccacgaagcgtacgaagcttacaaagccgggcgtgctccaacgccggaagactttcctcgccaattggcgcttatgaaggaattagtggatttgcttggcctcgaacgcttggaagttcccggtttcgaggcagacgacgtattagcgactctcgcaaagaaagccgaacgtgagggctatgaagtccagatcttgacagcagatcgcgatcttttccagcttttatctccgcgcatctcggtgttacacccggaagggcatcgtatcaccccggaatggctctgggagaaatatggtttgcgtcccgaacaatgggtggattttcgcgccttagcaggcgatccgagcgacaatattccgggagttaaaggtatcggcgagaagacggcgctcaagctccttaaagaatgggggtcgttggagaacttgcttaagaatttagatcaggtcaaaccagagtcagtgcgtgagaagattcttgcacacctcgaagacctcaaattaagccgcgaattgtcccgtgtacgcaccgatttgccgctcgaagttgatttccgtggccgccgcgaacctgactgggagggtcttaaagcgtttttagagcgtcttgaatttggttcgctcttgcatgaattcggccttttagaaagcccgttaccagccgaagaagcaccttggccaccgcccgaaggcgcgtttttaggttaccgtttgagtcgcccggaaccgatgtgggccgaattattggctcttgcagcgtctgcccagggacgtgtgtatcgcgcggaagaccctcatggtgcgctccgcggcctcaaagaagtccgtggactccttgccaaagacttagctgttgttgcattgcgcgaaggtcttgatttacctccgactgatgatccaatgcttcttgcgtacctcttggacccgtcaaacacgacgcccgaaggcgtagcccgtcgttacggcggcgagtggaccgaagatgcaggcgagcgcgcgttattggccgaacgtttgcacgccaatttattaggacgtttgcaaggcgaggaacgtctcctctggctttacgaagaagtggagaaaccattgagtcgcgtgctcgcgcatatggaagctaccggtgtcaaattagacgtggcgtatttggaggcactcagccttgaagttgctgccgaaatgcgccgcttggaggaagaagtattccgtttagcaggccactcctttaaccttaattctcgcgatcagttagaacgtgtgttgttcgatgaacttggtctccctcctatcggcaagacagagaagaccggtaaacgtagcacttcagcggcggttttagaagctcttcgcgaagtccatcccattgtggacaagatcttgcagtaccgcgaactcgcgaaattgaaaggcacctatattgaccctcttccggcattagtccacccgaaaacgggacgcctccatacccgcttcaaccaaacagccacggcgaccggtcgtttgtcctcctctgatccaaaccttcagaatattccagtacgtaccccattgggccagaagatccgccgcgcgtttgtagctgaggagggttggcgtttagtggccctcgattatagccaaattgaattacgtgtccttgcccatctttctggcgatgagaacctcatccgcgtgtttcaggaaggcaaagacattcacactcaaacggcaagctggatgtttggattatcagcagaagcgatcgatcctttgatgcgtcgtgcagcgaagaccattaatttcggtgttctctacggtatgagtgcccatcgtttgtcgcaggaattaggcattccctatgaagaagctgtcgcgttcattcagaagtactttcaaagctatcccaaagttaaagcatggatcgagaagactctcgaagaaggccgcacacgtggttacgtagagaccttatttggacgtcgccgctatgttcccgatttaaacgctcgcgtgaaatctgtccgtgaagccgccgaacgcatggcgttcaacatgcctgtacagggcacggcagctgacctcatgaaacttgcaatggtgcgcctttttccacaattgcgtgaagttggtgcccgcatgctcttgcaggtccacgatgaactcttgttagaagcgccaaaagagcgtgcggaagaggtggcagccctcgcgaaagaggttatggaaggcgtgtggcccttagcggtgcctcttgaagtcgaagttggtattggcgaggattggttggctgccaaaggataatga

SEQ ID NO: 1200 - protein, 841 aa, synthetic construct
  REGION 1..841: note = Variant of DNA polymerase I from Thermus sp. strain 2.9
MHHHHHHGGSGMLPLFEPKGRVLLVDGHHLAYRNFFALKGLTTSRGEPVQGVYGFAKSLLKALKEDGDVVIVVFDAKAPSFRHEAYEAYKAGRAPTPEDFPRQLALMKELVDLLGLERLEVPGFEADDVLATLAKKAEREGYEVQILTADRDLFQLLSPRISVLHPEGHRITPEWLWEKYGLRPEQWVDFRALAGDPSDNIPGVKGIGEKTALKLLKEWGSLENLLKNLDQVKPESVREKILAHLEDLKLSRELSRVRTDLPLEVDFRGRREPDWEGLKAFLERLEFGSLLHEFGLLESPLPAEEAPWPPPEGAFLGYRLSRPEPMWAELLALAASAQGRVYRAEDPHGALRGLKEVRGLLAKDLAVVALREGLDLPPTDDPMLLAYLLDPSNTTPEGVARRYGGEWTEDAGERALLAERLHANLLGRLQGEERLLWLYEEVEKPLSRVLAHMEATGVKLDVAYLEALSLEVAAEMRRLEEEVFRLAGHSFNLNSRDQLERVLFDELGLPPIGKTEKTGKRSTSAAVLEALREVHPIVDKILQYRELAKLKGTYIDPLPALVHPKTGRLHTRFNQTATATGRLSSSDPNLQNIPVRTPLGQKIRRAFVAEEGWRLVALDYSQIELRVLAHLSGDENLIRVFQEGKDIHTQTASWMFGLSAEAIDPLMRRAAKTINFGVLYGMSAHRLSQELGIPYEEAVAFIQKYFQSYPKVKAWIEKTLEEGRTRGYVETLFGRRRYVPDLNARVKSVREAAERMAFNMPVQGTAADLMKLAMVRLFPQLREVGARMLLQVHDELLLEAPKERAEEVAALAKEVMEGVWPLAVPLEVEVGIGEDWLAAKG

SEQ ID NO: 1201 - DNA, 2529 bp, synthetic construct
  misc_feature 1..2529: note = Variant of DNA polymerase I from Thermus sp. strain 2.9
  source 1..2529: mol_type = other DNA
atgcaccatcatcatcatcatggcggtagcggcatgttaccgttgttcgaacctaaaggtcgcgtgcttctggttgatggccatcatctcgcgtatcgtaacttctttgccctgaaaggattaaccaccagccgtggcgagccggtacagggtgtctacggctttgcaaagtcgctcctgaaagctctgaaagaagacggtgatgtggtgattgttgtctttgatgcgaaagcgccaagttttcgccacgaagcgtacgaagcttacaaagccgggcgtgctccaacgccggaagactttcctcgccaattggcgcttatgaaggaattagtggatttgcttggcctcgaacgcttggaagttcccggtttcgaggcagacgacgtattagcgactctcgcaaagaaagccgaacgtgagggctatgaagtccagatcttgacagcagatcgcgatcttttccagcttttatctccgcgcatctcggtgttacacccggaagggcatcgtatcaccccggaatggctctgggagaaatatggtttgcgtcccgaacaatgggtggattttcgcgccttagcaggcgatccgagcgacaatattccgggagttaaaggtatcggcgagaagacggcgctcaagctccttaaagaatgggggtcgttggagaacttgcttaagaatttagatcaggtcaaaccagagtcagtgcgtgagaagattcttgcacacctcgaagacctcaaattaagccgcgaattgtcccgtgtacgcaccgatttgccgctcgaagttgatttccgtggccgccgcgaacctgactgggagggtcttaaagcgtttttagagcgtcttgaatttggttcgctcttgcatgaattcggccttttagaaagcccgttaccagccgaagaagcaccttggccaccgcccgaaggcgcgtttttaggttaccgtttgagtcgcccggaaccgatgtgggccgaattattggctcttgcagcgtctgcccagggacgtgtgtatcgcgcggaagaccctcatggtgcgctccgcggcctcaaagaagtccgtggactccttgccaaagacttagctgttgttgcattgcgcgaaggtcttgatttacctccgactgatgatccaatgcttcttgcgtacctcttggacccgtcaaacacgacgcccgaaggcgtagcccgtcgttacggcggcgagtggaccgaagatgcaggcgagcgcgcgttattggccgaacgtttgcacgccaatttattaggacgtttgcaaggcgaggaacgtctcctctggctttacgaagaagtggagaaaccattgagtcgcgtgctcgcgcatatggaagctaccggtgtcaaattagacgtggcgtatttggaggcactcagccttgaagttgctgccgaaatgcgccgcttggaggaagaagtattccgtttagcaggccactcctttaaccttaattctcgcgatcagttagaacgtgtgttgttcgatgaacttggtctccctcctatcggcaagacagagaagaccggtaaacgtagcacttcagcggcggttttagaagctcttcgcgaagtccatcccattgtggacaagatcttgcagtaccgcgaactcgcgaaattgaaaggcacctatattgaccctcttccggcattagtccacccgaaaacgggacgcctccatacccgcttcaaccaaacagccacggcgaccggtcgtttgtcctcctctgatccaaaccttcagaatattccagtacgtaccccattgggccagaagatccgccgcgcgtttgtagctgaggagggttggcgtttagtggccctcgattatagccaaattgaattacgtgtccttgcccatctttctggcgatgagaacctcatccgcgtgtttcaggaaggcaaagacattcacactcaaacggcaagctggatgtttggattatcagctgaagcgatcgatcctttgatgcgtcgtgcagcgaagaccatcaatttcggtgttctctacggtatgagtgcccatcgtttgtcgcaggaattaggcattccctatgaagaagctgcggcgttcattcagcgctactttcaaagctatcccaaagttaaagcatggatcgagaagactctcgaagaaggccgcacacgtggttacgtagagaccttatttggacgtcgccgctatgttcccgatttaaacgctcctgtgaaatctgtccgtgaagccgccgaacgcatggcgttcaacatgcctgtacagggcacggcagctgacctcatgaaacttgcaatggtgcgcctttttccacaattgcgtgaagttggtgcccgcatgctcttgcaggtccacgatgaactcttgttagaagcgccaaaagagcgtgcggaagaggtggcagccctcgcgaaagaggttatggaaggcgtgtggcccttagcggtgcctcttgaagtcgaagttggtattggcgaggattggttggctgccaaaggataatga

SEQ ID NO: 1202 - protein, 841 aa, synthetic construct
  REGION 1..841: note = Variant of DNA polymerase I from Thermus sp. strain 2.9
MHHHHHHGGSGMLPLFEPKGRVLLVDGHHLAYRNFFALKGLTTSRGEPVQGVYGFAKSLLKALKEDGDVVIVVFDAKAPSFRHEAYEAYKAGRAPTPEDFPRQLALMKELVDLLGLERLEVPGFEADDVLATLAKKAEREGYEVQILTADRDLFQLLSPRISVLHPEGHRITPEWLWEKYGLRPEQWVDFRALAGDPSDNIPGVKGIGEKTALKLLKEWGSLENLLKNLDQVKPESVREKILAHLEDLKLSRELSRVRTDLPLEVDFRGRREPDWEGLKAFLERLEFGSLLHEFGLLESPLPAEEAPWPPPEGAFLGYRLSRPEPMWAELLALAASAQGRVYRAEDPHGALRGLKEVRGLLAKDLAVVALREGLDLPPTDDPMLLAYLLDPSNTTPEGVARRYGGEWTEDAGERALLAERLHANLLGRLQGEERLLWLYEEVEKPLSRVLAHMEATGVKLDVAYLEALSLEVAAEMRRLEEEVFRLAGHSFNLNSRDQLERVLFDELGLPPIGKTEKTGKRSTSAAVLEALREVHPIVDKILQYRELAKLKGTYIDPLPALVHPKTGRLHTRFNQTATATGRLSSSDPNLQNIPVRTPLGQKIRRAFVAEEGWRLVALDYSQIELRVLAHLSGDENLIRVFQEGKDIHTQTASWMFGLSAEAIDPLMRRAAKTINFGVLYGMSAHRLSQELGIPYEEAAAFIQRYFQSYPKVKAWIEKTLEEGRTRGYVETLFGRRRYVPDLNAPVKSVREAAERMAFNMPVQGTAADLMKLAMVRLFPQLREVGARMLLQVHDELLLEAPKERAEEVAALAKEVMEGVWPLAVPLEVEVGIGEDWLAAKG

SEQ ID NO: 1203 - DNA, 2529 bp, synthetic construct
  misc_feature 1..2529: note = Variant of DNA polymerase I from Thermus sp. strain 2.9
  source 1..2529: mol_type = other DNA
atgcaccatcatcatcatcatggcggtagcggcatgttaccgttgttcgaacctaaaggtcgcgtgcttctggttgatggccatcatctcgcgtatcgtaacttctttgccctgaaaggattaaccaccagccgtggcgagccggtacagggtgtctacggctttgcaaagtcgctcctgaaagctctgaaagaagacggtgatgtggtgattgttgtctttgatgcgaaagcgccaagttttcgccacgaagcgtacgaagcttacaaagccgggcgtgctccaacgccggaagactttcctcgccaattggcgcttatgaaggaattagtggatttgcttggcctcgaacgcttggaagttcccggtttcgaggcagacgacgtattagcgactctcgcaaagaaagccgaacgtgagggctatgaagtccagatcttgacagcagatcgcgatcttttccagcttttatctccgcgcatctcggtgttacacccggaagggcatcgtatcaccccggaatggctctgggagaaatatggtttgcgtcccgaacaatgggtggattttcgcgccttagcaggcgatccgagcgacaatattccgggagttaaaggtatcggcgagaagacggcgctcaagctccttaaagaatgggggtcgttggagaacttgcttaagaatttagatcaggtcaaaccagagtcagtgcgtgagaagattcttgcacacctcgaagacctcaaattaagccgcgaattgtcccgtgtacgcaccgatttgccgctcgaagttgatttccgtggccgccgcgaacctgactgggagggtcttaaagcgtttttagagcgtcttgaatttggttcgctcttgcatgaattcggccttttagaaagcccgttaccagccgaagaagcaccttggccaccgcccgaaggcgcgtttttaggttaccgtttgagtcgcccggaaccgatgtgggccgaattattggctcttgcagcgtctgcccagggacgtgtgtatcgcgcggaagaccctcatggtgcgctccgcggcctcaaagaagtccgtggactccttgccaaagacttagctgttgttgcattgcgcgaaggtcttgatttacctccgactgatgatccaatgcttcttgcgtacctcttggacccgtcaaacacgacgcccgaaggcgtagcccgtcgttacggcggcgagtggaccgaagatgcaggcgagcgcgcgttattggccgaacgtttgcacgccaatttattaggacgtttgcaaggcgaggaacgtctcctctggctttacgaagaagtggagaaaccattgagtcgcgtgctcgcgcatatggaagctaccggtgtcaaattagacgtggcgtatttggaggcactcagccttgaagttgctgccgaaatgcgcagtttggaggaagaagtattccgtttagcaggccactcctttaaccttaattctcgcgatcagttagaacgtgtgttgttcgatgaacttggtctccctcctatcggcaagacagagaagaccggtaaacgtagcacttcagcggcggttttagaagctcttcgcgaagtccatcccattgtggacaagatcttgcagtaccgcgaactcgcgaaattgaaaggcacctatattgaccctcttccggcattagtccacccgaaaacgggacgcctccatacccgcttcaaccaaacagccacggcgaccggtcgtttgtcctcctctgatccaaaccttcagaatattccagtacgtaccccattgggccagaagatccgccgcgcgtttgtagctgaggagggttggcgtttagtggccctcgattatagccaaattgaattacgtgtccttgcccatctttctggcgatgagaacctcatccgcgtgtttcaggaaggcaaagacattcacactcaaacggcaagctggatgtttggattatcagctgaagcgatcgatcctttgatgcgtcgtgcagcgaagaccatcaatttcggtgttctctacggtatgagtgcccatcgtttgtcgcaggaattaggcattccctatgaagaagctgcggcgttcattcagcgctactttcaaagctatcccaaagttaaagcatggatcgagaagactctcgaagaaggccgcacacgtggttacgtagagaccttatttggacgtcgccgctatgttcccgatttaaacgctcgcgtgaaatctgtccgtgaagccgccgaacgcatggcgttcaacatgcctgtacagggcacggcagctgacctcatgaaacttgcaatggtgcgcctttttccacaattgcgtgaagttggtgcccgcatgctcttgcaggtccacgatgaactcttgttagaagcgccaaaagagcgtgcggaagaggtggcagccctcgcgaaagaggttatggaaggcgtgtggcccttagcggtgcctcttgaagtcgaagttggtattggcgaggattggttggctgccaaaggataatga

SEQ ID NO: 1204 - protein, 841 aa, synthetic construct
  REGION 1..841: note = Variant of DNA polymerase I from Thermus sp. strain 2.9
MHHHHHHGGSGMLPLFEPKGRVLLVDGHHLAYRNFFALKGLTTSRGEPVQGVYGFAKSLLKALKEDGDVVIVVFDAKAPSFRHEAYEAYKAGRAPTPEDFPRQLALMKELVDLLGLERLEVPGFEADDVLATLAKKAEREGYEVQILTADRDLFQLLSPRISVLHPEGHRITPEWLWEKYGLRPEQWVDFRALAGDPSDNIPGVKGIGEKTALKLLKEWGSLENLLKNLDQVKPESVREKILAHLEDLKLSRELSRVRTDLPLEVDFRGRREPDWEGLKAFLERLEFGSLLHEFGLLESPLPAEEAPWPPPEGAFLGYRLSRPEPMWAELLALAASAQGRVYRAEDPHGALRGLKEVRGLLAKDLAVVALREGLDLPPTDDPMLLAYLLDPSNTTPEGVARRYGGEWTEDAGERALLAERLHANLLGRLQGEERLLWLYEEVEKPLSRVLAHMEATGVKLDVAYLEALSLEVAAEMRSLEEEVFRLAGHSFNLNSRDQLERVLFDELGLPPIGKTEKTGKRSTSAAVLEALREVHPIVDKILQYRELAKLKGTYIDPLPALVHPKTGRLHTRFNQTATATGRLSSSDPNLQNIPVRTPLGQKIRRAFVAEEGWRLVALDYSQIELRVLAHLSGDENLIRVFQEGKDIHTQTASWMFGLSAEAIDPLMRRAAKTINFGVLYGMSAHRLSQELGIPYEEAAAFIQRYFQSYPKVKAWIEKTLEEGRTRGYVETLFGRRRYVPDLNARVKSVREAAERMAFNMPVQGTAADLMKLAMVRLFPQLREVGARMLLQVHDELLLEAPKERAEEVAALAKEVMEGVWPLAVPLEVEVGIGEDWLAAKG

SEQ ID NO: 1205 - DNA, 2529 bp, synthetic construct
  misc_feature 1..2529: note = Variant of DNA polymerase I from Thermus sp. strain 2.9
  source 1..2529: mol_type = other DNA
atgcaccatcatcatcatcatggcggtagcggcatgttaccgttgttcgaacctaaaggtcgcgtgcttctggttgatggccatcatctcgcgtatcgtaacttctttgccctgaaaggattaaccaccagccgtggcgagccggtacagggtgtctacggctttgcaaagtcgctcctgaaagctctgaaagaagacggtgatgtggtgattgttgtctttgatgcgaaagcgccaagttttcgccacgaagcgtacgaagcttacaaagccgggcgtgctccaacgccggaagactttcctcgccaattggcgcttatgaaggaattagtggatttgcttggcctcgaacgcttggaagttcccggtttcgaggcagacgacgtattagcgactctcgcaaagaaagccgaacgtgagggctatgaagtccagatcttgacagcagatcgcgatcttttccagcttttatctccgcgcatctcggtgttacacccggaagggcatcgtatcaccccggaatggctctgggagaaatatggtttgcgtcccgaacaatgggtggattttcgcgccttagcaggcgataagagcgacaatattccgggagttaaaggtatcggcgagaagacggcgctcaagctccttaaagaatgggggtcgttggagaacttgcttaagaatttagatcaggtcaaaccagagtcagtgcgtgagaagattcttgcacacctcgaagacctcaaattaagccgcgaattgtcccgtgtacgcaccgatttgccgctcgaagttgatttccgtggccgccgcgaacctgactgggagggtcttaaagcgtttttagagcgtcttgaatttggttcgctcttgcatgaattcggccttttagaaagcccgttaccagccgaagaagcaccttggccaccgcccgaaggcgcgtttttaggttaccgtttgagtcgcccggaaccgatgtgggccgaattattggctcttgcagcgtctgcccagggacgtgtgtatcgcgcggaagaccctcatggtgcgctccgcggcctcaaagaagtccgtggactccttgccaaagacttagctgttgttgcattgcgcgaaggtcttgatttacctccgactgatgatccaatgcttcttgcgtacctcttggacccgtcaaacacgacgcccgaaggcgtagcccgtcgttacggcggcgagtggaccgaagatgcaggcgagcgcgcgttattggccgaacgtttgcacgccaatttattaggacgtttgcaaggcgaggaacgtctcctctggctttacgaagaagtggagaaaccattgagtcgcgtgctcgcgcatatggaagctaccggtgtcaaattagacgtggcgtatttggaggcactcagccttgaagttgctgccgaaatgcgccgcttggaggaagaagtattccgtttagcaggccactcctttaaccttaattctcgcgatcagttagaacgtgtgttgttcgatgaacttggtctccctcctatcggcaagacagagaagaccggtaaacgtagcacttcagcggcggttttagaagctcttcgcgaagtccatcccattgtggacaagatcttgcagtaccgcgaactcgcgaaattgaaaggcacctatattgaccctcttccggcattagtccacccgaaaacgggacgcctccatacccgcttcaaccaaacagccacggcgaccggtcgtttgtcctcctctgatccaaaccttcagaatattccagtacgtaccccattgggccagaagatccgccgcgcgtttgtagctgaggagggttggcgtttagtggccctcgattatagccaaattgaattacgtgtccttgcccatctttctggcgatgagaacctcatccgcgtgtttcaggaaggcaaagacattcacactcaaacggcaagctggatgtttggattatcagctgaagcgatcgatcctttgatgcgtcgtgcagcgaagaccatcaatttcggtgttctctacggtatgagtgcccatcgtttgtcgcaggaattaggcattccctatgaagaagctgcggcgttcattcagcgctactttcaaagctatcccaaagttaaagcatggatcgagaagactctcgaagaaggccgcacacgtggttacgtagagaccttatttggacgtcgccgctatgttcccgatttaaacgctcgcgtgaaatctgtccgtgaagccgccgaacgcatggcgttcaacatgcctgtacagggcacggcagctgacctcatgaaacttgcaatggtgcgcctttttccacaattgcgtgaagttggtgcccgcatgctcttgcaggtccacgatgaactcttgttagaagcgccaaaagagcgtgcggaagaggtggcagccctcgcgaaagaggttatggaaggcgtgtggcccttagcggtgcctcttgaagtcgaagttggtattggcgaggattggttggctgccaaaggataatga

SEQ ID NO: 1206 - protein, 841 aa, synthetic construct
  REGION 1..841: note = Variant of DNA polymerase I from Thermus sp. strain 2.9
MHHHHHHGGSGMLPLFEPKGRVLLVDGHHLAYRNFFALKGLTTSRGEPVQGVYGFAKSLLKALKEDGDVVIVVFDAKAPSFRHEAYEAYKAGRAPTPEDFPRQLALMKELVDLLGLERLEVPGFEADDVLATLAKKAEREGYEVQILTADRDLFQLLSPRISVLHPEGHRITPEWLWEKYGLRPEQWVDFRALAGDKSDNIPGVKGIGEKTALKLLKEWGSLENLLKNLDQVKPESVREKILAHLEDLKLSRELSRVRTDLPLEVDFRGRREPDWEGLKAFLERLEFGSLLHEFGLLESPLPAEEAPWPPPEGAFLGYRLSRPEPMWAELLALAASAQGRVYRAEDPHGALRGLKEVRGLLAKDLAVVALREGLDLPPTDDPMLLAYLLDPSNTTPEGVARRYGGEWTEDAGERALLAERLHANLLGRLQGEERLLWLYEEVEKPLSRVLAHMEATGVKLDVAYLEALSLEVAAEMRRLEEEVFRLAGHSFNLNSRDQLERVLFDELGLPPIGKTEKTGKRSTSAAVLEALREVHPIVDKILQYRELAKLKGTYIDPLPALVHPKTGRLHTRFNQTATATGRLSSSDPNLQNIPVRTPLGQKIRRAFVAEEGWRLVALDYSQIELRVLAHLSGDENLIRVFQEGKDIHTQTASWMFGLSAEAIDPLMRRAAKTINFGVLYGMSAHRLSQELGIPYEEAAAFIQRYFQSYPKVKAWIEKTLEEGRTRGYVETLFGRRRYVPDLNARVKSVREAAERMAFNMPVQGTAADLMKLAMVRLFPQLREVGARMLLQVHDELLLEAPKERAEEVAALAKEVMEGVWPLAVPLEVEVGIGEDWLAAKG

SEQ ID NO: 1207 - DNA, 2529 bp, synthetic construct
  misc_feature 1..2529: note = Variant of DNA polymerase I from Thermus sp. strain 2.9
  source 1..2529: mol_type = other DNA
atgcaccatcatcatcatcatggcggtagcggcatgttaccgttgttcgaacctaaaggtcgcgtgcttctggttgatggccatcatctcgcgtatcgtaacttctttgccctgaaaggattaaccaccagccgtggcgagccggtacagggtgtctacggctttgcaaagtcgctcctgaaagctctgaaagaagacggtgatgtggtgattgttgtctttgatgcgaaagcgccaagttttcgccacgaagcgtacgaagcttacaaagccgggcgtgctccaacgccggaagactttcctcgccaattggcgcttatgaaggaattagtggatttgcttggcctcgaacgcttggaagttcccggtttcgaggcagacgacgtattagcgactctcgcaaagaaagccgaacgtgagggctatgaagtccagatcttgacagcagatcgcgatcttttccagcttttatctccgcgcatctcggtgttacacccggatgggcatcgtatcaccccggaatggctctgggagaaatatggtttgcgtcccgaacaatgggtggattttcgcgccttagcaggcgatccgagcgacaatattccgggagttaaaggtatcggcgagaagacggcgctcaagctccttaaagaatgggggtcgttggagaacttgcttaagaatttagatcaggtcaaaccagagtcagtgcgtgagaagattcttgcacacctcgaagacctcaaattaagccgcgaattgtcccgtgtacgcaccgatttgccgctcgaagttgatttccgtggccgccgcgaacctgactgggagggtcttaaagcgtttttagagcgtcttgaatttggttcgctcttgcatgaattcggccttttagaaagcccgttaccagccgaagaagcaccttggccaccgcccgaaggcgcgtttttaggttaccgtttgagtcgcccggaaccgatgtgggccgaattattggctcttgcagcgtctgcccagggacgtgtgtatcgcgcggaagaccctcatggtgcgctccgcggcctcaaagaagtccgtggactccttgccaaagacttagctgttgttgcattgcgcgaaggtcttgatttacctccgactgatgatccaatgcttcttgcgtacctcttggacccgtcaaacacgacgcccgaaggcgtagcccgtcgttacggcggcgagtggaccgaagatgcaggcgagcgcgcgttattggccgaacgtttgcacgccaatttattaggacgtttgcaaggcgaggaacgtctcctctggctttacgaagaagtggagaaaccattgagtcgcgtgctcgcgcatatggaagctaccggtgtcaaattagacgtggcgtatttggaggcactcagccttgaagttgctgccgaaatgcgccgcttggaggaagaagtattccgtttagcaggccactcctttaaccttaattctcgcgatcagttagaacgtgtgttgttcgatgaacttggtctccctcctatcggcaagacagagaagaccggtaaacgtagcacttcagcggcggttttagaagctcttcgcgaagtccatcccattgtggacaagatcttgcagtaccgcgaactcgcgaaattgaaaggcacctatattgaccctcttccggcattagtccacccgaaaacgggacgcctccatacccgcttcaaccaaacagccacggcgaccggtcgtttgtcctcctctgatccaaaccttcagaatattccagtacgtaccccattgggccagaagatccgccgcgcgtttgtagctgaggagggttggcgtttagtggccctcgattatagccaaattgaattacgtgtccttgcccatctttctggcgatgagaacctcatccgcgtgtttcaggaaggcaaagacattcacactcaaacggcaagctggatgtttggattatcagctgaagcgatcgatcctttgatgcgtcgtgcagcgaagaccatcaatttcggtgttctctacggtatgagtgcccatcgtttgtcgcaggaattaggcattccctatgaagaagctgcggcgttcattcagcgctactttcaaagctatcccaaagttaaagcatggatcgagaagactctcgaagaaggccgcacacgtggttacgtagagaccttatttggacgtcgccgctatgttcccgatttaaacgctcgcgtgaaatctgtccgtgaagccgccgaacgcatggcgttcaacatgcctgtacagggcacggcagctgacctcatgaaacttgcaatggtgcgcctttttccacaattgcgtgaagttggtgcccgcatgctcttgcaggtccacgatgaactcttgttagaagcgccaaaagagcgtgcggaagaggtggcagccctcgcgaaagaggttatggaaggcgtgtggcccttagcggtgcctcttgaagtcgaagttggtattggcgaggattggttggctgccaaaggataatga

SEQ ID NO: 1208 - protein, 841 aa, synthetic construct
  REGION 1..841: note = Variant of DNA polymerase I from Thermus sp. strain 2.9
MHHHHHHGGSGMLPLFEPKGRVLLVDGHHLAYRNFFALKGLTTSRGEPVQGVYGFAKSLLKALKEDGDVVIVVFDAKAPSFRHEAYEAYKAGRAPTPEDFPRQLALMKELVDLLGLERLEVPGFEADDVLATLAKKAEREGYEVQILTADRDLFQLLSPRISVLHPDGHRITPEWLWEKYGLRPEQWVDFRALAGDPSDNIPGVKGIGEKTALKLLKEWGSLENLLKNLDQVKPESVREKILAHLEDLKLSRELSRVRTDLPLEVDFRGRREPDWEGLKAFLERLEFGSLLHEFGLLESPLPAEEAPWPPPEGAFLGYRLSRPEPMWAELLALAASAQGRVYRAEDPHGALRGLKEVRGLLAKDLAVVALREGLDLPPTDDPMLLAYLLDPSNTTPEGVARRYGGEWTEDAGERALLAERLHANLLGRLQGEERLLWLYEEVEKPLSRVLAHMEATGVKLDVAYLEALSLEVAAEMRRLEEEVFRLAGHSFNLNSRDQLERVLFDELGLPPIGKTEKTGKRSTSAAVLEALREVHPIVDKILQYRELAKLKGTYIDPLPALVHPKTGRLHTRFNQTATATGRLSSSDPNLQNIPVRTPLGQKIRRAFVAEEGWRLVALDYSQIELRVLAHLSGDENLIRVFQEGKDIHTQTASWMFGLSAEAIDPLMRRAAKTINFGVLYGMSAHRLSQELGIPYEEAAAFIQRYFQSYPKVKAWIEKTLEEGRTRGYVETLFGRRRYVPDLNARVKSVREAAERMAFNMPVQGTAADLMKLAMVRLFPQLREVGARMLLQVHDELLLEAPKERAEEVAALAKEVMEGVWPLAVPLEVEVGIGEDWLAAKG

SEQ ID NO: 1209 - DNA, 2529 bp, synthetic construct
  misc_feature 1..2529: note = Variant of DNA polymerase I from Thermus sp. strain 2.9
  source 1..2529: mol_type = other DNA
atgcaccatcatcatcatcatggcggtagcggcatgttaccgttgttcgaacctaaaggtcgcgtgcttctggttgatggccatcatctcgcgtatcgtaacttctttgccctgaaaggattaaccaccagccgtggcgagccggtacagggtgtctacggctttgcaaagtcgctcctgaaagctctgaaagaagacggtgatgtggtgattgttgtctttgatgcgaaagcgccaagttttcgccacgaagcgtacgaagcttacaaagccgggcgtgctccaacgccggaagactttcctcgccaattggcgcttatgaaggaattagtggatttgcttggcctcgaacgcttggaagttcccggtttcgaggcagacgacgtattagcgactctcgcaaagaaagccgaacgtgagggctatgaagtccagatcttgacagcagatcgcgatcttttccagcttttatctccgcgcatctcggtgttacacccggaagggcatcgtatcaccccggaatggctctgggagaaatatggtttgcgtcccgaacaatgggtggattttcgcgccttagcaggcgatccgcctgacaatattccgggagttaaaggtatcggcgagaagacggcgctcaagctccttaaagaatgggggtcgttggagaacttgcttaagaatttagatcaggtcaaaccagagtcagtgcgtgagaagattcttgcacacctcgaagacctcaaattaagccgcgaattgtcccgtgtacgcaccgatttgccgctcgaagttgatttccgtggccgccgcgaacctgactgggagggtcttaaagcgtttttagagcgtcttgaatttggttcgctcttgcatgaattcggccttttagaaagcccgttaccagccgaagaagcaccttggccaccgcccgaaggcgcgtttttaggttaccgtttgagtcgcccggaaccgatgtgggccgaattattggctcttgcagcgtctgcccagggacgtgtgtatcgcgcggaagaccctcatggtgcgctccgcggcctcaaagaagtccgtggactccttgccaaagacttagctgttgttgcattgcgcgaaggtcttgatttacctccgactgatgatccaatgcttcttgcgtacctcttggacccgtcaaacacgacgcccgaaggcgtagcccgtcgttacggcggcgagtggaccgaagatgcaggcgagcgcgcgttattggccgaacgtttgcacgccaatttattaggacgtttgcaaggcgaggaacgtctcctctggctttacgaagaagtggagaaaccattgagtcgcgtgctcgcgcatatggaagctaccggtgtcaaattagacgtggcgtatttggaggcactcagccttgaagttgctgccgaaatgcgccgcttggaggaagaagtattccgtttagcaggccactcctttaaccttaattctcgcgatcagttagaacgtgtgttgttcgatgaacttggtctccctcctatcggcaagacagagaagaccggtaaacgtagcacttcagcggcggttttagaagctcttcgcgaagtccatcccattgtggacaagatcttgcagtaccgcgaactcgcgaaattgaaaggcacctatattgaccctcttccggcattagtccacccgaaaacgggacgcctccatacccgcttcaaccaaacagccacggcgaccggtcgtttgtcctcctctgatccaaaccttcagaatattccagtacgtaccccattgggccagaagatccgccgcgcgtttgtagctgaggagggttggcgtttagtggccctcgattatagccaaattgaattacgtgtccttgcccatctttctggcgatgagaacctcatccgcgtgtttcaggaaggcaaagacattcacactcaaacggcaagctggatgtttggattatcagctgaagcgatcgatcctttgatgcgtcgtgcagcgaagaccatcaatttcggtgttctctacggtatgagtgcccatcgtttgtcgcaggaattaggcattccctatgaagaagctgcggcgttcattcagcgctactttcaaagctatcccaaagttaaagcatggatcgagaagactctcgaagaaggccgcacacgtggttacgtagagaccttatttggacgtcgccgctatgttcccgatttaaacgctcgcgtgaaatctgtccgtgaagccgccgaacgcatggcgttcaacatgcctgtacagggcacggcagctgacctcatgaaacttgcaatggtgcgcctttttccacaattgcgtgaagttggtgcccgcatgctcttgcaggtccacgatgaactcttgttagaagcgccaaaagagcgtgcggaagaggtggcagccctcgcgaaagaggttatggaaggcgtgtggcccttagcggtgcctcttgaagtcgaagttggtattggcgaggattggttggctgccaaaggataatga

SEQ ID NO: 1210 - protein, 841 aa, synthetic construct
  REGION 1..841: note = Variant of DNA polymerase I from Thermus sp. strain 2.9
MHHHHHHGGSGMLPLFEPKGRVLLVDGHHLAYRNFFALKGLTTSRGEPVQGVYGFAKSLLKALKEDGDVVIVVFDAKAPSFRHEAYEAYKAGRAPTPEDFPRQLALMKELVDLLGLERLEVPGFEADDVLATLAKKAEREGYEVQILTADRDLFQLLSPRISVLHPEGHRITPEWLWEKYGLRPEQWVDFRALAGDPPDNIPGVKGIGEKTALKLLKEWGSLENLLKNLDQVKPESVREKILAHLEDLKLSRELSRVRTDLPLEVDFRGRREPDWEGLKAFLERLEFGSLLHEFGLLESPLPAEEAPWPPPEGAFLGYRLSRPEPMWAELLALAASAQGRVYRAEDPHGALRGLKEVRGLLAKDLAVVALREGLDLPPTDDPMLLAYLLDPSNTTPEGVARRYGGEWTEDAGERALLAERLHANLLGRLQGEERLLWLYEEVEKPLSRVLAHMEATGVKLDVAYLEALSLEVAAEMRRLEEEVFRLAGHSFNLNSRDQLERVLFDELGLPPIGKTEKTGKRSTSAAVLEALREVHPIVDKILQYRELAKLKGTYIDPLPALVHPKTGRLHTRFNQTATATGRLSSSDPNLQNIPVRTPLGQKIRRAFVAEEGWRLVALDYSQIELRVLAHLSGDENLIRVFQEGKDIHTQTASWMFGLSAEAIDPLMRRAAKTINFGVLYGMSAHRLSQELGIPYEEAAAFIQRYFQSYPKVKAWIEKTLEEGRTRGYVETLFGRRRYVPDLNARVKSVREAAERMAFNMPVQGTAADLMKLAMVRLFPQLREVGARMLLQVHDELLLEAPKERAEEVAALAKEVMEGVWPLAVPLEVEVGIGEDWLAAKG

SEQ ID NO: 1211 - DNA, 2529 bp, synthetic construct
  misc_feature 1..2529: note = Variant of DNA polymerase I from Thermus sp. strain 2.9
  source 1..2529: mol_type = other DNA
atgcaccatcatcatcatcatggcggtagcggcatgttaccgttgttcgaacctaaaggtcgcgtgcttctggttgatggccatcatctcgcgtatcgtaacttctttgccctgaaaggattaaccaccagccgtggcgagccggtacagggtgtctacggctttgcaaagtcgctcctgaaagctctgaaagaagacggtgatgtggtgattgttgtctttgatgcgaaagcgccaagttttcgccacgaagcgtacgaagcttacaaagccgggcgtgctccaacgccggaagactttcctcgccaattggcgcttatgaaggaattagtggatttgcttggcctcgaacgcttggaagttcccggtttcgaggcagacgacgtattagcgactctcgcaaagaaagccgaacgtgagggctatgaagtccagatcttgacagcagatcgcgatcttttccagcttttatctccgcgcatctcggtgttacacccggaagggcatcgtatcaccccggaatggctctgggagaaatatggtttgcgtcccgaacaatgggtggattttcgcgccttagcaggcgatccgagcgacaatattccgggagttaaaggtatcggcgagaagacggcgctcaagctccttaaagaatgggggtcgttggagaacttgcttaagaatttagatcaggtcaaaccagagtcagtgcgtgagaagattcttgcacacctcgaagacctcaaattaagccgcgaattgtcccgtgtacgcaccgatttgccgctcgaagttgatttccgtggccgccgcgaacctgactgggagggtcttaaagcgtttttagagcgtcttgaatttggttcgctcttgcatgaattcggccttttagaaagcccgttaccagccgaagaagcaccttggccaccgcccgaaggcgcgtttttaggttaccgtttgagtcgcccggaaccgatgtgggccgaattattggctcttgcagcgtctgcccagggacgtgtgtatcgcgcggaagaccctcatggtgcgctccgcggcctcaaagaagtccgtggactccttgccaaagacttagctgttgttgcattgcgcgaaggtcttgatttacctccgactgatgatccaatgcttcttgcgtacctcttggacccgtcaaacacgacgcccgaaggcgtagcccgtcgttacggcggcgagtggaccgaagatgcaggcgagcgcgcgttattggccgaacgtttgcacgccaatttattaggacgtttgcaaggcgaggaacgtctcctctggctttacgaagaagtggagaaaccattgagtcgcgtgctcgcgcatatggaagctaccggtgtcaaattagacgtggcgtatttggaggcactcagccttgaagttgctgccgaaatgcgccgcttggaggaagaagtattccgtttagcaggccactcctttaaccttaattctcgcgatcagttagaacgtgtgttgttcgatgaacttggtctccctcctatcggcaagacagagaagaccggtaaacgtagcacttcagcggcggttttagaagctcttcgcgaagtccatcccattgtggacaagatcttgcagtaccgcgaactcgcgaaattgaaaggcacctatattgaccctcttccggcattagtccacccgaaaacgggacgcctccatacccgcttcaaccaaacagccacggcgaccggtcgtttgtcctcctctgatccaaaccttcagaatattccagtacgtaccccattgggccagaagatccgccgcgcgtttgtagctgaggagggttggcgtttagtggccctcgattatagccaaattgaattacgtgtccttgcccatctttctggcgatgagaacctcatccgcgtgtttcaggaaggcaaagacattcacactcaaacggcaagctggatgtttggattatcagctgaagcgatcgatcctttgatgcgtcgtgcagcgaagaccatcaatttcggtgttctctacggtatgagtgcccatcgtttgtcgcaggaattaggcattccctatgaagaagctgcggcgttcattcagcgctactttcaaagctatcccaaagttaaagcatggatcgagaagactctcgaagaaggccgcacacgtggttacgtagagaccttatttggacgtcgccgctatgttcccgatttaaacgctcgcgtggtttctgtccgtgaagccgccgaacgcatggcgttcaacatgcctgtacagggcacggcagctgacctcatgaaacttgcaatggtgcgcctttttccacaattgcgtgaagttggtgcccgcatgctcttgcaggtccacgatgaactcttgttagaagcgccaaaagagcgtgcggaagaggtggcagccctcgcgaaagaggttatggaaggcgtgtggcccttagcggtgcctcttgaagtcgaagttggtattggcgaggattggttggctgccaaaggataatga

SEQ ID NO: 1212 - protein, 841 aa, synthetic construct
  REGION 1..841: note = Variant of DNA polymerase I from Thermus sp. strain 2.9
MHHHHHHGGSGMLPLFEPKGRVLLVDGHHLAYRNFFALKGLTTSRGEPVQGVYGFAKSLLKALKEDGDVVIVVFDAKAPSFRHEAYEAYKAGRAPTPEDFPRQLALMKELVDLLGLERLEVPGFEADDVLATLAKKAEREGYEVQILTADRDLFQLLSPRISVLHPEGHRITPEWLWEKYGLRPEQWVDFRALAGDPSDNIPGVKGIGEKTALKLLKEWGSLENLLKNLDQVKPESVREKILAHLEDLKLSRELSRVRTDLPLEVDFRGRREPDWEGLKAFLERLEFGSLLHEFGLLESPLPAEEAPWPPPEGAFLGYRLSRPEPMWAELLALAASAQGRVYRAEDPHGALRGLKEVRGLLAKDLAVVALREGLDLPPTDDPMLLAYLLDPSNTTPEGVARRYGGEWTEDAGERALLAERLHANLLGRLQGEERLLWLYEEVEKPLSRVLAHMEATGVKLDVAYLEALSLEVAAEMRRLEEEVFRLAGHSFNLNSRDQLERVLFDELGLPPIGKTEKTGKRSTSAAVLEALREVHPIVDKILQYRELAKLKGTYIDPLPALVHPKTGRLHTRFNQTATATGRLSSSDPNLQNIPVRTPLGQKIRRAFVAEEGWRLVALDYSQIELRVLAHLSGDENLIRVFQEGKDIHTQTASWMFGLSAEAIDPLMRRAAKTINFGVLYGMSAHRLSQELGIPYEEAAAFIQRYFQSYPKVKAWIEKTLEEGRTRGYVETLFGRRRYVPDLNARVVSVREAAERMAFNMPVQGTAADLMKLAMVRLFPQLREVGARMLLQVHDELLLEAPKERAEEVAALAKEVMEGVWPLAVPLEVEVGIGEDWLAAKG

SEQ ID NO: 1213 - DNA, 2529 bp, synthetic construct
  misc_feature 1..2529: note = Variant of DNA polymerase I from Thermus sp. strain 2.9
  source 1..2529: mol_type = other DNA
atgcaccatcatcatcatcatggcggtagcggcatgttaccgttgttcgaacctaaaggtcgcgtgcttctggttgatggccatcatctcgcgtatcgtaacttctttgccctgaaaggattaaccaccagccgtggcgagccggtacagggtgtctacggctttgcaaagtcgctcctgaaagctctgaaagaagacggtgatgtggtgattgttgtctttgatgcgaaagcgccaagttttcgccacgaagcgtacgaagcttacaaagccgggcgtgctccaacgccggaagactttcctcgccaattggcgcttatgaaggaattagtggatttgcttggcctcgaacgcttggaagttcccggtttcgaggcagacgacgtattagcgactctcgcaaagaaagccgaacgtgagggctatgaagtccagatcttgacagcagatcgcgatcttttccagcttttatctccgcgcatctcggtgttacacccggaagggcatcgtatcaccccggaatggctctgggagaaatatggtttgcgtcccgaacaatgggtggattttcgcgccttagcaggcgatccgagcgacaatattccgggagttaaaggtatcggcgagaagacggcgctcaagctccttaaagaatgggggtcgttggagaacttgcttaagaatttagatcaggtcaaaccagagtcagtgcgtgagaagattcttgcacacctcgaagacctcaaattaagccgcgaattgtcccgtgtacgcaccgatttgccgctcgaagttgatttccgtggccgccgcgaacctgactgggagggtcttaaagcgtttttagagcgtcttgaatttggttcgctcttgcatgaattcggccttttagaaagcccgttaccagccgaagaagcaccttggccaccgcccgaaggcgcgtttttaggttaccgtttgagtcgcccggaaccgatgtgggccgaattattggctcttgcagcgtctgcccagggacgtgtgtatcgcgcggaagaccctcatggtgcgctccgcggcctcaaagaagtccgtggactccttgccaaagacttagctgttgttgcattgcgcgaaggtcttgatttacctccgactgatgatccaatgcttcttgcgtacctcttggacccgtcaaacacgacgcccgaaggcgtagcccgtcgttacggcggcgagtggaccgaagatgcaggcgagcgcgcgttattggccgaacgtttgcacgccaatttattaggacgtttgcaaggcgaggaacgtctcctctggctttacgaagaagtggagaaaccattgagtcgcgtgctcgcgcatatggaagctaccggtgtcaaattagacgtggcgtatttggaggcactcagccttgaagttgctgccgaaatgcgccgcttggaggaagaagtattccgtttagcaggccactcctttaaccttaattctcgcgatcagttagaacgtgtgttgttcgatgaacttggtctccctcctatcggcaagacagagaagaccggtaaacgtagcacttcagcggcggttttagaagctcttcgcgaagtccatcccattgtggacaagatcttgcagtaccgcgaactcgcgaaattgaaaggcacctatattgaccctcttccggcattagtccacccgaaaacgggacgcctccatacccgcttcaaccaaacagccacggcgaccggtcgtttgtcctcctctgatccaaaccttcagaatattccagtacgtaccccattgggccagaagatccgccgcgcgtttgtagctgaggagggttggcgtttagtggccctcgattatagccaaattgaattacgtgtccttgcccatctttctggcgatgagaacctcatccgcgtgtttcaggaaggcaaagacattcacactcaaacggcaagctggatgtttggattatcagctgaagcgatcgatcctttgatgcgtcgtgcagcgaagaccatcaatttcggtgttctctacggtatgagtgcccatcgtttgtcgcaggaattaggcattccctataaggaagctgcggcgttcattcagcgctactttcaaagctatcccaaagttaaagcatggatcgagaagactctcgaagaaggccgcacacgtggttacgtagagaccttatttggacgtcgccgctatgttcccgatttaaacgctcgcgtgaaatctgtccgtgaagccgccgaacgcatggcgttcaacatgcctgtacagggcacggcagctgacctcatgaaacttgcaatggtgcgcctttttccacaattgcgtgaagttggtgcccgcatgctcttgcaggtccacgatgaactcttgttagaagcgccaaaagagcgtgcggaagaggtggcagccctcgcgaaagaggttatggaaggcgtgtggcccttagcggtgcctcttgaagtcgaagttggtattggcgaggattggttggctgccaaaggataatga

SEQ ID NO: 1214 - protein, 841 aa, synthetic construct
  REGION 1..841: note = Variant of DNA polymerase I from Thermus sp. strain 2.9
MHHHHHHGGSGMLPLFEPKGRVLLVDGHHLAYRNFFALKGLTTSRGEPVQGVYGFAKSLLKALKEDGDVVIVVFDAKAPSFRHEAYEAYKAGRAPTPEDFPRQLALMKELVDLLGLERLEVPGFEADDVLATLAKKAEREGYEVQILTADRDLFQLLSPRISVLHPEGHRITPEWLWEKYGLRPEQWVDFRALAGDPSDNIPGVKGIGEKTALKLLKEWGSLENLLKNLDQVKPESVREKILAHLEDLKLSRELSRVRTDLPLEVDFRGRREPDWEGLKAFLERLEFGSLLHEFGLLESPLPAEEAPWPPPEGAFLGYRLSRPEPMWAELLALAASAQGRVYRAEDPHGALRGLKEVRGLLAKDLAVVALREGLDLPPTDDPMLLAYLLDPSNTTPEGVARRYGGEWTEDAGERALLAERLHANLLGRLQGEERLLWLYEEVEKPLSRVLAHMEATGVKLDVAYLEALSLEVAAEMRRLEEEVFRLAGHSFNLNSRDQLERVLFDELGLPPIGKTEKTGKRSTSAAVLEALREVHPIVDKILQYRELAKLKGTYIDPLPALVHPKTGRLHTRFNQTATATGRLSSSDPNLQNIPVRTPLGQKIRRAFVAEEGWRLVALDYSQIELRVLAHLSGDENLIRVFQEGKDIHTQTASWMFGLSAEAIDPLMRRAAKTINFGVLYGMSAHRLSQELGIPYKEAAAFIQRYFQSYPKVKAWIEKTLEEGRTRGYVETLFGRRRYVPDLNARVKSVREAAERMAFNMPVQGTAADLMKLAMVRLFPQLREVGARMLLQVHDELLLEAPKERAEEVAALAKEVMEGVWPLAVPLEVEVGIGEDWLAAKG

SEQ ID NO: 1215 - DNA, 2529 bp, synthetic construct
  misc_feature 1..2529: note = Variant of DNA polymerase I from Thermus sp. strain 2.9
  source 1..2529: mol_type = other DNA
atgcaccatcatcatcatcatggcggtagcggcatgttaccgttgttcgaacctaaaggtcgcgtgcttctggttgatggccatcatctcgcgtatcgtaacttctttgccctgaaaggattaaccaccagccgtggcgagccggtacagggtgtctacggctttgcaaagtcgctcctgaaagctctgaaagaagacggtgatgtggtgattgttgtctttgatgcgaaagcgccaagttttcgccacgaagcgtacgaagcttacaaagccgggcgtgctccaacgccggaagactttcctcgccaattggcgcttatgaaggaattagtggatttgcttggcctcgaacgcttggaagttcccggtttcgaggcagacgacgtattagcgactctcgcaaagaaagccgaacgtgagggctatgaagtccagatcttgacagcagatcgcgatcttttccagcttttatctccgcgcatctcggtgttacacccggaagggcatcgtatcaccccggaatggctctgggagaaatatggtttgcgtcccgaacaatgggtggattttcgcgccttagcaggcgatccgagcgacaatattccgggagttaaaggtatcggcgagaagacggcgctcaagctccttaaagaatgggggtcgttggagaacttgcttaagaatttagatcaggtcaaaccagagtcagtgcgtgagaagattcttgcacacctcgaagacctcaaattaagccgcgaattgtcccgtgtacgcaccgatttgccgctcgaagttgatttccgtggccgccgcgaacctgactgggagggtcttaaagcgtttttagagcgtcttgaatttggttcgctcttgcatgaattcggccttttagaaagcccgttaccagccgaagaagcaccttggccaccgcccgaaggcgcgtttttaggttaccgtttgagtcgcccggaaccgatgtgggccgaattattggctcttgcagcgtctgcccagggacgtgtgtatcgcgcggaagaccctcatggtgcgctccgcggcctcaaagaagtccgtggactccttgccaaagacttagctgttgttgcattgcgcgaaggtcttgatttacctccgactgatgatccaatgcttcttgcgtacctcttggacccgtcaaacacgacgcccgaaggcgtagcccgtcgttacggcggcgagtggaccgaagatgcaggcgagcgcgcgttattggccgaacgtttgcacgccaatttattaggacgtttgcaaggcgaggaacgtctcctctggctttacgaagaagtggagaaaccattgagtcgcgtgctcgcgcatatggaagctaccggtgtcaaattagacgtggcgtatttggaggcactcagccttgaagttgctgccgaaatgcgcttgttggaggaagaagtattccgtttagcaggccactcctttaaccttaattctcgcgatcagttagaacgtgtgttgttcgatgaacttggtctccctcctatcggcaagacagagaagaccggtaaacgtagcacttcagcggcggttttagaagctcttcgcgaagtccatcccattgtggacaagatcttgcagtaccgcgaactcgcgaaattgaaaggcacctatattgaccctcttccggcattagtccacccgaaaacgggacgcctccatacccgcttcaaccaaacagccacggcgaccggtcgtttgtcctcctctgatccaaaccttcagaatattccagtacgtaccccattgggccagaagatccgccgcgcgtttgtagctgaggagggttggcgtttagtggccctcgattatagccaaattgaattacgtgtccttgcccatctttctggcgatgagaacctcatccgcgtgtttcaggaaggcaaagacattcacactcaaacggcaagctggatgtttggattatcagctgaagcgatcgatcctttgatgcgtcgtgcagcgaagaccatcaatttcggtgttctctacggtatgagtgcccatcgtttgtcgcaggaattaggcattccctatgaagaagctgcggcgttcattcagcgctactttcaaagctatcccaaagttaaagcatggatcgagaagactctcgaagaaggccgcacacgtggttacgtagagaccttatttggacgtcgccgctatgttcccgatttaaacgctcgcgtgaaatctgtccgtgaagccgccgaacgcatggcgttcaacatgcctgtacagggcacggcagctgacctcatgaaacttgcaatggtgcgcctttttccacaattgcgtgaagttggtgcccgcatgctcttgcaggtccacgatgaactcttgttagaagcgccaaaagagcgtgcggaagaggtggcagccctcgcgaaagaggttatggaaggcgtgtggcccttagcggtgcctcttgaagtcgaagttggtattggcgaggattggttggctgccaaaggataatga

SEQ ID NO: 1216 - protein, 841 aa, synthetic construct
  REGION 1..841: note = Variant of DNA polymerase I from Thermus sp. strain 2.9
MHHHHHHGGSGMLPLFEPKGRVLLVDGHHLAYRNFFALKGLTTSRGEPVQGVYGFAKSLLKALKEDGDVVIVVFDAKAPSFRHEAYEAYKAGRAPTPEDFPRQLALMKELVDLLGLERLEVPGFEADDVLATLAKKAEREGYEVQILTADRDLFQLLSPRISVLHPEGHRITPEWLWEKYGLRPEQWVDFRALAGDPSDNIPGVKGIGEKTALKLLKEWGSLENLLKNLDQVKPESVREKILAHLEDLKLSRELSRVRTDLPLEVDFRGRREPDWEGLKAFLERLEFGSLLHEFGLLESPLPAEEAPWPPPEGAFLGYRLSRPEPMWAELLALAASAQGRVYRAEDPHGALRGLKEVRGLLAKDLAVVALREGLDLPPTDDPMLLAYLLDPSNTTPEGVARRYGGEWTEDAGERALLAERLHANLLGRLQGEERLLWLYEEVEKPLSRVLAHMEATGVKLDVAYLEALSLEVAAEMRLLEEEVFRLAGHSFNLNSRDQLERVLFDELGLPPIGKTEKTGKRSTSAAVLEALREVHPIVDKILQYRELAKLKGTYIDPLPALVHPKTGRLHTRFNQTATATGRLSSSDPNLQNIPVRTPLGQKIRRAFVAEEGWRLVALDYSQIELRVLAHLSGDENLIRVFQEGKDIHTQTASWMFGLSAEAIDPLMRRAAKTINFGVLYGMSAHRLSQELGIPYEEAAAFIQRYFQSYPKVKAWIEKTLEEGRTRGYVETLFGRRRYVPDLNARVKSVREAAERMAFNMPVQGTAADLMKLAMVRLFPQLREVGARMLLQVHDELLLEAPKERAEEVAALAKEVMEGVWPLAVPLEVEVGIGEDWLAAKG

SEQ ID NO: 1217 - DNA, 2529 bp, synthetic construct
  misc_feature 1..2529: note = Variant of DNA polymerase I from Thermus sp. strain 2.9
  source 1..2529: mol_type = other DNA
atgcaccatcatcatcatcatggcggtagcggcatgttaccgttgttcgaacctaaaggtcgcgtgcttctggttgatggccatcatctcgcgtatcgtaacttctttgccctgaaaggattaaccaccagccgtggcgagccggtacagggtgtctacggctttgcaaagtcgctcctgaaagctctgaaagaagacggtgatgtggtgattgttgtctttgatgcgaaagcgccaagttttcgccacgaagcgtacgaagcttacaaagccgggcgtgctccaacgccggaagactttcctcgccaattggcgcttatgaaggaattagtggatttgcttggcctcgaacgcttggaagttcccggtttcgaggcagacgacgtattagcgactctcgcaaagaaagccgaacgtgagggctatgaagtccagatcttgacagcagatcgcgatcttttccagcttttatctccgcgcatctcggtgttacacccggaagggcatcgtatcaccccggaatggctctgggagaaatatggtttgcgtcccgaacaatgggtggattttcgcgccttagcaggcgatccgagcgacaatattccgggagttaaaggtatcggcgagaagacggcgctcaagctccttaaagaatgggggtcgttggagaacttgcttaagaatttagatcaggtcaaaccagagtcagtgcgtgagaagattcttgcacacctcgaagacctcaaattaagcctggaattgtcccgtgtacgcaccgatttgccgctcgaagttgatttccgtcgtcgccgcgaacctgactgggagggtcttaaagcgtttttagagcgtcttgaatttggttcgctcttgcatgaattcggccttttagaaagcccgttaccagccgaagaagcaccttggccaccgcccgaaggcgcgtttttaggttaccgtttgagtcgcccggaaccgatgtgggccgaattatcggctcttgcagcgtctgcccagggacgtgtgtatcgcgcggaagaccctcatggtgcgctcaagggcctcaaagaagtccgtggactccttgccaaagacttagctgttgttgcattgcgcgaaggtcttgatttacctccgactgatgatccaatgcttcttgcgtacctcttggacccgtcaaacacgacgcccgaaggcgtagcccgtcgttacggcggcgagtggaccgaagatgcagctgagcgcgcgttattggccgaacgtttgcacgccaatttattaggacgtttgcaaggcgaggaacgtctcctctggctttacgaagaagtggagaaaccattgagtcgcgtgctcgcgcatatggaagctaccggtgtcaaattagacgtggcgtatttggaggctctcagccttgaagttgctgccgaaatgcgccgcttggaggaagaagtattccgtttagcaggccactcctttaaccttaattctcgcgatcagttagaacgtgtgttgttcgatgagcttggtctccctcctatcggcaagacagagaagaccggtaaacgtagcacttcagcggcggttttagaagctcttcgcgaagtccatcccattgtggacaagatcttgcagtaccgcgaactcgcgaaattgaaaggcacctatattgaccctcttccggcattagtccacccgaaaacgggacgcctccatacccgcttcaaccaaacagccacggcgaccggtcgtttgtcctcctctgatccaaaccttcagaatattccagtacgtaccccattgggccagaagatccgccgcgcgtttgtagctgaggagggttggcgtttagtggccctcgattatagccaaattgaattacgtgtccttgcccatctttctggcgatgagaacctcatccgcgtgtttcaggaaggcaaagacattcacactcaaacggcaagctggatgtttggattatcagcagaagcgatcgatcctttgatgcgtcgtgcagcgaagaccgttaatttcggtgttctctacggtatgagtgcccatcgtttgtcgcaggaattaggcattccctatgaagaagctgccgcgttcattcagaagtactttcaaagctatcccaaagttaaagcatggatcgagaagactctcgaagaaggccgcacacgtggttacgtagagaccttatttggacgtcgccgctatgttcccgatttaaacgctcgcgtgaaatctgtccgtgaagccgccgaacgcatggcgttcaacatgcctgtacagggcacggcagctgacctcatgaaacttgcaatggtgcgcctttttccacaattgcgtgaagttggtgcccgcatgctcttgcaggtccacgatgaactcttgttagaagcgccaaaagagcgtgcggaagaggtggcagccctcgcgaaagaggttatggaaggcgtgtggcccttagcggtgcctcttgaagtcgaagttggtattggcgaggattggttggctgccaaaggataatga

SEQ ID NO: 1218 - protein, 841 aa, synthetic construct
  REGION 1..841: note = Variant of DNA polymerase I from Thermus sp. strain 2.9
MHHHHHHGGSGMLPLFEPKGRVLLVDGHHLAYRNFFALKGLTTSRGEPVQGVYGFAKSLLKALKEDGDVVIVVFDAKAPSFRHEAYEAYKAGRAPTPEDFPRQLALMKELVDLLGLERLEVPGFEADDVLATLAKKAEREGYEVQILTADRDLFQLLSPRISVLHPEGHRITPEWLWEKYGLRPEQWVDFRALAGDPSDNIPGVKGIGEKTALKLLKEWGSLENLLKNLDQVKPESVREKILAHLEDLKLSLELSRVRTDLPLEVDFRRRREPDWEGLKAFLERLEFGSLLHEFGLLESPLPAEEAPWPPPEGAFLGYRLSRPEPMWAELSALAASAQGRVYRAEDPHGALKGLKEVRGLLAKDLAVVALREGLDLPPTDDPMLLAYLLDPSNTTPEGVARRYGGEWTEDAAERALLAERLHANLLGRLQGEERLLWLYEEVEKPLSRVLAHMEATGVKLDVAYLEALSLEVAAEMRRLEEEVFRLAGHSFNLNSRDQLERVLFDELGLPPIGKTEKTGKRSTSAAVLEALREVHPIVDKILQYRELAKLKGTYIDPLPALVHPKTGRLHTRFNQTATATGRLSSSDPNLQNIPVRTPLGQKIRRAFVAEEGWRLVALDYSQIELRVLAHLSGDENLIRVFQEGKDIHTQTASWMFGLSAEAIDPLMRRAAKTVNFGVLYGMSAHRLSQELGIPYEEAAAFIQKYFQSYPKVKAWIEKTLEEGRTRGYVETLFGRRRYVPDLNARVKSVREAAERMAFNMPVQGTAADLMKLAMVRLFPQLREVGARMLLQVHDELLLEAPKERAEEVAALAKEVMEGVWPLAVPLEVEVGIGEDWLAAKG

SEQ ID NO: 1219 - DNA, 2529 bp, synthetic construct
  misc_feature 1..2529: note = Variant of DNA polymerase I from Thermus sp. strain 2.9
  source 1..2529: mol_type = other DNA
atgcaccatcatcatcatcatggcggtagcggcatgttaccgttgttcgaacctaaaggtcgcgtgcttctggttgatggccatcatctcgcgtatcgtaacttctttgccctgaaaggattaaccaccagccgtggcgagccggtacagggtgtctacggctttgcaaagtcgctcctgaaagctctgaaagaagacggtgatgtggtgattgttgtctttgatgcgaaagcgccaagttttcgccacgaagcgtacgaagcttacaaagccgggcgtgctccaacgccggaagactttcctcgccaattggcgcttatgaaggaattagtggatttgcttggcctcgaacgcttggaagttcccggtttcgaggcagacgacgtattagcgactctcgcaaagaaagccgaacgtgagggctatgaagtccagatcttgacagcagatcgcgatcttttccagcttttatctccgcgcatctcggtgttacacccggaagggcatcgtatcaccccggaatggctctgggagaaatatggtttgcgtcccgaacaatgggtggattttcgcgccttagcaggcgatccgagcgacaatattccgggagttaaaggtatcggcgagaagacggcgctcaagctccttaaagaatgggggtcgttggagaacttgcttaagaatttagatcaggtcaaaccagagtcagtgcgtgagaagattcttgcacacctcgaagacctcaaattaagccgcgaattgtcccgtgtacgcaccgatttgccgctcgaagttgatttccgtggtcgccgcgaacctgactgggagggtcttaaagcgtttttagagcgtcttgaatttggttcgctcttgcatgaattcggccttttagaaagcccgttaccagccgaagaagcaccttggccaccgcccgaaggcgcgtttttaggttaccgtttgagtcgcccggaaccgatgtgggccgaattatcggctcttgcagcgtctgcccaggggcgtgtgtatcgcgcggaagaccctcatggtgcgctccgtggcctcaaagaagtccgtggactccttgccaaagacttagctgttgttgcattgcgcgaaggtcttgatttacctccgactgatgatccaatgcttcttgcgtacctcttggacccgtcaaacacgacgcccgaaggcgtagcccgtcgttacggcggcgagtggaccgaagatgcagctgagcgcgcgttattggccgaacgtttgcacgccaatttattaggacgtttgcaaggcgaggaacgtctcctctggctttacgaagaagtggagaaaccattgagtcgcgtgctcgcgcatatggaagctaccggtgtcaaattagacgtggcgtatttggaggctctcagccttgaagttgctgccgaaatgcgccgcttggaggaagaagtattccgtttagcaggccactcctttaaccttaattctcgcgatcagttagaacgtgtgttgttcgatgagcttggtctccctcctatcggcaagacagagaagaccggtaaacgtagcacttcagcggcggttttagaagctcttcgcgaagtccatcccattgtggacaagatcttgcagtaccgcgaactcgcgaaattgaaaggcacctatattgaccctcttccggcattagtccacccgaaaacgggacgcctccatacccgcttcaaccaaacagccacggcgaccggtcgtttgtcctcctctgatccaaaccttcagaatattccagtacgtaccccattgggccagaagatccgccgcgcgtttgtagctgaggagggttggcgtttagtggccctcgattatagccaaattgaattacgtgtccttgcccatctttctggcgatgagaacctcatccgcgtgtttcaggaaggcaaagacattcacactcaaacggcaagctggatgtttggattatcaccagaagcgatcgatcctttgatgcgtcgtgcagcgaagaccattaatttcggtgttctctacggtatgagtgcccatcgtttgtcgcaggaattaggcattccctatgaagaagctgtcgcgttcattcagcgctactttcaaagctatcccaaagttaaagcatggatcgagaagactctcgaagaaggccgcacacgtggttacgtagagaccttatttggacgtcgccgctatgttcccgatttaaacgctcgcgtgaaatctgtccgtgaagccgccgaacgcatggcgttcaacatgcctgtacagggcacggcagctgacctcatgaaacttgcaatggtgcgcctttttccacaattgcgtgaagttggtgcccgcatgctcttgcaggtccacgatgaactcttgttagaagcgccaaaagagcgtgcggaagaggtggcagccctcgcgaaagaggttatggaaggcgtgtggcccttagcggtgcctcttgaagtcgaagttggtattggcgaggattggttggctgccaaaggataatga

SEQ ID NO: 1220 - protein, 841 aa, synthetic construct
  REGION 1..841: note = Variant of DNA polymerase I from Thermus sp. strain 2.9
MHHHHHHGGSGMLPLFEPKGRVLLVDGHHLAYRNFFALKGLTTSRGEPVQGVYGFAKSLLKALKEDGDVVIVVFDAKAPSFRHEAYEAYKAGRAPTPEDFPRQLALMKELVDLLGLERLEVPGFEADDVLATLAKKAEREGYEVQILTADRDLFQLLSPRISVLHPEGHRITPEWLWEKYGLRPEQWVDFRALAGDPSDNIPGVKGIGEKTALKLLKEWGSLENLLKNLDQVKPESVREKILAHLEDLKLSRELSRVRTDLPLEVDFRGRREPDWEGLKAFLERLEFGSLLHEFGLLESPLPAEEAPWPPPEGAFLGYRLSRPEPMWAELSALAASAQGRVYRAEDPHGALRGLKEVRGLLAKDLAVVALREGLDLPPTDDPMLLAYLLDPSNTTPEGVARRYGGEWTEDAAERALLAERLHANLLGRLQGEERLLWLYEEVEKPLSRVLAHMEATGVKLDVAYLEALSLEVAAEMRRLEEEVFRLAGHSFNLNSRDQLERVLFDELGLPPIGKTEKTGKRSTSAAVLEALREVHPIVDKILQYRELAKLKGTYIDPLPALVHPKTGRLHTRFNQTATATGRLSSSDPNLQNIPVRTPLGQKIRRAFVAEEGWRLVALDYSQIELRVLAHLSGDENLIRVFQEGKDIHTQTASWMFGLSPEAIDPLMRRAAKTINFGVLYGMSAHRLSQELGIPYEEAVAFIQRYFQSYPKVKAWIEKTLEEGRTRGYVETLFGRRRYVPDLNARVKSVREAAERMAFNMPVQGTAADLMKLAMVRLFPQLREVGARMLLQVHDELLLEAPKERAEEVAALAKEVMEGVWPLAVPLEVEVGIGEDWLAAKG

SEQ ID NO: 1221 - DNA, 2529 bp, synthetic construct
  misc_feature 1..2529: note = Variant of DNA polymerase I from Thermus sp. strain 2.9
  source 1..2529: mol_type = other DNA
atgcaccatcatcatcatcatggcggtagcggcatgttaccgttgttcgaacctaaaggtcgcgtgcttctggttgatggccatcatctcgcgtatcgtaacttctttgccctgaaaggattaaccaccagccgtggcgagccggtacagggtgtctacggctttgcaaagtcgctcctgaaagctctgaaagaagacggtgatgtggtgattgttgtctttgatgcgaaagcgccaagttttcgccacgaagcgtacgaagcttacaaagccgggcgtgctccaacgccggaagactttcctcgccaattggcgcttatgaaggaattagtggatttgcttggcctcgaacgcttggaagttcccggtttcgaggcagacgacgtattagcgactctcgcaaagaaagccgaacgtgagggctatgaagtccagatcttgacagcagatcgcgatcttttccagcttttatctccgcgcatctcggtgttacacccggaagggcatcgtatcaccccggaatggctctgggagaaatatggtttgcgtcccgaacaatgggtggattttcgcgccttagcaggcgatccgagcgacaatattccgggagttaaaggtatcggcgagaagacggcgctcaagctccttaaagaatgggggtcgttggagaacttgcttaagaatttagatcaggtcaaaccagagtcagtgcgtgagaagattcttgcacacctcgaagacctcaaattaagccgcgaattgtcccgtgtacgcaccgatttgccgctcgaagttgatttccgtggccgccgcgaacctgactgggagggtcttaaagcgtttttagagcgtcttgaatttggttcgctcttgcatgaattcggccttttagaaagcccgttaccagccgaagaagcaccttggccaccgcccgaaggcgcgtttttaggttaccgtttgagtcgcccggaaccgatgtgggccgaattattggctcttgcagcgtctgcccagggacgtgtgtatcgcgcggaagaccctcatggtgcgctccgcggcctcaaagaagtccgtggactccttgccaaagacttagctgttgttgcattgcgcgaaggtcttgatttacctccgactgatgatccaatgcttcttgcgtacctcttggacccgtcaaacacgacgcccgaaggcgtagcccgtcgttacggcggcgagtggaccgaagatgcaggcgagcgcgcgttattggccgaacgtttgcacgccaatttattaggacgtttgcaaggcgaggaacgtctcctctggctttacgaagaagtggagaaaccattgagtcgcgtgctcgcgcatatggaagctaccggtgtcaaattagacgtggcgtatttggaggcactcagccttgaagttgctgccgaaatgcgccgcttggaggaagaagtattccgtttagcaggccactcctttaaccttaattctcgcgatcagttagaacgtgtgttgttcgatgaacttggtctccctcctatcggcaagacagagcgtaccggtaaacgtagcacttcagcggcggttttagaagctcttcgcgaagtccatcccattgtggacaagatcttgcagtaccgcgaactcgcgaaattgaaaggcacctatattgaccctcttccggcattagtccacccgaaaacgggacgcctccatacccgcttcaaccaaacagccacggcgaccggtcgtttgtcctcctctgatccaaaccttcagaatattccagtacgtaccccattgggccagaagatccgccgcgcgtttgtagctgaggagggttggcgtttagtggccctcgattatagccaaattgaattacgtgtccttgcccatctttctggcgatgagaacctcatccgcgtgtttcaggaaggcaaagacattcacactcaaacggcaagctggatgtttggattatcagctgaagcgatcgatcctttgatgcgtcgtgcagcgaagaccatcaatttcggtgttctctacggtatgagtgcccatcgtttgtcgcaggaattaggcattccctatgaagaagctgcggcgttcattcagcgctactttcaaagctatcccaaagttaaagcatggatcgagaagactctcgaagaaggccgcacacgtggttacgtagagaccttatttggacgtcgccgctatgttcccgatttaaacgctcgcgtgaaatctgtccgtgaagccgccgaacgcatggcgttcaacatgcctgtacagggcacggcagctgacctcatgaaacttgcaatggtgcgcctttttccacaattgcgtgaagttggtgcccgcatgctcttgcaggtccacgatgaactcttgttagaagcgccaaaagagcgtgcggaagaggtggcagccctcgcgaaagaggttatggaaggcgtgtggcccttagcggtgcctcttgaagtcgaagttggtattggcgaggattggttggctgccaaaggataatga

SEQ ID NO: 1222 - protein, 841 aa, synthetic construct
  REGION 1..841: note = Variant of DNA polymerase I from Thermus sp. strain 2.9
MHHHHHHGGSGMLPLFEPKGRVLLVDGHHLAYRNFFALKGLTTSRGEPVQGVYGFAKSLLKALKEDGDVVIVVFDAKAPSFRHEAYEAYKAGRAPTPEDFPRQLALMKELVDLLGLERLEVPGFEADDVLATLAKKAEREGYEVQILTADRDLFQLLSPRISVLHPEGHRITPEWLWEKYGLRPEQWVDFRALAGDPSDNIPGVKGIGEKTALKLLKEWGSLENLLKNLDQVKPESVREKILAHLEDLKLSRELSRVRTDLPLEVDFRGRREPDWEGLKAFLERLEFGSLLHEFGLLESPLPAEEAPWPPPEGAFLGYRLSRPEPMWAELLALAASAQGRVYRAEDPHGALRGLKEVRGLLAKDLAVVALREGLDLPPTDDPMLLAYLLDPSNTTPEGVARRYGGEWTEDAGERALLAERLHANLLGRLQGEERLLWLYEEVEKPLSRVLAHMEATGVKLDVAYLEALSLEVAAEMRRLEEEVFRLAGHSFNLNSRDQLERVLFDELGLPPIGKTERTGKRSTSAAVLEALREVHPIVDKILQYRELAKLKGTYIDPLPALVHPKTGRLHTRFNQTATATGRLSSSDPNLQNIPVRTPLGQKIRRAFVAEEGWRLVALDYSQIELRVLAHLSGDENLIRVFQEGKDIHTQTASWMFGLSAEAIDPLMRRAAKTINFGVLYGMSAHRLSQELGIPYEEAAAFIQRYFQSYPKVKAWIEKTLEEGRTRGYVETLFGRRRYVPDLNARVKSVREAAERMAFNMPVQGTAADLMKLAMVRLFPQLREVGARMLLQVHDELLLEAPKERAEEVAALAKEVMEGVWPLAVPLEVEVGIGEDWLAAKG

SEQ ID NO: 1223 - DNA, 2529 bp, synthetic construct
  misc_feature 1..2529: note = Variant of DNA polymerase I from Thermus sp. strain 2.9
  source 1..2529: mol_type = other DNA
atgcaccatcatcatcatcatggcggtagcggcatgttaccgttgttcgaacctaaaggtcgcgtgcttctggttgatggccatcatctcgcgtatcgtaacttctttgccctgaaaggattaaccaccagccgtggcgagccggtacagggtgtctacggctttgcaaagtcgctcctgaaagctctgaaagaagacggtgatgtggtgattgttgtctttgatgcgaaagcgccaagttttcgccacgaagcgtacgaagcttacaaagccgggcgtgctccaacgccggaagactttcctcgccaattggcgcttatgaaggaattagtggatttgcttggcctcgaacgcttggaagttcccggtttcgaggcagacgacgtattagcgactctcgcaaagaaagccgaacgtgagggctatgaagtccagatcttgacagcagatcgcgatcttttccagcttttatctccgcgcatctcggtgttacacccggaagggcatcgtatcaccccggaatggctctgggagaaatatggtttgcgtcccgaacaatgggtggattttcgcgccttagcaggcgatccgagcgacaatattccgggagttaaaggtatcggcgagaagacggcgctcaagctccttaaagaatgggggtcgttggagaacttgcttaagaatttagatcaggtcaaaccagagtcagtgcgtgagaagattcttgcacacctcgaagacctcaaattaagcctggaattgtcccgtgtacgcaccgatttgccgctcgaagttgatttccgtcgtcgccgcgaacctgactgggagggtcttaaagcgtttttagagcgtcttgaatttggttcgctcttgcatgaattcggccttttagaaagcccgttaccagccgaagaagcaccttggccaccgcccgaaggcgcgtttttaggttaccgtttgagtcgcccggaaccgatgtgggccgaattactggctcttgcagcgtctgcccaggggcgtgtgtatcgcgcggaagaccctcatggtgcgctccgcggcctcaaagaagtccgtggactccttgccaaagacttagctgttgttgcattgcgcgaaggtcttgatttacctccgactgatgatccaatgcttcttgcgtacctcttggacccgtcaaacacgacgcccgaaggcgtagcccgtcgttacggcggcgagtggaccgaagatgcagctgagcgcgcgttattggccgaacgtttgcacgccaatttattaggacgtttgcaaggcgaggaacgtctcctctggctttacgaagaagtggagaaaccattgagtcgcgtgctcgcgcatatggaagctaccggtgtcaaattagacgtggcgtatttggaggctctcagccttgaagttgctgccgaaatgcgccgcttggaggaagaagtattccgtttagcaggccactcctttaaccttaattctcgcgatcagttagaacgtgtgttgttcgatgaacttggtctccctcctatcggcaagacagagaagaccggtaaacgtagcacttcagcggcggttttagaagctcttcgcgaagtccatcccattgtggacaagatcttgcagtaccgcgaactcgcgaaattgaaaggcacctatattgaccctcttccggcattagtccacccgaaaacgggacgcctccatacccgcttcaaccaaacagccacggcgaccggtcgtttgtcctcctctgatccaaaccttcagaatattccagtacgtaccccattgggccagaagatccgccgcgcgtttgtagctgaggagggttggcgtttagtggccctcgattatagccaaattgaattacgtgtccttgcccatctttctggcgatgagaacctcatccgcgtgtttcaggaaggcaaagacattcacactcaaacggcaagctggatgtttggattatcagctgaagcgatcgatcctttgatgcgtcgtgcagcgaagaccgttaatttcggtgttctctacggtatgagtgcccatcgtttgtcgcaggaattaggcattccctatgaagaagctgcggcgttcattcagcgctactttcaaagctatcccaaagttaaagcatggatcgagaagactctcgaagaaggccgcacacgtggttacgtagagaccttatttggacgtcgccgctatgttcccgatttaaacgctcgcgtgaaatctgtccgtgaagccgccgaacgcatggcgttcaacatgcctgtacagggcacggcagctgacctcatgaaacttgcaatggtgcgcctttttccacaattgcgtgaagttggtgcccgcatgctcttgcaggtccacgatgaactcttgttagaagcgccaaaagagcgtgcggaagaggtggcagccctcgcgaaagaggttatggaaggcgtgtggcccttagcggtgcctcttgaagtcgaagttggtattggcgaggattggttggctgccaaaggataatga

SEQ ID NO: 1224 - protein, 841 aa, synthetic construct
  REGION 1..841: note = Variant of DNA polymerase I from Thermus sp. strain 2.9
MHHHHHHGGSGMLPLFEPKGRVLLVDGHHLAYRNFFALKGLTTSRGEPVQGVYGFAKSLLKALKEDGDVVIVVFDAKAPSFRHEAYEAYKAGRAPTPEDFPRQLALMKELVDLLGLERLEVPGFEADDVLATLAKKAEREGYEVQILTADRDLFQLLSPRISVLHPEGHRITPEWLWEKYGLRPEQWVDFRALAGDPSDNIPGVKGIGEKTALKLLKEWGSLENLLKNLDQVKPESVREKILAHLEDLKLSLELSRVRTDLPLEVDFRRRREPDWEGLKAFLERLEFGSLLHEFGLLESPLPAEEAPWPPPEGAFLGYRLSRPEPMWAELLALAASAQGRVYRAEDPHGALRGLKEVRGLLAKDLAVVALREGLDLPPTDDPMLLAYLLDPSNTTPEGVARRYGGEWTEDAAERALLAERLHANLLGRLQGEERLLWLYEEVEKPLSRVLAHMEATGVKLDVAYLEALSLEVAAEMRRLEEEVFRLAGHSFNLNSRDQLERVLFDELGLPPIGKTEKTGKRSTSAAVLEALREVHPIVDKILQYRELAKLKGTYIDPLPALVHPKTGRLHTRFNQTATATGRLSSSDPNLQNIPVRTPLGQKIRRAFVAEEGWRLVALDYSQIELRVLAHLSGDENLIRVFQEGKDIHTQTASWMFGLSAEAIDPLMRRAAKTVNFGVLYGMSAHRLSQELGIPYEEAAAFIQRYFQSYPKVKAWIEKTLEEGRTRGYVETLFGRRRYVPDLNARVKSVREAAERMAFNMPVQGTAADLMKLAMVRLFPQLREVGARMLLQVHDELLLEAPKERAEEVAALAKEVMEGVWPLAVPLEVEVGIGEDWLAAKG

SEQ ID NO: 1225 - DNA, 2529 bp, synthetic construct
  misc_feature 1..2529: note = Variant of DNA polymerase I from Thermus sp. strain 2.9
  source 1..2529: mol_type = other DNA
atgcaccatcatcatcatcatggcggtagcggcatgttaccgttgttcgaacctaaaggtcgcgtgcttctggttgatggccatcatctcgcgtatcgtaacttctttgccctgaaaggattaaccaccagccgtggcgagccggtacagggtgtctacggctttgcaaagtcgctcctgaaagctctgaaagaagacggtgatgtggtgattgttgtctttgatgcgaaagcgccaagttttcgccacgaagcgtacgaagcttacaaagccgggcgtgctccaacgccggaagactttcctcgccaattggcgcttatgaaggaattagtggatttgcttggcctcgaacgcttggaagttcccggtttcgaggcagacgacgtattagcgactctcgcaaagaaagccgaacgtgagggctatgaagtccagatcttgacagcagatcgcgatcttttccagcttttatctccgcgcatctcggtgttacacccggaagggcatcgtatcaccccggaatggctctgggagaaatatggtttgcgtcccgaacaatgggtggattttcgcgccttagcaggcgatccgagcgacaatattccgggagttaaaggtatcggcgagaagacggcgctcaagctccttaaagaatgggggtcgttggagaacttgcttaagaatttagatcaggtcaaaccagagtcagtgcgtgagaagattcttgcacacctcgaagacctcaaattaagccgcgaattgtcccgtgtacgcaccgatttgccgctcgaagttgatttccgtggtcgccgcgaacctgactgggagggtcttaaagcgtttttagagcgtcttgaatttggttcgctcttgcatgaattcggccttttagaaagcccgttaccagccgaagaagcaccttggccaccgcccgaaggcgcgtttttaggttaccgtttgagtcgcccggaaccgatgtgggccgaattattggctcttgcagcgtctgcccagggacgtgtgtatcgcgcggaagaccctcatggtgcgctccgcggcctcaaagaagtccgtggactccttgccaaagacttagctgttgttgcattgcgcgaaggtcttgatttacctccgactgatgatccaatgcttcttgcgtacctcttggacccgtcaaacacgacgcccgaaggcgtagcccgtcgttacggcggcgagtggaccgaagatgcaggcgagcgcgcgttattggccgaacgtttgcacgccaatttattaggacgtttgcaaggcgaggaacgtctcctctggctttacgaagaagtggagaaaccattgagtcgcgtgctcgcgcatatggaagctaccggtgtcaaattagacgtggcgtatttggaggctctcagccttgaagttgctgccgaaatgcgccgcttggaggaagaagtattccgtttagcaggccactcctttaaccttaattctcgcgatcagttagaacgtgtgttgttcgataaccttggtctccctcctatcggcaagacagagaagaccggtaaacgtagcacttcagcggcggttttagaagctcttcgcgaagtccatcccattgtggacaagatcttgcagtaccgcgaactcgcgaaattgaaaggcacctatattgaccctcttccggcattagtccacccgaaaacgggacgcctccatacccgcttcaaccaaacagccacggcgaccggtcgtttgtcctcctctgatccaaaccttcagaatattccagtacgtaccccattgggccagaagatccgccgcgcgtttgtagctgaggagggttggcgtttagtggccctcgattatagccaaattgaattacgtgtccttgcccatctttctggcgatgagaacctcatccgcgtgtttcaggaaggcaaagacattcacactcaaacggcaagctggatgtttggattatcagcagaagcgatcgatcctttgatgcgtcgtgcagcgaagaccgttaatttcggtgttctctacggtatgagtgcccatcgtttgtcgcaggaattaggcattccctatgaagaagctgccgcgttcattcagaagtactttcaaagctatcccaaagttaaagcatggatcgagaagactctcgaagaaggccgcacacgtggttacgtagagaccttatttggacgtcgccgctatgttcccgatttaaacgctcgcgtgaaatctgtccgtgaagccgccgaacgcatggcgttcaacatgcctgtacagggcacggcagctgacctcatgaaacttgcaatggtgcgcctttttccacaattgcgtgaagttggtgcccgcatgctcttgcaggtccacgatgaactcttgttagaagcgccaaaagagcgtgcggaagaggtggcagccctcgcgaaagaggttatggaaggcgtgtggcccttagcggtgcctcttgaagtcgaagttggtattggcgaggattggttggctgccaaaggataatga

SEQ ID NO: 1226 - protein, 841 aa, synthetic construct
  REGION 1..841: note = Variant of DNA polymerase I from Thermus sp. strain 2.9
MHHHHHHGGSGMLPLFEPKGRVLLVDGHHLAYRNFFALKGLTTSRGEPVQGVYGFAKSLLKALKEDGDVVIVVFDAKAPSFRHEAYEAYKAGRAPTPEDFPRQLALMKELVDLLGLERLEVPGFEADDVLATLAKKAEREGYEVQILTADRDLFQLLSPRISVLHPEGHRITPEWLWEKYGLRPEQWVDFRALAGDPSDNIPGVKGIGEKTALKLLKEWGSLENLLKNLDQVKPESVREKILAHLEDLKLSRELSRVRTDLPLEVDFRGRREPDWEGLKAFLERLEFGSLLHEFGLLESPLPAEEAPWPPPEGAFLGYRLSRPEPMWAELLALAASAQGRVYRAEDPHGALRGLKEVRGLLAKDLAVVALREGLDLPPTDDPMLLAYLLDPSNTTPEGVARRYGGEWTEDAGERALLAERLHANLLGRLQGEERLLWLYEEVEKPLSRVLAHMEATGVKLDVAYLEALSLEVAAEMRRLEEEVFRLAGHSFNLNSRDQLERVLFDNLGLPPIGKTEKTGKRSTSAAVLEALREVHPIVDKILQYRELAKLKGTYIDPLPALVHPKTGRLHTRFNQTATATGRLSSSDPNLQNIPVRTPLGQKIRRAFVAEEGWRLVALDYSQIELRVLAHLSGDENLIRVFQEGKDIHTQTASWMFGLSAEAIDPLMRRAAKTVNFGVLYGMSAHRLSQELGIPYEEAAAFIQKYFQSYPKVKAWIEKTLEEGRTRGYVETLFGRRRYVPDLNARVKSVREAAERMAFNMPVQGTAADLMKLAMVRLFPQLREVGARMLLQVHDELLLEAPKERAEEVAALAKEVMEGVWPLAVPLEVEVGIGEDWLAAKG

SEQ ID NO: 1227 - DNA, 2529 bp, synthetic construct
  misc_feature 1..2529: note = Variant of DNA polymerase I from Thermus sp. strain 2.9
  source 1..2529: mol_type = other DNA
atgcaccatcatcatcatcatggcggtagcggcatgttaccgttgttcgaacctaaaggtcgcgtgcttctggttgatggccatcatctcgcgtatcgtaacttctttgccctgaaaggattaaccaccagccgtggcgagccggtacagggtgtctacggctttgcaaagtcgctcctgaaagctctgaaagaagacggtgatgtggtgattgttgtctttgatgcgaaagcgccaagttttcgccacgaagcgtacgaagcttacaaagccgggcgtgctccaacgccggaagactttcctcgccaattggcgcttatgaaggaattagtggatttgcttggcctcgaacgcttggaagttcccggtttcgaggcagacgacgtattagcgactctcgcaaagaaagccgaacgtgagggctatgaagtccagatcttgacagcagatcgcgatcttttccagcttttatctccgcgcatctcggtgttacacccggaagggcatcgtatcaccccggaatggctctgggagaaatatggtttgcgtcccgaacaatgggtggattttcgcgccttagcaggcgatccgagcgacaatattccgggagttaaaggtatcggcgagaagacggcgctcaagctccttaaagaatgggggtcgttggagaacttgcttaagaatttagatcaggtcaaaccagagtcagtgcgtgagaagattcttgcacacctcgaagacctcaaattaagcctggaattgtcccgtgtacgcaccgatttgccgctcgaagttgatttccgtcgtcgccgcgaacctgactgggagggtcttaaagcgtttttagagcgtcttgaatttggttcgctcttgcatgaattcggccttttagaaagcccgttaccagccgaagaagcaccttggccaccgcccgaaggcgcgtttttaggttaccgtttgagtcgcccggaaccgatgtgggccgaattattggctcttgcagcgtctgcccaggggcgtgtgtatcgcgcggaagaccctcatggtgcgctccgtggcctcaaagaagtccgtggactccttgccaaagacttagctgttgttgcattgcgcgaaggtcttgatttacctccgactgatgatccaatgcttcttgcgtacctcttggacccgtcaaacacgacgcccgaaggcgtagcccgtcgttacggcggcgagtggaccgaagatgcaggtgagcgcgcgttattggccgaacgtttgcacgccaatttattaggacgtttgcaaggcgaggaacgtctcctctggctttacgaagaagtggagaaaccattgagtcgcgtgctcgcgcatatggaagctaccggtgtcaaattagacgtggcgtatttggaggcactcagccttgaagttgctgccgaaatgcgccgcttggaggaagaagtattccgtttagcaggccactcctttaaccttaattctcgcgatcagttagaacgtgtgttgttcgatgaacttggtctccctcctatcggcaagacagagaagaccggtaaacgtagcacttcagcggcggttttagaagctcttcgcgaagtccatcccattgtggacaagatcttgcagtaccgcgaactcgcgaaattgaaaggcacctatattgaccctcttccggcattagtccacccgaaaacgggacgcctccatacccgcttcaaccaaacagccacggcgaccggtcgtttgtcctcctctgatccaaaccttcagaatattccagtacgtaccccattgggccagaagatccgccgcgcgtttgtagctgaggagggttggcgtttagtggccctcgattatagccaaattgaattacgtgtccttgcccatctttctggcgatgagaacctcatccgcgtgtttcaggaaggcaaagacattcacactcaaacggcaagctggatgtttggattatcagctgaagcgatcgatcctttgatgcgtcgtgcagcgaagaccatcaatttcggtgttctctacggtatgagtgcccatcgtttgtcgcaggaattaggcattccctatgaagaagctgcggcgttcattcagcgctactttcaaagctatcccaaagttaaagcatggatcgagaagactctcgaagaaggccgcacacgtggttacgtagagaccttatttggacgtcgccgctatgttcccgatttaaacgctcgcgtgaaatctgtccgtgaagccgccgaacgcatggcgttcaacatgcctgtacagggcacggcagctgacctcatgaaacttgcaatggtgcgcctttttccacaattgcgtgaagttggtgcccgcatgctcttgcaggtccacgatgaactcttgttagaagcgccaaaagagcgtgcggaagaggtggcagccctcgcgaaagaggttatggaaggcgtgtggcccttagcggtgcctcttgaagtcgaagttggtattggcgaggattggttggctgccaaaggataatga

SEQ ID NO: 1228 - protein, 841 aa, synthetic construct
  REGION 1..841: note = Variant of DNA polymerase I from Thermus sp. strain 2.9
MHHHHHHGGSGMLPLFEPKGRVLLVDGHHLAYRNFFALKGLTTSRGEPVQGVYGFAKSLLKALKEDGDVVIVVFDAKAPSFRHEAYEAYKAGRAPTPEDFPRQLALMKELVDLLGLERLEVPGFEADDVLATLAKKAEREGYEVQILTADRDLFQLLSPRISVLHPEGHRITPEWLWEKYGLRPEQWVDFRALAGDPSDNIPGVKGIGEKTALKLLKEWGSLENLLKNLDQVKPESVREKILAHLEDLKLSLELSRVRTDLPLEVDFRRRREPDWEGLKAFLERLEFGSLLHEFGLLESPLPAEEAPWPPPEGAFLGYRLSRPEPMWAELLALAASAQGRVYRAEDPHGALRGLKEVRGLLAKDLAVVALREGLDLPPTDDPMLLAYLLDPSNTTPEGVARRYGGEWTEDAGERALLAERLHANLLGRLQGEERLLWLYEEVEKPLSRVLAHMEATGVKLDVAYLEALSLEVAAEMRRLEEEVFRLAGHSFNLNSRDQLERVLFDELGLPPIGKTEKTGKRSTSAAVLEALREVHPIVDKILQYRELAKLKGTYIDPLPALVHPKTGRLHTRFNQTATATGRLSSSDPNLQNIPVRTPLGQKIRRAFVAEEGWRLVALDYSQIELRVLAHLSGDENLIRVFQEGKDIHTQTASWMFGLSAEAIDPLMRRAAKTINFGVLYGMSAHRLSQELGIPYEEAAAFIQRYFQSYPKVKAWIEKTLEEGRTRGYVETLFGRRRYVPDLNARVKSVREAAERMAFNMPVQGTAADLMKLAMVRLFPQLREVGARMLLQVHDELLLEAPKERAEEVAALAKEVMEGVWPLAVPLEVEVGIGEDWLAAKG

SEQ ID NO: 1229 - DNA, 2529 bp, synthetic construct
  misc_feature 1..2529: note = Variant of DNA polymerase I from Thermus sp. strain 2.9
  source 1..2529: mol_type = other DNA
atgcaccatcatcatcatcatggcggtagcggcatgttaccgttgttctcgcctaaaggtcgcgtgcttctggttgatggccatcatctcgcgtatcgtaacttctttgccctgaaaggattaaccaccagccgtggcgagccggtacagggtgtctacggctttgcaaagtcgctcctgaaagctctgaaagaagacggtgatgtggtgattgttgtctttgatgcgaaagcgccaagttttcgccacgaagcgtacgaagcttacaaagccgggcgtgctccaacgccggaagactttcctcgccaattggcgcttatgaaggaattagtggatttgcttggcctcgaacgcttggaagttcccggtttcgaggcagacgacgtattagcgactctcgcaaagaaagccgaacgtgagggctatgaagtccagatcttgacagcagatcgcgatcttttccagcttttatctccgcgcatctcggtgttacacccggaagggcatcgtatcaccccggaatggctctgggagaaatatggtttgcgtcccgaacaatgggtggattttcgcgccttagcaggcgatccgagcgacaatattccgggagttaaaggtatcggcgagaagacggcgctcaagctccttaaagaatgggggtcgttggagaacttgcttaagaatttagatcaggtcaaaccagagtcagtgcgtgagaagattcttgcacacctcgaagacctcaaattaagccgcgaattgtcccgtgtacgcaccgatttgccgctcgaagttgatttccgtggccgccgcgaacctgactgggagggtcttaaagcgtttttagagcgtcttgaatttggttcgctcttgcatgaattcggccttttagaaagcccgttaccagccgaagaagcaccttggccaccgcccgaaggcgcgtttttaggttaccgtttgagtcgcccggaaccgatgtgggccgaattattggctcttgcagcgtctgcccagggacgtgtgtatcgcgcggaagaccctcatggtgcgctccgcggcctcaaagaagtccgtggactccttgccaaagacttagctgttgttgcattgcgcgaaggtcttgatttacctccgactgatgatccaatgcttcttgcgtacctcttggacccgtcaaacacgacgcccgaaggcgtagcccgtcgttacggcggcgagtggaccgaagatgcaggcgagcgcgcgttattggccgaacgtttgcacgccaatttattaggacgtttgcaaggcgaggaacgtctcctctggctttacgaagaagtggagaaaccattgagtcgcgtgctcgcgcatatggaagctaccggtgtcaaattagacgtggcgtatttggaggcactcagccttgaagttgctgccgaaatgcgccgcttggaggaagaagtattccgtttagcaggccactcctttaaccttaattctcgcgatcagttagaacgtgtgttgttcgatgaacttggtctccctcctatcggcaagacagagaagaccggtaaacgtagcacttcagcggcggttttagaagctcttcgcgaagtccatcccattgtggacaagatcttgcagtaccgcgaactcgcgaaattgaaaggcacctatattgaccctcttccggcattagtccacccgaaaacgggacgcctccatacccgcttcaaccaaacagccacggcgaccggtcgtttgtcctcctctgatccaaaccttcagaatattccagtacgtaccccattgggccagaagatccgccgcgcgtttgtagctgaggagggttggcgtttagtggccctcgattatagccaaattgaattacgtgtccttgcccatctttctggcgatgagaacctcatccgcgtgtttcaggaaggcaaagacattcacactcaaacggcaagctggatgtttggattatcagctgaagcgatcgatcctttgatgcgtcgtgcagcgaagaccatcaatttcggtgttctctacggtatgagtgcccatcgtttgtcgcaggaattaggcattccctatgaagaagctgcggcgttcattcagcgctactttcaaagctatcccaaagttaaagcatggatcgagaagactctcgaagaaggccgcacacgtggttacgtagagaccttatttggacgtcgccgctatgttcccgatttaaacgctcgcgtgaaatctgtccgtgaagccgccgaacgcatggcgttcaacatgcctgtacagggcacggcagctgacctcatgaaacttgcaatggtgcgcctttttccacaattgcgtgaagttggtgcccgcatgctcttgcaggtccacgatgaactcttgttagaagcgccaaaagagcgtgcggaagaggtggcagccctcgcgaaagaggttatggaaggcgtgtggcccttagcggtgcctcttgaagtcgaagttggtattggcgaggattggttggctgccaaaggataatga

SEQ ID NO: 1230 - protein, 841 aa, synthetic construct
  REGION 1..841: note = Variant of DNA polymerase I from Thermus sp. strain 2.9
MHHHHHHGGSGMLPLFSPKGRVLLVDGHHLAYRNFFALKGLTTSRGEPVQGVYGFAKSLLKALKEDGDVVIVVFDAKAPSFRHEAYEAYKAGRAPTPEDFPRQLALMKELVDLLGLERLEVPGFEADDVLATLAKKAEREGYEVQILTADRDLFQLLSPRISVLHPEGHRITPEWLWEKYGLRPEQWVDFRALAGDPSDNIPGVKGIGEKTALKLLKEWGSLENLLKNLDQVKPESVREKILAHLEDLKLSRELSRVRTDLPLEVDFRGRREPDWEGLKAFLERLEFGSLLHEFGLLESPLPAEEAPWPPPEGAFLGYRLSRPEPMWAELLALAASAQGRVYRAEDPHGALRGLKEVRGLLAKDLAVVALREGLDLPPTDDPMLLAYLLDPSNTTPEGVARRYGGEWTEDAGERALLAERLHANLLGRLQGEERLLWLYEEVEKPLSRVLAHMEATGVKLDVAYLEALSLEVAAEMRRLEEEVFRLAGHSFNLNSRDQLERVLFDELGLPPIGKTEKTGKRSTSAAVLEALREVHPIVDKILQYRELAKLKGTYIDPLPALVHPKTGRLHTRFNQTATATGRLSSSDPNLQNIPVRTPLGQKIRRAFVAEEGWRLVALDYSQIELRVLAHLSGDENLIRVFQEGKDIHTQTASWMFGLSAEAIDPLMRRAAKTINFGVLYGMSAHRLSQELGIPYEEAAAFIQRYFQSYPKVKAWIEKTLEEGRTRGYVETLFGRRRYVPDLNARVKSVREAAERMAFNMPVQGTAADLMKLAMVRLFPQLREVGARMLLQVHDELLLEAPKERAEEVAALAKEVMEGVWPLAVPLEVEVGIGEDWLAAKG

SEQ ID NO: 1231 - DNA, 2529 bp, synthetic construct
  misc_feature 1..2529: note = Variant of DNA polymerase I from Thermus sp. strain 2.9
  source 1..2529: mol_type = other DNA
atgcaccatcatcatcatcatggcggtagcggcatgttaccgttgttcgaacctaaaggtcgcgtgcttctggttgatggccatcatctcgcgtatcgtaacttctttgccctgaaaggattaaccaccagccgtggcgagccggtacagggtgtctacggctttgcaaagtcgctcctgaaagctctgaaagaagacggtgatgtggtgattgttgtctttgatgcgaaagcgccaagttttcgccacgaagcgtacgaagcttacaaagccgggcgtgctccaacgccggaagactttcctcgccaattggcgcttatgaaggaattagtggatttgcttggcctcgaacgcttggaagttcccggtttcgaggcagacgacgtattagcgactctcgcaaagaaagccgaacgtgagggctatgaagtccagatcttgacagcagatcgcgatcttttccagcttttatctccgcgcatctcggtgttacacccggaagggcatcgtatcaccccggaatggctctgggagaaatatggtttgcgtcccgaacaatgggtggattttcgcgccttagcaggcgatccgagcgacaatattccgggagttaaaggtatcggcgagaagacggcgctcaagctccttaaagaatgggggtcgttggagaacttgcttaagaatttagatcaggtcaaaccagagtcagtgcgtgagaagattcttgcacacctcgaagacctcaaattaagccgcgaattgtcccgtgtacgcaccgatttgccgctcgaagttgatttccgtcgtcgccgcgaacctgactgggagggtcttaaagcgtttttagagcgtcttgaatttggttcgctcttgcatgaattcggccttttagaaagcccgttaccagccgaagaagcaccttggccaccgcccgaaggcgcgtttttaggttaccgtttgagtcgcccggaaccgatgtgggccgaattatcggctcttgcagcgtctgcccaggggcgtgtgtatcgcgcggaagaccctcatggtgcgctcaagggcctcaaagaagtccgtggactccttgccaaagacttagctgttgttgcattgcgcgaaggtcttgatttacctccgactgatgatccaatgcttcttgcgtacctcttggacccgtcaaacacgacgcccgaaggcgtagcccgtcgttacggcggcgagtggaccgaagatgcagctgagcgcgcgttattggccgaacgtttgcacgccaatttattaggacgtttgcaaggcgaggaacgtctcctctggctttacgaagaagtggagaaaccattgagtcgcgtgctcgcgcatatggaagctaccggtgtcaaattagacgtggcgtatttggagaacctcagccttgaagttgctgccgaaatgcgccgcttggaggaagaagtattccgtttagcaggccactcctttaaccttaattctcgcgatcagttagaacgtgtgttgttcgataaccttggtctccctcctatcggcaagacagagaagaccggtaaacgtagcacttcagcggcggttttagaagctcttcgcgaagtccatcccattgtggacaagatcttgcagtaccgcgaactcgcgaaattgaaaggcacctatattgaccctcttccggcattagtccacccgaaaacgggacgcctccatacccgcttcaaccaaacagccacggcgaccggtcgtttgtcctcctctgatccaaaccttcagaatattccagtacgtaccccattgggccagaagatccgccgcgcgtttgtagctgaggagggttggcgtttagtggccctcgattatagccaaattgaattacgtgtccttgcccatctttctggcgatgagaacctcatccgcgtgtttcaggaaggcaaagacattcacactcaaacggcaagctggatgtttggattatcagcagaagcgatcgatcctttgatgcgtcgtgcagcgaagaccattaatttcggtgttctctacggtatgagtgcccatcgtttgtcgcaggaattaggcattccctatgaagaagctgccgcgttcattcagaagtactttcaaagctatcccaaagttaaagcatggatcgagaagactctcgaagaaggccgcacacgtggttacgtagagaccttatttggacgtcgccgctatgttcccgatttaaacgctcgcgtgaaatctgtccgtgaagccgccgaacgcatggcgttcaacatgcctgtacagggcacggcagctgacctcatgaaacttgcaatggtgcgcctttttccacaattgcgtgaagttggtgcccgcatgctcttgcaggtccacgatgaactcttgttagaagcgccaaaagagcgtgcggaagaggtggcagccctcgcgaaagaggttatggaaggcgtgtggcccttagcggtgcctcttgaagtcgaagttggtattggcgaggattggttggctgccaaaggataatga

SEQ ID NO: 1232 - protein, 841 aa, synthetic construct
  REGION 1..841: note = Variant of DNA polymerase I from Thermus sp. strain 2.9
MHHHHHHGGSGMLPLFEPKGRVLLVDGHHLAYRNFFALKGLTTSRGEPVQGVYGFAKSLLKALKEDGDVVIVVFDAKAPSFRHEAYEAYKAGRAPTPEDFPRQLALMKELVDLLGLERLEVPGFEADDVLATLAKKAEREGYEVQILTADRDLFQLLSPRISVLHPEGHRITPEWLWEKYGLRPEQWVDFRALAGDPSDNIPGVKGIGEKTALKLLKEWGSLENLLKNLDQVKPESVREKILAHLEDLKLSRELSRVRTDLPLEVDFRRRREPDWEGLKAFLERLEFGSLLHEFGLLESPLPAEEAPWPPPEGAFLGYRLSRPEPMWAELSALAASAQGRVYRAEDPHGALKGLKEVRGLLAKDLAVVALREGLDLPPTDDPMLLAYLLDPSNTTPEGVARRYGGEWTEDAAERALLAERLHANLLGRLQGEERLLWLYEEVEKPLSRVLAHMEATGVKLDVAYLENLSLEVAAEMRRLEEEVFRLAGHSFNLNSRDQLERVLFDNLGLPPIGKTEKTGKRSTSAAVLEALREVHPIVDKILQYRELAKLKGTYIDPLPALVHPKTGRLHTRFNQTATATGRLSSSDPNLQNIPVRTPLGQKIRRAFVAEEGWRLVALDYSQIELRVLAHLSGDENLIRVFQEGKDIHTQTASWMFGLSAEAIDPLMRRAAKTINFGVLYGMSAHRLSQELGIPYEEAAAFIQKYFQSYPKVKAWIEKTLEEGRTRGYVETLFGRRRYVPDLNARVKSVREAAERMAFNMPVQGTAADLMKLAMVRLFPQLREVGARMLLQVHDELLLEAPKERAEEVAALAKEVMEGVWPLAVPLEVEVGIGEDWLAAKG

SEQ ID NO: 1233 - DNA, 2529 bp, synthetic construct
  misc_feature 1..2529: note = Variant of DNA polymerase I from Thermus sp. strain 2.9
  source 1..2529: mol_type = other DNA
atgcaccatcatcatcatcatggcggtagcggcatgttaccgttgttcgaacctaaaggtcgcgtgcttctggttgatggccatcatctcgcgtatcgtaacttctttgccctgaaaggattaaccaccagccgtggcgagccggtacagggtgtctacggctttgcaaagtcgctcctgaaagctctgaaagaagacggtgatgtggtgattgttgtctttgatgcgaaagcgccaagttttcgccacgaagcgtacgaagcttacaaagccgggcgtgctccaacgccggaagactttcctcgccaattggcgcttatgaaggaattagtggatttgcttggcctcgaacgcttggaagttcccggtttcgaggcagacgacgtattagcgactctcgcaaagaaagccgaacgtgagggctatgaagtccagatcttgacagcagatcgcgatcttttccagcttttatctccgcgcatctcggtgttacacccggaagggcatcgtatcaccccggaatggctctgggagaaatatggtttgcgtcccgaacaatgggtggattttcgcgccttagcaggcgatccgagcgacaatattccgggagttaaaggtatcggcgagaagacggcgctcaagctccttaaagaatgggggtcgttggagaacttgcttaagaatttagatcaggtcaaaccagagtcagtgcgtgagaagattcttgcacacctcgaagacctcaaattaagccgcgaattgtcccgtgtacgcaccgatttgccgctcgaagttgatttccgtggtcgccgcgaacctgactgggagggtcttaaagcgtttttagagcgtcttgaatttggttcgctcttgcatgaattcggccttttagaaagcccgttaccagccgaagaagcaccttggccaccgcccgaaggcgcgtttttaggttaccgtttgagtcgcccggaaccgatgtgggccgaattactggctcttgcagcgtctgcccaggagcgtgtgtatcgcgcggaagaccctcatggtgcgctccgtggcctcaaagaagtccgtggactccttgccaaagacttagctgttgttgcattgcgcgaaggtcttgatttacctccgactgatgatccaatgcttcttgcgtacctcttggacccgtcaaacacgacgcccgaaggcgtagcccgtcgttacggcggcgagtggaccgaagatgcaggcgagcgcgcgttattggccgaacgtttgcacgccaatttattaggacgtttgcaaggcgaggaacgtctcctctggctttacgaagaagtggagaaaccattgagtcgcgtgctcgcgcatatggaagctaccggtgtcaaattagacgtggcgtatttggaggctctcagccttgaagttgctgccgaaatgcgccgcttggaggaagaagtattccgtttagcaggccactcctttaaccttaattctcgcgatcagttagaacgtgtgttgttcgataaccttggtctccctcctatcggcaagacagagaagaccggtaaacgtagcacttcagcggcggttttagaagctcttcgcgaagtccatcccattgtggacaagatcttgcagtaccgcgaactcgcgaaattgaaaggcacctatattgaccctcttccggcattagtccacccgaaaacgggacgcctccatacccgcttcaaccaaacagccacggcgaccggtcgtttgtcctcctctgatccaaaccttcagaatattccagtacgtaccccattgggccagaagatccgccgcgcgtttgtagctgaggagggttggcgtttagtggccctcgattatagccaaattgaattacgtgtccttgcccatctttctggcgatgagaacctcatccgcgtgtttcaggaaggcaaagacattcacactcaaacggcaagctggatgtttggattatcagcagaagcgatcgatcctttgatgcgtcgtgcagcgaagaccatcaatttcggtgttctctacggtatgagtgcccatcgtttgtcgcaggaattaggcattccctatgaagaagctgcggcgttcattcagcgctactttcaaagctatcccaaagttaaagcatggatcgagaagactctcgaagaaggccgcacacgtggttacgtagagaccttatttggacgtcgccgctatgttcccgatttaaacgctcgcgtgaaatctgtccgtgaagccgccgaacgcatggcgttcaacatgcctgtacagggcacggcagctgacctcatgaaacttgcaatggtgcgcctttttccacaattgcgtgaagttggtgcccgcatgctcttgcaggtccacgatgaactcttgttagaagcgccaaaagagcgtgcggaagaggtggcagccctcgcgaaagaggttatggaaggcgtgtggcccttagcggtgcctcttgaagtcgaagttggtattggcgaggattggttggctgccaaaggataatga

SEQ ID NO: 1234 - protein, 841 aa, synthetic construct
  REGION 1..841: note = Variant of DNA polymerase I from Thermus sp. strain 2.9
MHHHHHHGGSGMLPLFEPKGRVLLVDGHHLAYRNFFALKGLTTSRGEPVQGVYGFAKSLLKALKEDGDVVIVVFDAKAPSFRHEAYEAYKAGRAPTPEDFPRQLALMKELVDLLGLERLEVPGFEADDVLATLAKKAEREGYEVQILTADRDLFQLLSPRISVLHPEGHRITPEWLWEKYGLRPEQWVDFRALAGDPSDNIPGVKGIGEKTALKLLKEWGSLENLLKNLDQVKPESVREKILAHLEDLKLSRELSRVRTDLPLEVDFRGRREPDWEGLKAFLERLEFGSLLHEFGLLESPLPAEEAPWPPPEGAFLGYRLSRPEPMWAELLALAASAQERVYRAEDPHGALRGLKEVRGLLAKDLAVVALREGLDLPPTDDPMLLAYLLDPSNTTPEGVARRYGGEWTEDAGERALLAERLHANLLGRLQGEERLLWLYEEVEKPLSRVLAHMEATGVKLDVAYLEALSLEVAAEMRRLEEEVFRLAGHSFNLNSRDQLERVLFDNLGLPPIGKTEKTGKRSTSAAVLEALREVHPIVDKILQYRELAKLKGTYIDPLPALVHPKTGRLHTRFNQTATATGRLSSSDPNLQNIPVRTPLGQKIRRAFVAEEGWRLVALDYSQIELRVLAHLSGDENLIRVFQEGKDIHTQTASWMFGLSAEAIDPLMRRAAKTINFGVLYGMSAHRLSQELGIPYEEAAAFIQRYFQSYPKVKAWIEKTLEEGRTRGYVETLFGRRRYVPDLNARVKSVREAAERMAFNMPVQGTAADLMKLAMVRLFPQLREVGARMLLQVHDELLLEAPKERAEEVAALAKEVMEGVWPLAVPLEVEVGIGEDWLAAKG

SEQ ID NO: 1235 - DNA, 2529 bp, synthetic construct
  misc_feature 1..2529: note = Variant of DNA polymerase I from Thermus sp. strain 2.9
  source 1..2529: mol_type = other DNA
atgcaccatcatcatcatcatggcggtagcggcatgttaccgttgttcgaacctaaaggtcgcgtgcttctggttgatggccatcatctcgcgtatcgtaacttctttgccctgaaaggattaaccaccagccgtggcgagccggtacagggtgtctacggctttgcaaagtcgctcctgaaagctctgaaagaagacggtgatgtggtgattgttgtctttgatgcgaaagcgccaagttttcgccacgaagcgtacgaagcttacaaagccgggcgtgctccaacgccggaagactttcctcgccaattggcgcttatgaaggaattagtggatttgcttggcctcgaacgcttggaagttcccggtttcgaggcagacgacgtattagcgactctcgcaaagaaagccgaacgtgagggctatgaagtccagatcttgacagcagatcgcgatcttttccagcttttatctccgcgcatctcggtgttacacccggaagggcatcgtatcaccccggaatggctctgggagaaatatggtttgcgtcccgaacaatgggtggattttcgcgccttagcaggcgatccgagcgacaatattccgggagttaaaggtatcggcgagaagacggcgctcaagctccttaaagaatgggggtcgttggagaacttgcttaagaatttagatcaggtcaaaccagagtcagtgcgtgagaagattcttgcacacctcgaagacctcaaattaagccgcgaattgtcccgtgtacgcaccgatttgccgctcgaagttgatttccgtggtcgccgcgaacctgactgggagggtcttaaagcgtttttagagcgtcttgaatttggttcgctcttgcatgaattcggccttttagaaagcccgttaccagccgaagaagcaccttggccaccgcccgaaggcgcgtttttaggttaccgtttgagtcgcccggaaccgatgtgggccgaattactggctcttgcagcgtctgcccaggagcgtgtgtatcgcgcggaagaccctcatggtgcgctcaagggcctcaaagaagtccgtggactccttgccaaagacttagctgttgttgcattgcgcgaaggtcttgatttacctccgactgatgatccaatgcttcttgcgtacctcttggacccgtcaaacacgacgcccgaaggcgtagcccgtcgttacggcggcgagtggaccgaagatgcagctgagcgcgcgttattggccgaacgtttgcacgccaatttattaggacgtttgcaaggcgaggaacgtctcctctggctttacgaagaagtggagaaaccattgagtcgcgtgctcgcgcatatggaagctaccggtgtcaaattagacgtggcgtatttggaggctctcagccttgaagttgctgccgaaatgcgccgcttggaggaagaagtattccgtttagcaggccactcctttaaccttaattctcgcgatcagttagaacgtgtgttgttcgatgagcttggtctccctcctatcggcaagacagagaagaccggtaaacgtagcacttcagcggcggttttagaagctcttcgcgaagtccatcccattgtggacaagatcttgcagtaccgcgaactcgcgaaattgaaaggcacctatattgaccctcttccggcattagtccacccgaaaacgggacgcctccatacccgcttcaaccaaacagccacggcgaccggtcgtttgtcctcctctgatccaaaccttcagaatattccagtacgtaccccattgggccagaagatccgccgcgcgtttgtagctgaggagggttggcgtttagtggccctcgattatagccaaattgaattacgtgtccttgcccatctttctggcgatgagaacctcatccgcgtgtttcaggaaggcaaagacattcacactcaaacggcaagctggatgtttggattatcaccagaagcgatcgatcctttgatgcgtcgtgcagcgaagaccgttaatttcggtgttctctacggtatgagtgcccatcgtttgtcgcaggaattaggcattccctatgaagaagctgccgcgttcattcagcgctactttcaaagctatcccaaagttaaagcatggatcgagaagactctcgaagaaggccgcacacgtggttacgtagagaccttatttggacgtcgccgctatgttcccgatttaaacgctcgcgtgaaatctgtccgtgaagccgccgaacgcatggcgttcaacatgcctgtacagggcacggcagctgacctcatgaaacttgcaatggtgcgcctttttccacaattgcgtgaagttggtgcccgcatgctcttgcaggtccacgatgaactcttgttagaagcgccaaaagagcgtgcggaagaggtggcagccctcgcgaaagaggttatggaaggcgtgtggcccttagcggtgcctcttgaagtcgaagttggtattggcgaggattggttggctgccaaaggataatga

SEQ ID NO: 1236 - protein, 841 aa, synthetic construct
  REGION 1..841: note = Variant of DNA polymerase I from Thermus sp. strain 2.9
MHHHHHHGGSGMLPLFEPKGRVLLVDGHHLAYRNFFALKGLTTSRGEPVQGVYGFAKSLLKALKEDGDVVIVVFDAKAPSFRHEAYEAYKAGRAPTPEDFPRQLALMKELVDLLGLERLEVPGFEADDVLATLAKKAEREGYEVQILTADRDLFQLLSPRISVLHPEGHRITPEWLWEKYGLRPEQWVDFRALAGDPSDNIPGVKGIGEKTALKLLKEWGSLENLLKNLDQVKPESVREKILAHLEDLKLSRELSRVRTDLPLEVDFRGRREPDWEGLKAFLERLEFGSLLHEFGLLESPLPAEEAPWPPPEGAFLGYRLSRPEPMWAELLALAASAQERVYRAEDPHGALKGLKEVRGLLAKDLAVVALREGLDLPPTDDPMLLAYLLDPSNTTPEGVARRYGGEWTEDAAERALLAERLHANLLGRLQGEERLLWLYEEVEKPLSRVLAHMEATGVKLDVAYLEALSLEVAAEMRRLEEEVFRLAGHSFNLNSRDQLERVLFDELGLPPIGKTEKTGKRSTSAAVLEALREVHPIVDKILQYRELAKLKGTYIDPLPALVHPKTGRLHTRFNQTATATGRLSSSDPNLQNIPVRTPLGQKIRRAFVAEEGWRLVALDYSQIELRVLAHLSGDENLIRVFQEGKDIHTQTASWMFGLSPEAIDPLMRRAAKTVNFGVLYGMSAHRLSQELGIPYEEAAAFIQRYFQSYPKVKAWIEKTLEEGRTRGYVETLFGRRRYVPDLNARVKSVREAAERMAFNMPVQGTAADLMKLAMVRLFPQLREVGARMLLQVHDELLLEAPKERAEEVAALAKEVMEGVWPLAVPLEVEVGIGEDWLAAKG

SEQ ID NO: 1237 - DNA, 2529 bp, synthetic construct
  misc_feature 1..2529: note = Variant of DNA polymerase I from Thermus sp. strain 2.9
  source 1..2529: mol_type = other DNA
atgcaccatcatcatcatcatggcggtagcggcatgttaccgttgttcgaacctaaaggtcgcgtgcttctggttgatggccatcatctcgcgtatcgtaacttctttgccctgaaaggattaaccaccagccgtggcgagccggtacagggtgtctacggctttgcaaagtcgctcctgaaagctctgaaagaagacggtgatgtggtgattgttgtctttgatgcgaaagcgccaagttttcgccacgaagcgtacgaagcttacaaagccgggcgtgctccaacgccggaagactttcctcgccaattggcgcttatgaaggaattagtggatttgcttggcctcgaacgcttggaagttcccggtttcgaggcagacgacgtattagcgactctcgcaaagaaagccgaacgtgagggctatgaagtccagatcttgacagcagatcgcgatcttttccagcttttatctccgcgcatctcggtgttacacccggaagggcatcgtatcaccccggaatggctctgggagaaatatggtttgcgtcccgaacaatgggtggattttcgcgccttagcaggcgatccgagcgacaatattccgggagttaaaggtatcggcgagaagacggcgctcaagctccttaaagaatgggggtcgttggagaacttgcttaagaatttagatcaggtcaaaccagagtcagtgcgtgagaagattcttgcacacctcgaagacctcaaattaagccgcgaattgtcccgtgtacgcaccgatttgccgctcgaagttgatttccgtggccgccgcgaacctgactgggagggtcttaaagcgtttttagagcgtcttgaatttggttcgctcttgcatgaattcggccttttagaaagcccgacgccagccgaagaagcaccttggccaccgcccgaaggcgcgtttttaggttaccgtttgagtcgcccggaaccgatgtgggccgaattattggctcttgcagcgtctgcccagggacgtgtgtatcgcgcggaagaccctcatggtgcgctccgcggcctcaaagaagtccgtggactccttgccaaagacttagctgttgttgcattgcgcgaaggtcttgatttacctccgactgatgatccaatgcttcttgcgtacctcttggacccgtcaaacacgacgcccgaaggcgtagcccgtcgttacggcggcgagtggaccgaagatgcaggcgagcgcgcgttattggccgaacgtttgcacgccaatttattaggacgtttgcaaggcgaggaacgtctcctctggctttacgaagaagtggagaaaccattgagtcgcgtgctcgcgcatatggaagctaccggtgtcaaattagacgtggcgtatttggaggcactcagccttgaagttgctgccgaaatgcgccgcttggaggaagaagtattccgtttagcaggccactcctttaaccttaattctcgcgatcagttagaacgtgtgttgttcgatgaacttggtctccctcctatcggcaagacagagaagaccggtaaacgtagcacttcagcggcggttttagaagctcttcgcgaagtccatcccattgtggacaagatcttgcagtaccgcgaactcgcgaaattgaaaggcacctatattgaccctcttccggcattagtccacccgaaaacgggacgcctccatacccgcttcaaccaaacagccacggcgaccggtcgtttgtcctcctctgatccaaaccttcagaatattccagtacgtaccccattgggccagaagatccgccgcgcgtttgtagctgaggagggttggcgtttagtggccctcgattatagccaaattgaattacgtgtccttgcccatctttctggcgatgagaacctcatccgcgtgtttcaggaaggcaaagacattcacactcaaacggcaagctggatgtttggattatcagctgaagcgatcgatcctttgatgcgtcgtgcagcgaagaccatcaatttcggtgttctctacggtatgagtgcccatcgtttgtcgcaggaattaggcattccctatgaagaagctgcggcgttcattcagcgctactttcaaagctatcccaaagttaaagcatggatcgagaagactctcgaagaaggccgcacacgtggttacgtagagaccttatttggacgtcgccgctatgttcccgatttaaacgctcgcgtgaaatctgtccgtgaagccgccgaacgcatggcgttcaacatgcctgtacagggcacggcagctgacctcatgaaacttgcaatggtgcgcctttttccacaattgcgtgaagttggtgcccgcatgctcttgcaggtccacgatgaactcttgttagaagcgccaaaagagcgtgcggaagaggtggcagccctcgcgaaagaggttatggaaggcgtgtggcccttagcggtgcctcttgaagtcgaagttggtattggcgaggattggttggctgccaaaggataatga

SEQ ID NO: 1238 - protein, 841 aa, synthetic construct
  REGION 1..841: note = Variant of DNA polymerase I from Thermus sp. strain 2.9
MHHHHHHGGSGMLPLFEPKGRVLLVDGHHLAYRNFFALKGLTTSRGEPVQGVYGFAKSLLKALKEDGDVVIVVFDAKAPSFRHEAYEAYKAGRAPTPEDFPRQLALMKELVDLLGLERLEVPGFEADDVLATLAKKAEREGYEVQILTADRDLFQLLSPRISVLHPEGHRITPEWLWEKYGLRPEQWVDFRALAGDPSDNIPGVKGIGEKTALKLLKEWGSLENLLKNLDQVKPESVREKILAHLEDLKLSRELSRVRTDLPLEVDFRGRREPDWEGLKAFLERLEFGSLLHEFGLLESPTPAEEAPWPPPEGAFLGYRLSRPEPMWAELLALAASAQGRVYRAEDPHGALRGLKEVRGLLAKDLAVVALREGLDLPPTDDPMLLAYLLDPSNTTPEGVARRYGGEWTEDAGERALLAERLHANLLGRLQGEERLLWLYEEVEKPLSRVLAHMEATGVKLDVAYLEALSLEVAAEMRRLEEEVFRLAGHSFNLNSRDQLERVLFDELGLPPIGKTEKTGKRSTSAAVLEALREVHPIVDKILQYRELAKLKGTYIDPLPALVHPKTGRLHTRFNQTATATGRLSSSDPNLQNIPVRTPLGQKIRRAFVAEEGWRLVALDYSQIELRVLAHLSGDENLIRVFQEGKDIHTQTASWMFGLSAEAIDPLMRRAAKTINFGVLYGMSAHRLSQELGIPYEEAAAFIQRYFQSYPKVKAWIEKTLEEGRTRGYVETLFGRRRYVPDLNARVKSVREAAERMAFNMPVQGTAADLMKLAMVRLFPQLREVGARMLLQVHDELLLEAPKERAEEVAALAKEVMEGVWPLAVPLEVEVGIGEDWLAAKG

SEQ ID NO: 1239 - DNA, 2529 bp, synthetic construct
  misc_feature 1..2529: note = Variant of DNA polymerase I from Thermus sp. strain 2.9
  source 1..2529: mol_type = other DNA
atgcaccatcatcatcatcatggcggtagcggcatgttaccgttgttcgaacctaaaggtcgcgtgcttctggttgatggccatcatctcgcgtatcgtaacttctttgccctgaaaggattaaccaccagccgtggcgagccggtacagggtgtctacggctttgcaaagtcgctcctgaaagctctgaaagaagacggtgatgtggtgattgttgtctttgatgcgaaagcgccaagttttcgccacgaagcgtacgaagcttacaaagccgggcgtgctccaacgccggaagactttcctcgccaattggcgcttatgaaggaattagtggatttgcttggcctcgaacgcttggaagttcccggtttcgaggcagacgacgtattagcgactctcgcaaagaaagccgaacgtgagggctatgaagtccagatcttgacagcagatcgcgatcttttccagcttttatctccgcgcatctcggtgttacacccggaagggcatcgtatcaccccggaatggctctgggagaaatatggtttgcgtcccgaacaatgggtggattttcgcgccttagcaggcgatccgagcgacaatattccgggagttaaaggtatcggcgagaagacggcgctcaagctccttaaagaatgggggtcgttggagaacttgcttaagaatttagatcaggtcaaaccagagtcagtgcgtgagaagattcttgcacacctcgaagacctcaaattaagccgcgaattgtcccgtgtacgcaccgatttgccgctcgaagttgatttccgtggccgccgcgaacctgactgggagggtcttaaagcgtttttagagcgtcttgaatttggttcgctcttgcatgaattcggccttttagaaagcccgttaccagccgaagaagcaccttggccaccgcccgaaggcgcgtttttaggttaccgtttgagtcgcccggaaccgatgtgggccgaattattggctcttgcagcgtctgcccagggacgtgtgtatcgcgcggaagaccctcatggtgcgctccgcggcctcaaagaagtccgtggactccttgccaaagacttagctgttgttgcattgcgcgaaggtcttgatttacctccgactgatgatccaatgcttcttgcgtacctcttggacccgtcaaacacgacgcccgaaggcgtagcccgtcgttacggcggcgagtggaccgaagatgcaggcgagcgcgcgttattggccgaacgtttgcacgccaatttattaggacgtttgcaaggcgaggaacgtctcctctggctttacgaagaagtggagaaaccattgagtcgcgtgctcgcgcatatggaagctaccggtgtcaaattagacgtggcgtatttggaggcactcagccttgaagttgctgccgaaatgcgccgcttggaggaagaagtattcggtttagcaggccactcctttaaccttaattctcgcgatcagttagaacgtgtgttgttcgatgaacttggtctccctcctatcggcaagacagagaagaccggtaaacgtagcacttcagcggcggttttagaagctcttcgcgaagtccatcccattgtggacaagatcttgcagtaccgcgaactcgcgaaattgaaaggcacctatattgaccctcttccggcattagtccacccgaaaacgggacgcctccatacccgcttcaaccaaacagccacggcgaccggtcgtttgtcctcctctgatccaaaccttcagaatattccagtacgtaccccattgggccagaagatccgccgcgcgtttgtagctgaggagggttggcgtttagtggccctcgattatagccaaattgaattacgtgtccttgcccatctttctggcgatgagaacctcatccgcgtgtttcaggaaggcaaagacattcacactcaaacggcaagctggatgtttggattatcagctgaagcgatcgatcctttgatgcgtcgtgcagcgaagaccatcaatttcggtgttctctacggtatgagtgcccatcgtttgtcgcaggaattaggcattccctatgaagaagctgcggcgttcattcagcgctactttcaaagctatcccaaagttaaagcatggatcgagaagactctcgaagaaggccgcacacgtggttacgtagagaccttatttggacgtcgccgctatgttcccgatttaaacgctcgcgtgaaatctgtccgtgaagccgccgaacgcatggcgttcaacatgcctgtacagggcacggcagctgacctcatgaaacttgcaatggtgcgcctttttccacaattgcgtgaagttggtgcccgcatgctcttgcaggtccacgatgaactcttgttagaagcgccaaaagagcgtgcggaagaggtggcagccctcgcgaaagaggttatggaaggcgtgtggcccttagcggtgcctcttgaagtcgaagttggtattggcgaggattggttggctgccaaaggataatga

SEQ ID NO: 1240 - protein, 841 aa, synthetic construct
  REGION 1..841: note = Variant of DNA polymerase I from Thermus sp. strain 2.9
MHHHHHHGGSGMLPLFEPKGRVLLVDGHHLAYRNFFALKGLTTSRGEPVQGVYGFAKSLLKALKEDGDVVIVVFDAKAPSFRHEAYEAYKAGRAPTPEDFPRQLALMKELVDLLGLERLEVPGFEADDVLATLAKKAEREGYEVQILTADRDLFQLLSPRISVLHPEGHRITPEWLWEKYGLRPEQWVDFRALAGDPSDNIPGVKGIGEKTALKLLKEWGSLENLLKNLDQVKPESVREKILAHLEDLKLSRELSRVRTDLPLEVDFRGRREPDWEGLKAFLERLEFGSLLHEFGLLESPLPAEEAPWPPPEGAFLGYRLSRPEPMWAELLALAASAQGRVYRAEDPHGALRGLKEVRGLLAKDLAVVALREGLDLPPTDDPMLLAYLLDPSNTTPEGVARRYGGEWTEDAGERALLAERLHANLLGRLQGEERLLWLYEEVEKPLSRVLAHMEATGVKLDVAYLEALSLEVAAEMRRLEEEVFGLAGHSFNLNSRDQLERVLFDELGLPPIGKTEKTGKRSTSAAVLEALREVHPIVDKILQYRELAKLKGTYIDPLPALVHPKTGRLHTRFNQTATATGRLSSSDPNLQNIPVRTPLGQKIRRAFVAEEGWRLVALDYSQIELRVLAHLSGDENLIRVFQEGKDIHTQTASWMFGLSAEAIDPLMRRAAKTINFGVLYGMSAHRLSQELGIPYEEAAAFIQRYFQSYPKVKAWIEKTLEEGRTRGYVETLFGRRRYVPDLNARVKSVREAAERMAFNMPVQGTAADLMKLAMVRLFPQLREVGARMLLQVHDELLLEAPKERAEEVAALAKEVMEGVWPLAVPLEVEVGIGEDWLAAKG

SEQ ID NO: 1241 - DNA, 2529 bp, synthetic construct
  misc_feature 1..2529: note = Variant of DNA polymerase I from Thermus sp. strain 2.9
  source 1..2529: mol_type = other DNA
atgcaccatcatcatcatcatggcggtagcggcatgttaccgttgttcgaacctaaaggtcgcgtgcttctggttgatggccatcatctcgcgtatcgtaacttctttgccctgaaaggattaaccaccagccgtggcgagccggtacagggtgtctacggctttgcaaagtcgctcctgaaagctctgaaagaagacggtgatgtggtgattgttgtctttgatgcgaaagcgccaagttttcgccacgaagcgtacgaagcttacaaagccgggcgtgctccaacgccggaagactttcctcgccaattggcgcttatgaaggaattagtggatttgcttggcctcgaacgcttggaagttcccggtttcgaggcagacgacgtattagcgactctcgcaaagaaagccgaacgtgagggctatgaagtccagatcttgacagcagatcgcgatcttttccagcttttatctccgcgcatctcggtgttacacccggaagggcatcgtatcaccccggaatggctctgggagaaatatggtttgcgtcccgaacaatgggtggattttcgcgccttagcaggcgatccgagcgacaatattccgggagttaaaggtatcggcgagaagacggcgctcaagctccttaaagaatgggggtcgttggagaacttgcttaagaatttagatcaggtcaaaccagagtcagtgcgtgagaagattcttgcacacctcgaagacctcaaattaagccgcgaattgtcccgtgtacgcaccgatttgccgctcgaagttgatttccgtggccgccgcgaacctgactgggagggtcttaaagcgtttttagagcgtcttgaatttggttcgctcttgcatgaattcggccttttagaaagcccgttaccagccgaagaagcaccttggccaccgcccgaaggcgcgtttttaggttaccgtttgagtcgcccggaaccgatgtgggccgaattattggctcttgcagcgtctgcccagggacgtgtgtatcgcgcggaagaccctcatggtgcgctccgcggcctcaaagaagtccgtggactccttgccaaagacttagctgttgttgcattgcgcgaaggtcttgatttacctccgactgatgatccaatgcttcttgcgtacctcttggacccgtcaaacacgacgcccgaaggcgtagcccgtcgttacggcggcgagtggaccgaagatgcagctgagcgcgcgttattggccgaacgtttgcacgccaatttattaggacgtttgcaaggcgaggaacgtctcctctggctttacgaagaagtggagaaaccattgagtcgcgtgctcgcgcatatggaagctaccggtgtcaaattagacgtggcgtatttggaggcactcagccttgaagttgctgccgaaatgcgccgcttggaggaagaagtattccgtttagcaggccactcctttaaccttaattctcgcgatcagttagaacgtgtgttgttcgatgaacttggtctccctcctatcggcaagacagagaagaccggtaaacgtagcacttcagcggcggttttagaagctcttcgcgaagtccatcccattgtggacaagatcttgcagtaccgcgaactcgcgaaattgaaaggcacctatattgaccctcttccggcattagtccacccgaaaacgggacgcctccatacccgcttcaaccaaacagccacggcgaccggtcgtttgtcctcctctgatccaaaccttcagaatattccagtacgtaccccattgggccagaagatccgccgcgcgtttgtagctgaggagggttggcgtttagtggccctcgattatagccaaattgaattacgtgtccttgcccatctttctggcgatgagaacctcatccgcgtgtttcaggaaggcaaagacattcacactcaaacggcaagctggatgtttggattatcagctgaagcgatcgatcctttgatgcgtcgtgcagcgaagaccatcaatttcggtgttctctacggtatgagtgcccatcgtttgtcgcaggaattaggcattccctatgaagaagctgcggcgttcattcagcgctactttcaaagctatcccaaagttaaagcatggatcgagaagactctcgaagaaggccgcacacgtggttacgtagagaccttatttggacgtcgccgctatgttcccgatttaaacgctcgcgtgaaatctgtccgtgaagccgccgaacgcatggcgttcaacatgcctgtacagggcacggcagctgacctcatgaaacttgcaatggtgcgcctttttccacaattgcgtgaagttggtgcccgcatgctcttgcaggtccacgatgaactcttgttagaagcgccaaaagagcgtgcggaagaggtggcagccctcgcgaaagaggttatggaaggcgtgtggcccttagcggtgcctcttgaagtcgaagttggtattggcgaggattggttggctgccaaaggataatga

SEQ ID NO: 1242 - protein, 841 aa, synthetic construct
  REGION 1..841: note = Variant of DNA polymerase I from Thermus sp. strain 2.9
MHHHHHHGGSGMLPLFEPKGRVLLVDGHHLAYRNFFALKGLTTSRGEPVQGVYGFAKSLLKALKEDGDVVIVVFDAKAPSFRHEAYEAYKAGRAPTPEDFPRQLALMKELVDLLGLERLEVPGFEADDVLATLAKKAEREGYEVQILTADRDLFQLLSPRISVLHPEGHRITPEWLWEKYGLRPEQWVDFRALAGDPSDNIPGVKGIGEKTALKLLKEWGSLENLLKNLDQVKPESVREKILAHLEDLKLSRELSRVRTDLPLEVDFRGRREPDWEGLKAFLERLEFGSLLHEFGLLESPLPAEEAPWPPPEGAFLGYRLSRPEPMWAELLALAASAQGRVYRAEDPHGALRGLKEVRGLLAKDLAVVALREGLDLPPTDDPMLLAYLLDPSNTTPEGVARRYGGEWTEDAAERALLAERLHANLLGRLQGEERLLWLYEEVEKPLSRVLAHMEATGVKLDVAYLEALSLEVAAEMRRLEEEVFRLAGHSFNLNSRDQLERVLFDELGLPPIGKTEKTGKRSTSAAVLEALREVHPIVDKILQYRELAKLKGTYIDPLPALVHPKTGRLHTRFNQTATATGRLSSSDPNLQNIPVRTPLGQKIRRAFVAEEGWRLVALDYSQIELRVLAHLSGDENLIRVFQEGKDIHTQTASWMFGLSAEAIDPLMRRAAKTINFGVLYGMSAHRLSQELGIPYEEAAAFIQRYFQSYPKVKAWIEKTLEEGRTRGYVETLFGRRRYVPDLNARVKSVREAAERMAFNMPVQGTAADLMKLAMVRLFPQLREVGARMLLQVHDELLLEAPKERAEEVAALAKEVMEGVWPLAVPLEVEVGIGEDWLAAKG

SEQ ID NO: 1243 - DNA, 2529 bp, synthetic construct
  misc_feature 1..2529: note = Variant of DNA polymerase I from Thermus sp. strain 2.9
  source 1..2529: mol_type = other DNA
atgcaccatcatcatcatcatggcggtagcggcatgttaccgttgttcgaacctaaaggtcgcgtgcttctggttgatggccatcatctcgcgtatcgtaacttctttgccctgaaaggattaaccaccagccgtggcgagccggtacagggtgtctacggctttgcaaagtcgctcctgaaagctctgaaagaagacggtgatgtggtgattgttgtctttgatgcgaaagcgccaagttttcgccacgaagcgtacgaagcttacaaagccgggcgtgctccaacgccggaagactttcctcgccaattggcgcttatgaaggaattagtggatttgcttggcctcgaacgcttggaagttcccggtttcgaggcagacgacgtattagcgactctcgcaaagaaagccgaacgtgagggctatgaagtccagatcttgacagcagatcgcgatcttttccagcttttatctccgcgcatctcggtgttacacccggaagggcatcgtatcaccccggaatggctctgggagaaatatggtttgcgtcccgaacaatgggtggattttcgcgccttagcaggcgatccgagcgacaatattccgggagttaaaggtatcggcgagaagacggcgctcaagctccttaaagaatgggggtcgttggagaacttgcttaagaatttagatcaggtcaaaccagagtcagtgcgtgagaagattcttgcacacctcgaagacctcaaattaagccgcgaattgtcccgtgtacgcaccgatttgccgctcgaagttgatttccgtggccgccgcgaacctgactgggagggtcttaaagcgtttttagagcgtcttgaatttggttcgctcttgcatgaattcggccttttagaaagcccgttaccagccgaagaagcaccttggccaccgcccgaaggcgcgtttttaggttaccgtttgagtcgcccggaaccgatgtgggccgaattattggctcttgcagcgtctgcccagggacgtgtgtatcgcgcggaagaccctcatggtgcgctccgcggcctcaaagaagtccgtggactccttgccaaagacttagctgttgttgcattgcgcgaaggtcttgatttacctccgactgatgatccaatgcttcttgcgtacctcttggacccgtcaaacacgacgcccgaaggcgtagcccgtcgttacggcggcgagtggaccgaagatgcaggcgagcgcgcgttattggccgaacgtttgcacgccaatttattaggacgtttgcaaggcgagaggcgtctcctctggctttacgaagaagtggagaaaccattgagtcgcgtgctcgcgcatatggaagctaccggtgtcaaattagacgtggcgtatttggaggcactcagccttgaagttgctgccgaaatgcgccgcttggaggaagaagtattccgtttagcaggccactcctttaaccttaattctcgcgatcagttagaacgtgtgttgttcgatgaacttggtctccctcctatcggcaagacagagaagaccggtaaacgtagcacttcagcggcggttttagaagctcttcgcgaagtccatcccattgtggacaagatcttgcagtaccgcgaactcgcgaaattgaaaggcacctatattgaccctcttccggcattagtccacccgaaaacgggacgcctccatacccgcttcaaccaaacagccacggcgaccggtcgtttgtcctcctctgatccaaaccttcagaatattccagtacgtaccccattgggccagaagatccgccgcgcgtttgtagctgaggagggttggcgtttagtggccctcgattatagccaaattgaattacgtgtccttgcccatctttctggcgatgagaacctcatccgcgtgtttcaggaaggcaaagacattcacactcaaacggcaagctggatgtttggattatcagctgaagcgatcgatcctttgatgcgtcgtgcagcgaagaccatcaatttcggtgttctctacggtatgagtgcccatcgtttgtcgcaggaattaggcattccctatgaagaagctgcggcgttcattcagcgctactttcaaagctatcccaaagttaaagcatggatcgagaagactctcgaagaaggccgcacacgtggttacgtagagaccttatttggacgtcgccgctatgttcccgatttaaacgctcgcgtgaaatctgtccgtgaagccgccgaacgcatggcgttcaacatgcctgtacagggcacggcagctgacctcatgaaacttgcaatggtgcgcctttttccacaattgcgtgaagttggtgcccgcatgctcttgcaggtccacgatgaactcttgttagaagcgccaaaagagcgtgcggaagaggtggcagccctcgcgaaagaggttatggaaggcgtgtggcccttagcggtgcctcttgaagtcgaagttggtattggcgaggattggttggctgccaaaggataatga

SEQ ID NO: 1244 - protein, 841 aa, synthetic construct
  REGION 1..841: note = Variant of DNA polymerase I from Thermus sp. strain 2.9
MHHHHHHGGSGMLPLFEPKGRVLLVDGHHLAYRNFFALKGLTTSRGEPVQGVYGFAKSLLKALKEDGDVVIVVFDAKAPSFRHEAYEAYKAGRAPTPEDFPRQLALMKELVDLLGLERLEVPGFEADDVLATLAKKAEREGYEVQILTADRDLFQLLSPRISVLHPEGHRITPEWLWEKYGLRPEQWVDFRALAGDPSDNIPGVKGIGEKTALKLLKEWGSLENLLKNLDQVKPESVREKILAHLEDLKLSRELSRVRTDLPLEVDFRGRREPDWEGLKAFLERLEFGSLLHEFGLLESPLPAEEAPWPPPEGAFLGYRLSRPEPMWAELLALAASAQGRVYRAEDPHGALRGLKEVRGLLAKDLAVVALREGLDLPPTDDPMLLAYLLDPSNTTPEGVARRYGGEWTEDAGERALLAERLHANLLGRLQGERRLLWLYEEVEKPLSRVLAHMEATGVKLDVAYLEALSLEVAAEMRRLEEEVFRLAGHSFNLNSRDQLERVLFDELGLPPIGKTEKTGKRSTSAAVLEALREVHPIVDKILQYRELAKLKGTYIDPLPALVHPKTGRLHTRFNQTATATGRLSSSDPNLQNIPVRTPLGQKIRRAFVAEEGWRLVALDYSQIELRVLAHLSGDENLIRVFQEGKDIHTQTASWMFGLSAEAIDPLMRRAAKTINFGVLYGMSAHRLSQELGIPYEEAAAFIQRYFQSYPKVKAWIEKTLEEGRTRGYVETLFGRRRYVPDLNARVKSVREAAERMAFNMPVQGTAADLMKLAMVRLFPQLREVGARMLLQVHDELLLEAPKERAEEVAALAKEVMEGVWPLAVPLEVEVGIGEDWLAAKG

SEQ ID NO: 1245 - DNA, 2529 bp, synthetic construct
  misc_feature 1..2529: note = Variant of DNA polymerase I from Thermus sp. strain 2.9
  source 1..2529: mol_type = other DNA
atgcaccatcatcatcatcatggcggtagcggcatgttaccgttgttcgaacctaaaggtcgcgtgcttctggttgatggccatcatctcgcgtatcgtaacttctttgccctgaaaggattaaccaccagccgtggcgagccggtacagggtgtctacggctttgcaaagtcgctcctgaaagctctgaaagaagacggtgatgtggtgattgttgtctttgatgcgaaagcgccaagttttcgccacgaagcgtacgaagcttacaaagccgggcgtgctccaacgccggaagactttcctcgccaattggcgcttatgaaggaattagtggatttgcttggcctcgaacgcttggaagttcccggtttcgaggcagacgacgtattagcgactctcgcaaagaaagccgaacgtgagggctatgaagtccagatcttgacagcagatcgcgatcttttccagcttttatctccgcgcatctcggtgttacacccggaagggcatcgtatcaccccggaatggctctgggagaaatatggtttgcgtcccgaacaatgggtggattttcgcgccttagcaggcgatccgagcgacaatattccgggagttaaaggtatcggcgagaagacggcgctcaagctccttaaagaatgggggtcgttggagaacttgcttaagaatttagatcaggtcaaaccagagtcagtgcgtgagaagattcttgcacacctcgaagacctcaaattaagccgcgaattgtcccgtgtacgcaccgatttgccgctcgaagttgatttccgtggccgccgcgaacctgactgggagggtcttaaagcgtttttagagcgtcttgaatttggttcgctcttgcatgaattcggccttttagaaagcccgttaccagccgaagaagcaccttggccaccgcccgaaggcgcgtttttaggttaccgtttgagtcgcccggaaccgatgtgggccgaattatcggctcttgcagcgtctgcccagggacgtgtgtatcgcgcggaagaccctcatggtgcgctccgcggcctcaaagaagtccgtggactccttgccaaagacttagctgttgttgcattgcgcgaaggtcttgatttacctccgactgatgatccaatgcttcttgcgtacctcttggacccgtcaaacacgacgcccgaaggcgtagcccgtcgttacggcggcgagtggaccgaagatgcagctgagcgcgcgttattggccgaacgtttgcacgccaatttattaggacgtttgcaaggcgaggaacgtctcctctggctttacgaagaagtggagaaaccattgagtcgcgtgctcgcgcatatggaagctaccggtgtcaaattagacgtggcgtatttggaggcactcagccttgaagttgctgccgaaatgcgccgcttggaggaagaagtattccgtttagcaggccactcctttaaccttaattctcgcgatcagttagaacgtgtgttgttcgatgaacttggtctccctcctatcggcaagacagagaagaccggtaaacgtagcacttcagcggcggttttagaagctcttcgcgaagtccatcccattgtggacaagatcttgcagtaccgcgaactcgcgaaattgaaaggcacctatattgaccctcttccggcattagtccacccgaaaacgggacgcctccatacccgcttcaaccaaacagccacggcgaccggtcgtttgtcctcctctgatccaaaccttcagaatattccagtacgtaccccattgggccagaagatccgccgcgcgtttgtagctgaggagggttggcgtttagtggccctcgattatagccaaattgaattacgtgtccttgcccatctttctggcgatgagaacctcatccgcgtgtttcaggaaggcaaagacattcacactcaaacggcaagctggatgtttggattatcagctgaagcgatcgatcctttgatgcgtcgtgcagcgaagaccattaatttcggtgttctctacggtatgagtgcccatcgtttgtcgcaggaattaggcattccctatgaagaagctgccgcgttcattcagcgctactttcaaagctatcccaaagttaaagcatggatcgagaagactctcgaagaaggccgcacacgtggttacgtagagaccttatttggacgtcgccgctatgttcccgatttaaacgctcgcgtgaaatctgtccgtgaagccgccgaacgcatggcgttcaacatgcctgtacagggcacggcagctgacctcatgaaacttgcaatggtgcgcctttttccacaattgcgtgaagttggtgcccgcatgctcttgcaggtccacgatgaactcttgttagaagcgccaaaagagcgtgcggaagaggtggcagccctcgcgaaagaggttatggaaggcgtgtggcccttagcggtgcctcttgaagtcgaagttggtattggcgaggattggttggctgccaaaggataatga

SEQ ID NO: 1246 - protein, 841 aa, synthetic construct
  REGION 1..841: note = Variant of DNA polymerase I from Thermus sp. strain 2.9
MHHHHHHGGSGMLPLFEPKGRVLLVDGHHLAYRNFFALKGLTTSRGEPVQGVYGFAKSLLKALKEDGDVVIVVFDAKAPSFRHEAYEAYKAGRAPTPEDFPRQLALMKELVDLLGLERLEVPGFEADDVLATLAKKAEREGYEVQILTADRDLFQLLSPRISVLHPEGHRITPEWLWEKYGLRPEQWVDFRALAGDPSDNIPGVKGIGEKTALKLLKEWGSLENLLKNLDQVKPESVREKILAHLEDLKLSRELSRVRTDLPLEVDFRGRREPDWEGLKAFLERLEFGSLLHEFGLLESPLPAEEAPWPPPEGAFLGYRLSRPEPMWAELSALAASAQGRVYRAEDPHGALRGLKEVRGLLAKDLAVVALREGLDLPPTDDPMLLAYLLDPSNTTPEGVARRYGGEWTEDAAERALLAERLHANLLGRLQGEERLLWLYEEVEKPLSRVLAHMEATGVKLDVAYLEALSLEVAAEMRRLEEEVFRLAGHSFNLNSRDQLERVLFDELGLPPIGKTEKTGKRSTSAAVLEALREVHPIVDKILQYRELAKLKGTYIDPLPALVHPKTGRLHTRFNQTATATGRLSSSDPNLQNIPVRTPLGQKIRRAFVAEEGWRLVALDYSQIELRVLAHLSGDENLIRVFQEGKDIHTQTASWMFGLSAEAIDPLMRRAAKTINFGVLYGMSAHRLSQELGIPYEEAAAFIQRYFQSYPKVKAWIEKTLEEGRTRGYVETLFGRRRYVPDLNARVKSVREAAERMAFNMPVQGTAADLMKLAMVRLFPQLREVGARMLLQVHDELLLEAPKERAEEVAALAKEVMEGVWPLAVPLEVEVGIGEDWLAAKG

SEQ ID NO: 1247 - DNA, 2529 bp, synthetic construct
  misc_feature 1..2529: note = Variant of DNA polymerase I from Thermus sp. strain 2.9
  source 1..2529: mol_type = other DNA
atgcaccatcatcatcatcatggcggtagcggcatgttaccgttgttcgaacctaaaggtcgcgtgcttctggttgatggccatcatctcgcgtatcgtaacttctttgccctgaaaggattaaccaccagccgtggcgagccggtacagggtgtctacggctttgcaaagtcgctcctgaaagctctgaaagaagacggtgatgtggtgattgttgtctttgatgcgaaagcgccaagttttcgccacgaagcgtacgaagcttacaaagccgggcgtgctccaacgccggaagactttcctcgccaattggcgcttatgaaggaattagtggatttgcttggcctcgaacgcttggaagttcccggtttcgaggcagacgacgtattagcgactctcgcaaagaaagccgaacgtgagggctatgaagtccagatcttgacagcagatcgcgatcttttccagcttttatctccgcgcatctcggtgttacacccggaagggcatcgtatcaccccggaatggctctgggagaaatatggtttgcgtcccgaacaatgggtggattttcgcgccttagcaggcgatccgagcgacaatattccgggagttaaaggtatcggcgagaagacggcgctcaagctccttaaagaatgggggtcgttggagaacttgcttaagaatttagatcaggtcaaaccagagtcagtgcgtgagaagattcttgcacacctcgaagacctcaaattaagccgcgaattgtcccgtgtacgcaccgatttgccgctcgaagttgatttccgtggccgccgcgaacctgactgggagggtcttaaagcgtttttagagcgtcttgaatttggttcgctcttgcatgaattcggccttttagaaagcccgttaccagccgaagaagcaccttggccaccgcccgaaggcgcgtttttaggttaccgtttgagtcgcccggaaccgatgtgggccgaattactggctcttgcagcgtctgcccaggagcgtgtgtatcgcgcggaagaccctcatggtgcgctccgcggcctcaaagaagtccgtggactccttgccaaagacttagctgttgttgcattgcgcgaaggtcttgatttacctccgactgatgatccaatgcttcttgcgtacctcttggacccgtcaaacacgacgcccgaaggcgtagcccgtcgttacggcggcgagtggaccgaagatgcaggcgagcgcgcgttattggccgaacgtttgcacgccaatttattaggacgtttgcaaggcgaggaacgtctcctctggctttacgaagaagtggagaaaccattgagtcgcgtgctcgcgcatatggaagctaccggtgtcaaattagacgtggcgtatttggaggcactcagccttgaagttgctgccgaaatgcgccgcttggaggaagaagtattccgtttagcaggccactcctttaaccttaattctcgcgatcagttagaacgtgtgttgttcgataaccttggtctccctcctatcggcaagacagagaagaccggtaaacgtagcacttcagcggcggttttagaagctcttcgcgaagtccatcccattgtggacaagatcttgcagtaccgcgaactcgcgaaattgaaaggcacctatattgaccctcttccggcattagtccacccgaaaacgggacgcctccatacccgcttcaaccaaacagccacggcgaccggtcgtttgtcctcctctgatccaaaccttcagaatattccagtacgtaccccattgggccagaagatccgccgcgcgtttgtagctgaggagggttggcgtttagtggccctcgattatagccaaattgaattacgtgtccttgcccatctttctggcgatgagaacctcatccgcgtgtttcaggaaggcaaagacattcacactcaaacggcaagctggatgtttggattatcagcagaagcgatcgatcctttgatgcgtcgtgcagcgaagaccattaatttcggtgttctctacggtatgagtgcccatcgtttgtcgcaggaattaggcattccctatgaagaagctgtcgcgttcattcagcgctactttcaaagctatcccaaagttaaagcatggatcgagaagactctcgaagaaggccgcacacgtggttacgtagagaccttatttggacgtcgccgctatgttcccgatttaaacgctcgcgtgaaatctgtccgtgaagccgccgaacgcatggcgttcaacatgcctgtacagggcacggcagctgacctcatgaaacttgcaatggtgcgcctttttccacaattgcgtgaagttggtgcccgcatgctcttgcaggtccacgatgaactcttgttagaagcgccaaaagagcgtgcggaagaggtggcagccctcgcgaaagaggttatggaaggcgtgtggcccttagcggtgcctcttgaagtcgaagttggtattggcgaggattggttggctgccaaaggataatga

SEQ ID NO: 1248 - protein, 841 aa, synthetic construct
  REGION 1..841: note = Variant of DNA polymerase I from Thermus sp. strain 2.9
MHHHHHHGGSGMLPLFEPKGRVLLVDGHHLAYRNFFALKGLTTSRGEPVQGVYGFAKSLLKALKEDGDVVIVVFDAKAPSFRHEAYEAYKAGRAPTPEDFPRQLALMKELVDLLGLERLEVPGFEADDVLATLAKKAEREGYEVQILTADRDLFQLLSPRISVLHPEGHRITPEWLWEKYGLRPEQWVDFRALAGDPSDNIPGVKGIGEKTALKLLKEWGSLENLLKNLDQVKPESVREKILAHLEDLKLSRELSRVRTDLPLEVDFRGRREPDWEGLKAFLERLEFGSLLHEFGLLESPLPAEEAPWPPPEGAFLGYRLSRPEPMWAELLALAASAQERVYRAEDPHGALRGLKEVRGLLAKDLAVVALREGLDLPPTDDPMLLAYLLDPSNTTPEGVARRYGGEWTEDAGERALLAERLHANLLGRLQGEERLLWLYEEVEKPLSRVLAHMEATGVKLDVAYLEALSLEVAAEMRRLEEEVFRLAGHSFNLNSRDQLERVLFDNLGLPPIGKTEKTGKRSTSAAVLEALREVHPIVDKILQYRELAKLKGTYIDPLPALVHPKTGRLHTRFNQTATATGRLSSSDPNLQNIPVRTPLGQKIRRAFVAEEGWRLVALDYSQIELRVLAHLSGDENLIRVFQEGKDIHTQTASWMFGLSAEAIDPLMRRAAKTINFGVLYGMSAHRLSQELGIPYEEAVAFIQRYFQSYPKVKAWIEKTLEEGRTRGYVETLFGRRRYVPDLNARVKSVREAAERMAFNMPVQGTAADLMKLAMVRLFPQLREVGARMLLQVHDELLLEAPKERAEEVAALAKEVMEGVWPLAVPLEVEVGIGEDWLAAKG

SEQ ID NO: 1249 - DNA, 2529 bp, synthetic construct
  misc_feature 1..2529: note = Variant of DNA polymerase I from Thermus sp. strain 2.9
  source 1..2529: mol_type = other DNA
atgcaccatcatcatcatcatggcggtagcggcatgttaccgttgttcgaacctaaaggtcgcgtgcttctggttgatggccatcatctcgcgtatcgtaacttctttgccctgaaaggattaaccaccagccgtggcgagccggtacagggtgtctacggctttgcaaagtcgctcctgaaagctctgaaagaagacggtgatgtggtgattgttgtctttgatgcgaaagcgccaagttttcgccacgaagcgtacgaagcttacaaagccgggcgtgctccaacgccggaagactttcctcgccaattggcgcttatgaaggaattagtggatttgcttggcctcgaacgcttggaagttcccggtttcgaggcagacgacgtattagcgactctcgcaaagaaagccgaacgtgagggctatgaagtccagatcttgacagcagatcgcgatcttttccagcttttatctccgcgcatctcggtgttacacccggaagggcatcgtatcaccccggaatggctctgggagaaatatggtttgcgtcccgaacaatgggtggattttcgcgccttagcaggcgatccgagcgacaatattccgggagttaaaggtatcggcgagaagacggcgctcaagctccttaaagaatgggggtcgttggagaacttgcttaagaatttagatcaggtcaaaccagagtcagtgcgtgagaagattcttgcacacctcgaagacctcaaattaagccgcgaattgtcccgtgtacgcaccgatttgccgctcgaagttgatttccgtcgtcgccgcgaacctgactgggagggtcttaaagcgtttttagagcgtcttgaatttggttcgctcttgcatgaattcggccttttagaaagcccgttaccagccgaagaagcaccttggccaccgcccgaaggcgcgtttttaggttaccgtttgagtcgcccggaaccgatgtgggccgaattatcggctcttgcagcgtctgcccaggggcgtgtgtatcgcgcggaagaccctcatggtgcgctccgtggcctcaaagaagtccgtggactccttgccaaagacttagctgttgttgcattgcgcgaaggtcttgatttacctccgactgatgatccaatgcttcttgcgtacctcttggacccgtcaaacacgacgcccgaaggcgtagcccgtcgttacggcggcgagtggaccgaagatgcaggcgagcgcgcgttattggccgaacgtttgcacgccaatttattaggacgtttgcaaggcgaggaacgtctcctctggctttacgaagaagtggagaaaccattgagtcgcgtgctcgcgcatatggaagctaccggtgtcaaattagacgtggcgtatttggaggctctcagccttgaagttgctgccgaaatgcgccgcttggaggaagaagtattccgtttagcaggccactcctttaaccttaattctcgcgatcagttagaacgtgtgttgttcgatgagcttggtctccctcctatcggcaagacagagaagaccggtaaacgtagcacttcagcggcggttttagaagctcttcgcgaagtccatcccattgtggacaagatcttgcagtaccgcgaactcgcgaaattgaaaggcacctatattgaccctcttccggcattagtccacccgaaaacgggacgcctccatacccgcttcaaccaaacagccacggcgaccggtcgtttgtcctcctctgatccaaaccttcagaatattccagtacgtaccccattgggccagaagatccgccgcgcgtttgtagctgaggagggttggcgtttagtggccctcgattatagccaaattgaattacgtgtccttgcccatctttctggcgatgagaacctcatccgcgtgtttcaggaaggcaaagacattcacactcaaacggcaagctggatgtttggattatcagctgaagcgatcgatcctttgatgcgtcgtgcagcgaagaccatcaatttcggtgttctctacggtatgagtgcccatcgtttgtcgcaggaattaggcattccctatgaagaagctgtcgcgttcattcagcgctactttcaaagctatcccaaagttaaagcatggatcgagaagactctcgaagaaggccgcacacgtggttacgtagagaccttatttggacgtcgccgctatgttcccgatttaaacgctcgcgtgaaatctgtccgtgaagccgccgaacgcatggcgttcaacatgcctgtacagggcacggcagctgacctcatgaaacttgcaatggtgcgcctttttccacaattgcgtgaagttggtgcccgcatgctcttgcaggtccacgatgaactcttgttagaagcgccaaaagagcgtgcggaagaggtggcagccctcgcgaaagaggttatggaaggcgtgtggcccttagcggtgcctcttgaagtcgaagttggtattggcgaggattggttggctgccaaaggataatga

SEQ ID NO: 1250 - protein, 841 aa, synthetic construct
  REGION 1..841: note = Variant of DNA polymerase I from Thermus sp. strain 2.9
MHHHHHHGGSGMLPLFEPKGRVLLVDGHHLAYRNFFALKGLTTSRGEPVQGVYGFAKSLLKALKEDGDVVIVVFDAKAPSFRHEAYEAYKAGRAPTPEDFPRQLALMKELVDLLGLERLEVPGFEADDVLATLAKKAEREGYEVQILTADRDLFQLLSPRISVLHPEGHRITPEWLWEKYGLRPEQWVDFRALAGDPSDNIPGVKGIGEKTALKLLKEWGSLENLLKNLDQVKPESVREKILAHLEDLKLSRELSRVRTDLPLEVDFRRRREPDWEGLKAFLERLEFGSLLHEFGLLESPLPAEEAPWPPPEGAFLGYRLSRPEPMWAELSALAASAQGRVYRAEDPHGALRGLKEVRGLLAKDLAVVALREGLDLPPTDDPMLLAYLLDPSNTTPEGVARRYGGEWTEDAGERALLAERLHANLLGRLQGEERLLWLYEEVEKPLSRVLAHMEATGVKLDVAYLEALSLEVAAEMRRLEEEVFRLAGHSFNLNSRDQLERVLFDELGLPPIGKTEKTGKRSTSAAVLEALREVHPIVDKILQYRELAKLKGTYIDPLPALVHPKTGRLHTRFNQTATATGRLSSSDPNLQNIPVRTPLGQKIRRAFVAEEGWRLVALDYSQIELRVLAHLSGDENLIRVFQEGKDIHTQTASWMFGLSAEAIDPLMRRAAKTINFGVLYGMSAHRLSQELGIPYEEAVAFIQRYFQSYPKVKAWIEKTLEEGRTRGYVETLFGRRRYVPDLNARVKSVREAAERMAFNMPVQGTAADLMKLAMVRLFPQLREVGARMLLQVHDELLLEAPKERAEEVAALAKEVMEGVWPLAVPLEVEVGIGEDWLAAKG

SEQ ID NO: 1251 - DNA, 2529 bp, synthetic construct
  misc_feature 1..2529: note = Variant of DNA polymerase I from Thermus sp. strain 2.9
  source 1..2529: mol_type = other DNA
atgcaccatcatcatcatcatggcggtagcggcatgttaccgttgttcgaacctaaaggtcgcgtgcttctggttgatggccatcatctcgcgtatcgtaacttctttgccctgaaaggattaaccaccagccgtggcgagccggtacagggtgtctacggctttgcaaagtcgctcctgaaagctctgaaagaagacggtgatgtggtgattgttgtctttgatgcgaaagcgccaagttttcgccacgaagcgtacgaagcttacaaagccgggcgtgctccaacgccggaagactttcctcgccaattggcgcttatgaaggaattagtggatttgcttggcctcgaacgcttggaagttcccggtttcgaggcagacgacgtattagcgactctcgcaaagaaagccgaacgtgagggctatgaagtccagatcttgacagcagatcgcgatcttttccagcttttatctccgcgcatctcggtgttacacccggaagggcatcgtatcaccccggaatggctctgggagaaatatggtttgcgtcccgaacaatgggtggattttcgcgccttagcaggcgatccgagcgacaatattccgggagttaaaggtatcggcgagaagacggcgctcaagctccttaaagaatgggggtcgttggagaacttgcttaagaatttagatcaggtcaaaccagagtcagtgcgtgagaagattcttgcacacctcgaagacctcaaattaagccgcgaattgtcccgtgtacgcaccgatttgccgctcgaagttgatttccgtcgtcgccgcgaacctgactgggagggtcttaaagcgtttttagagcgtcttgaatttggttcgctcttgcatgaattcggccttttagaaagcccgttaccagccgaagaagcaccttggccaccgcccgaaggcgcgtttttaggttaccgtttgagtcgcccggaaccgatgtgggccgaattatcggctcttgcagcgtctgcccaggggcgtgtgtatcgcgcggaagaccctcatggtgcgctccgtggcctcaaagaagtccgtggactccttgccaaagacttagctgttgttgcattgcgcgaaggtcttgatttacctccgactgatgatccaatgcttcttgcgtacctcttggacccgtcaaacacgacgcccgaaggcgtagcccgtcgttacggcggcgagtggaccgaagatgcaggtaagcgcgcgttattggccgaacgtttgcacgccaatttattaggacgtttgcaaggcgaggaacgtctcctctggctttacgaagaagtggagaaaccattgagtcgcgtgctcgcgcatatggaagctaccggtgtcaaattagacgtggcgtatttggaggctctcagccttgaagttgctgccgaaatgcgccgcttggaggaagaagtattccgtttagcaggccactcctttaaccttaattctcgcgatcagttagaacgtgtgttgttcgataaccttggtctccctcctatcggcaagacagagaagaccggtaaacgtagcacttcagcggcggttttagaagctcttcgcgaagtccatcccattgtggacaagatcttgcagtaccgcgaactcgcgaaattgaaaggcacctatattgaccctcttccggcattagtccacccgaaaacgggacgcctccatacccgcttcaaccaaacagccacggcgaccggtcgtttgtcctcctctgatccaaaccttcagaatattccagtacgtaccccattgggccagaagatccgccgcgcgtttgtagctgaggagggttggcgtttagtggccctcgattatagccaaattgaattacgtgtccttgcccatctttctggcgatgagaacctcatccgcgtgtttcaggaaggcaaagacattcacactcaaacggcaagctggatgtttggattatcagcagaagcgatcgatcctttgatgcgtcgtgcagcgaagaccattaatttcggtgttctctacggtatgagtgcccatcgtttgtcgcaggaattaggcattccctatgaagaagctgcggcgttcattcagcgctactttcaaagctatcccaaagttaaagcatggatcgagaagactctcgaagaaggccgcacacgtggttacgtagagaccttatttggacgtcgccgctatgttcccgatttaaacgctcgcgtgaaatctgtccgtgaagccgccgaacgcatggcgttcaacatgcctgtacagggcacggcagctgacctcatgaaacttgcaatggtgcgcctttttccacaattgcgtgaagttggtgcccgcatgctcttgcaggtccacgatgaactcttgttagaagcgccaaaagagcgtgcggaagaggtggcagccctcgcgaaagaggttatggaaggcgtgtggcccttagcggtgcctcttgaagtcgaagttggtattggcgaggattggttggctgccaaaggataatga

SEQ ID NO: 1252 - protein, 841 aa, synthetic construct
  REGION 1..841: note = Variant of DNA polymerase I from Thermus sp. strain 2.9
MHHHHHHGGSGMLPLFEPKGRVLLVDGHHLAYRNFFALKGLTTSRGEPVQGVYGFAKSLLKALKEDGDVVIVVFDAKAPSFRHEAYEAYKAGRAPTPEDFPRQLALMKELVDLLGLERLEVPGFEADDVLATLAKKAEREGYEVQILTADRDLFQLLSPRISVLHPEGHRITPEWLWEKYGLRPEQWVDFRALAGDPSDNIPGVKGIGEKTALKLLKEWGSLENLLKNLDQVKPESVREKILAHLEDLKLSRELSRVRTDLPLEVDFRRRREPDWEGLKAFLERLEFGSLLHEFGLLESPLPAEEAPWPPPEGAFLGYRLSRPEPMWAELSALAASAQGRVYRAEDPHGALRGLKEVRGLLAKDLAVVALREGLDLPPTDDPMLLAYLLDPSNTTPEGVARRYGGEWTEDAGKRALLAERLHANLLGRLQGEERLLWLYEEVEKPLSRVLAHMEATGVKLDVAYLEALSLEVAAEMRRLEEEVFRLAGHSFNLNSRDQLERVLFDNLGLPPIGKTEKTGKRSTSAAVLEALREVHPIVDKILQYRELAKLKGTYIDPLPALVHPKTGRLHTRFNQTATATGRLSSSDPNLQNIPVRTPLGQKIRRAFVAEEGWRLVALDYSQIELRVLAHLSGDENLIRVFQEGKDIHTQTASWMFGLSAEAIDPLMRRAAKTINFGVLYGMSAHRLSQELGIPYEEAAAFIQRYFQSYPKVKAWIEKTLEEGRTRGYVETLFGRRRYVPDLNARVKSVREAAERMAFNMPVQGTAADLMKLAMVRLFPQLREVGARMLLQVHDELLLEAPKERAEEVAALAKEVMEGVWPLAVPLEVEVGIGEDWLAAKG

SEQ ID NO: 1253 - DNA, 2529 bp, synthetic construct
  misc_feature 1..2529: note = Variant of DNA polymerase I from Thermus sp. strain 2.9
  source 1..2529: mol_type = other DNA
atgcaccatcatcatcatcatggcggtagcggcatgttaccgttgttcgaacctaaaggtcgcgtgcttctggttgatggccatcatctcgcgtatcgtaacttctttgccctgaaaggattaaccaccagccgtggcgagccggtacagggtgtctacggctttgcaaagtcgctcctgaaagctctgaaagaagacggtgatgtggtgattgttgtctttgatgcgaaagcgccaagttttcgccacgaagcgtacgaagcttacaaagccgggcgtgctccaacgccggaagactttcctcgccaattggcgcttatgaaggaattagtggatttgcttggcctcgaacgcttggaagttcccggtttcgaggcagacgacgtattagcgactctcgcaaagaaagccgaacgtgagggctatgaagtccagatcttgacagcagatcgcgatcttttccagcttttatctccgcgcatctcggtgttacacccggaagggcatcgtatcaccccggaatggctctgggagaaatatggtttgcgtcccgaacaatgggtggattttcgcgccttagcaggcgatccgagcgacaatattccgggagttaaaggtatcggcgagaagacggcgctcaagctccttaaagaatgggggtcgttggagaacttgcttaagaatttagatcaggtcaaaccagagtcagtgcgtgagaagattcttgcacacctcgaagacctcaaattaagccgcgaattgtcccgtgtacgcaccgatttgccgctcgaagttgatttccgtggtcgccgcgaacctgactgggagggtcttaaagcgtttttagagcgtcttgaatttggttcgctcttgcatgaattcggccttttagaaagcccgttaccagccgaagaagcaccttggccaccgcccgaaggcgcgtttttaggttaccgtttgagtcgcccggaaccgatgtgggccgaattatcggctcttgcagcgtctgcccagggacgtgtgtatcgcgcggaagaccctcatggtgcgctcaagggcctcaaagaagtccgtggactccttgccaaagacttagctgttgttgcattgcgcgaaggtcttgatttacctccgactgatgatccaatgcttcttgcgtacctcttggacccgtcaaacacgacgcccgaaggcgtagcccgtcgttacggcggcgagtggaccgaagatgcagctaagcgcgcgttattggccgaacgtttgcacgccaatttattaggacgtttgcaaggcgaggaacgtctcctctggctttacgaagaagtggagaaaccattgagtcgcgtgctcgcgcatatggaagctaccggtgtcaaattagacgtggcgtatttggaggctctcagccttgaagttgctgccgaaatgcgccgcttggaggaagaagtattccgtttagcaggccactcctttaaccttaattctcgcgatcagttagaacgtgtgttgttcgataaccttggtctccctcctatcggcaagacagagaagaccggtaaacgtagcacttcagcggcggttttagaagctcttcgcgaagtccatcccattgtggacaagatcttgcagtaccgcgaactcgcgaaattgaaaggcacctatattgaccctcttccggcattagtccacccgaaaacgggacgcctccatacccgcttcaaccaaacagccacggcgaccggtcgtttgtcctcctctgatccaaaccttcagaatattccagtacgtaccccattgggccagaagatccgccgcgcgtttgtagctgaggagggttggcgtttagtggccctcgattatagccaaattgaattacgtgtccttgcccatctttctggcgatgagaacctcatccgcgtgtttcaggaaggcaaagacattcacactcaaacggcaagctggatgtttggattatcagctgaagcgatcgatcctttgatgcgtcgtgcagcgaagaccattaatttcggtgttctctacggtatgagtgcccatcgtttgtcgcaggaattaggcattccctatgaagaagctgcggcgttcattcagcgctactttcaaagctatcccaaagttaaagcatggatcgagaagactctcgaagaaggccgcacacgtggttacgtagagaccttatttggacgtcgccgctatgttcccgatttaaacgctcgcgtgaaatctgtccgtgaagccgccgaacgcatggcgttcaacatgcctgtacagggcacggcagctgacctcatgaaacttgcaatggtgcgcctttttccacaattgcgtgaagttggtgcccgcatgctcttgcaggtccacgatgaactcttgttagaagcgccaaaagagcgtgcggaagaggtggcagccctcgcgaaagaggttatggaaggcgtgtggcccttagcggtgcctcttgaagtcgaagttggtattggcgaggattggttggctgccaaaggataatga

SEQ ID NO: 1254 - protein, 841 aa, synthetic construct
  REGION 1..841: note = Variant of DNA polymerase I from Thermus sp. strain 2.9
MHHHHHHGGSGMLPLFEPKGRVLLVDGHHLAYRNFFALKGLTTSRGEPVQGVYGFAKSLLKALKEDGDVVIVVFDAKAPSFRHEAYEAYKAGRAPTPEDFPRQLALMKELVDLLGLERLEVPGFEADDVLATLAKKAEREGYEVQILTADRDLFQLLSPRISVLHPEGHRITPEWLWEKYGLRPEQWVDFRALAGDPSDNIPGVKGIGEKTALKLLKEWGSLENLLKNLDQVKPESVREKILAHLEDLKLSRELSRVRTDLPLEVDFRGRREPDWEGLKAFLERLEFGSLLHEFGLLESPLPAEEAPWPPPEGAFLGYRLSRPEPMWAELSALAASAQGRVYRAEDPHGALKGLKEVRGLLAKDLAVVALREGLDLPPTDDPMLLAYLLDPSNTTPEGVARRYGGEWTEDAAKRALLAERLHANLLGRLQGEERLLWLYEEVEKPLSRVLAHMEATGVKLDVAYLEALSLEVAAEMRRLEEEVFRLAGHSFNLNSRDQLERVLFDNLGLPPIGKTEKTGKRSTSAAVLEALREVHPIVDKILQYRELAKLKGTYIDPLPALVHPKTGRLHTRFNQTATATGRLSSSDPNLQNIPVRTPLGQKIRRAFVAEEGWRLVALDYSQIELRVLAHLSGDENLIRVFQEGKDIHTQTASWMFGLSAEAIDPLMRRAAKTINFGVLYGMSAHRLSQELGIPYEEAAAFIQRYFQSYPKVKAWIEKTLEEGRTRGYVETLFGRRRYVPDLNARVKSVREAAERMAFNMPVQGTAADLMKLAMVRLFPQLREVGARMLLQVHDELLLEAPKERAEEVAALAKEVMEGVWPLAVPLEVEVGIGEDWLAAKG

SEQ ID NO: 1255 - DNA, 2529 bp, synthetic construct
  misc_feature 1..2529: note = Variant of DNA polymerase I from Thermus sp. strain 2.9
  source 1..2529: mol_type = other DNA
atgcaccatcatcatcatcatggcggtagcggcatgttaccgttgttcgaacctaaaggtcgcgtgcttctggttgatggccatcatctcgcgtatcgtaacttctttgccctgaaaggattaaccaccagccgtggcgagccggtacagggtgtctacggctttgcaaagtcgctcctgaaagctctgaaagaagacggtgatgtggtgattgttgtctttgatgcgaaagcgccaagttttcgccacgaagcgtacgaagcttacaaagccgggcgtgctccaacgccggaagactttcctcgccaattggcgcttatgaaggaattagtggatttgcttggcctcgaacgcttggaagttcccggtttcgaggcagacgacgtattagcgactctcgcaaagaaagccgaacgtgagggctatgaagtccagatcttgacagcagatcgcgatcttttccagcttttatctccgcgcatctcggtgttacacccggaagggcatcgtatcaccccggaatggctctgggagaaatatggtttgcgtcccgaacaatgggtggattttcgcgccttagcaggcgatccgagcgacaatattccgggagttaaaggtatcggcgagaagacggcgctcaagctccttaaagaatgggggtcgttggagaacttgcttaagaatttagatcaggtcaaaccagagtcagtgcgtgagaagattcttgcacacctcgaagacctcaaattaagccgcgaattgtcccgtgtacgcaccgatttgccgctcgaagttgatttccgtggtcgccgcgaacctgactgggagggtcttaaagcgtttttagagcgtcttgaatttggttcgctcttgcatgaattcggccttttagaaagcccgttaccagccgaagaagcaccttggccaccgcccgaaggcgcgtttttaggttaccgtttgagtcgcccggaaccgatgtgggccgaattactggctcttgcagcgtctgcccaggagcgtgtgtatcgcgcggaagaccctcatggtgcgctcaagggcctcaaagaagtccgtggactccttgccaaagacttagctgttgttgcattgcgcgaaggtcttgatttacctccgactgatgatccaatgcttcttgcgtacctcttggacccgtcaaacacgacgcccgaaggcgtagcccgtcgttacggcggcgagtggaccgaagatgcaggcgagcgcgcgttattggccgaacgtttgcacgccaatttattaggacgtttgcaaggcgaggaacgtctcctctggctttacgaagaagtggagaaaccattgagtcgcgtgctcgcgcatatggaagctaccggtgtcaaattagacgtggcgtatttggaggctctcagccttgaagttgctgccgaaatgcgccgcttggaggaagaagtattccgtttagcaggccactcctttaaccttaattctcgcgatcagttagaacgtgtgttgttcgatgagcttggtctccctcctatcggcaagacagagaagaccggtaaacgtagcacttcagcggcggttttagaagctcttcgcgaagtccatcccattgtggacaagatcttgcagtaccgcgaactcgcgaaattgaaaggcacctatattgaccctcttccggcattagtccacccgaaaacgggacgcctccatacccgcttcaaccaaacagccacggcgaccggtcgtttgtcctcctctgatccaaaccttcagaatattccagtacgtaccccattgggccagaagatccgccgcgcgtttgtagctgaggagggttggcgtttagtggccctcgattatagccaaattgaattacgtgtccttgcccatctttctggcgatgagaacctcatccgcgtgtttcaggaaggcaaagacattcacactcaaacggcaagctggatgtttggattatcagctgaagcgatcgatcctttgatgcgtcgtgcagcgaagaccgttaatttcggtgttctctacggtatgagtgcccatcgtttgtcgcaggaattaggcattccctatgaagaagctgtcgcgttcattcagcgctactttcaaagctatcccaaagttaaagcatggatcgagaagactctcgaagaaggccgcacacgtggttacgtagagaccttatttggacgtcgccgctatgttcccgatttaaacgctcgcgtgaaatctgtccgtgaagccgccgaacgcatggcgttcaacatgcctgtacagggcacggcagctgacctcatgaaacttgcaatggtgcgcctttttccacaattgcgtgaagttggtgcccgcatgctcttgcaggtccacgatgaactcttgttagaagcgccaaaagagcgtgcggaagaggtggcagccctcgcgaaagaggttatggaaggcgtgtggcccttagcggtgcctcttgaagtcgaagttggtattggcgaggattggttggctgccaaaggataatga

SEQ ID NO: 1256 - protein, 841 aa, synthetic construct
  REGION 1..841: note = Variant of DNA polymerase I from Thermus sp. strain 2.9
MHHHHHHGGSGMLPLFEPKGRVLLVDGHHLAYRNFFALKGLTTSRGEPVQGVYGFAKSLLKALKEDGDVVIVVFDAKAPSFRHEAYEAYKAGRAPTPEDFPRQLALMKELVDLLGLERLEVPGFEADDVLATLAKKAEREGYEVQILTADRDLFQLLSPRISVLHPEGHRITPEWLWEKYGLRPEQWVDFRALAGDPSDNIPGVKGIGEKTALKLLKEWGSLENLLKNLDQVKPESVREKILAHLEDLKLSRELSRVRTDLPLEVDFRGRREPDWEGLKAFLERLEFGSLLHEFGLLESPLPAEEAPWPPPEGAFLGYRLSRPEPMWAELLALAASAQERVYRAEDPHGALKGLKEVRGLLAKDLAVVALREGLDLPPTDDPMLLAYLLDPSNTTPEGVARRYGGEWTEDAGERALLAERLHANLLGRLQGEERLLWLYEEVEKPLSRVLAHMEATGVKLDVAYLEALSLEVAAEMRRLEEEVFRLAGHSFNLNSRDQLERVLFDELGLPPIGKTEKTGKRSTSAAVLEALREVHPIVDKILQYRELAKLKGTYIDPLPALVHPKTGRLHTRFNQTATATGRLSSSDPNLQNIPVRTPLGQKIRRAFVAEEGWRLVALDYSQIELRVLAHLSGDENLIRVFQEGKDIHTQTASWMFGLSAEAIDPLMRRAAKTVNFGVLYGMSAHRLSQELGIPYEEAVAFIQRYFQSYPKVKAWIEKTLEEGRTRGYVETLFGRRRYVPDLNARVKSVREAAERMAFNMPVQGTAADLMKLAMVRLFPQLREVGARMLLQVHDELLLEAPKERAEEVAALAKEVMEGVWPLAVPLEVEVGIGEDWLAAKG

SEQ ID NO: 1257 - DNA, 2529 bp, synthetic construct
  misc_feature 1..2529: note = Variant of DNA polymerase I from Thermus sp. strain 2.9
  source 1..2529: mol_type = other DNA
atgcaccatcatcatcatcatggcggtagcggcatgttaccgttgttcgaacctaaaggtcgcgtgcttctggttgatggccatcatctcgcgtatcgtaacttctttgccctgaaaggattaaccaccagccgtggcgagccggtacagggtgtctacggctttgcaaagtcgctcctgaaagctctgaaagaagacggtgatgtggtgattgttgtctttgatgcgaaagcgccaagttttcgccacgaagcgtacgaagcttacaaagccgggcgtgctccaacgccggaagactttcctcgccaattggcgcttatgaaggaattagtggatttgcttggcctcgaacgcttggaagttcccggtttcgaggcagacgacgtattagcgactctcgcaaagaaagccgaacgtgagggctatgaagtccagatcttgacagcagatcgcgatcttttccagcttttatctccgcgcatctcggtgttacacccggaagggcatcgtatcaccccggaatggctctgggagaaatatggtttgcgtcccgaacaatgggtggattttcgcgccttagcaggcgatccgagcgacaatattccgggagttaaaggtatcggcgagaagacggcgctcaagctccttaaagaatgggggtcgttggagaacttgcttaagaatttagatcaggtcaaaccagagtcagtgcgtgagaagattcttgcacacctcgaagacctcaaattaagccgcgaattgtcccgtgtacgcaccgatttgccgctcgaagttgatttccgtggccgccgcgaacctgactgggagggtcttaaagcgtttttagagcgtcttgaatttggttcgctcttgcatgaattcggccttttagaaagcccgttaccagccgaagaagcaccttggccaccgcccgaaggcgcgtttttaggttaccgtttgagtcgcccggaaccgatgtgggccgaattatcggctcttgcagcgtctgcccagggacgtgtgtatcgcgcggaagaccctcatggtgcgctccgtggcctcaaagaagtccgtggactccttgccaaagacttagctgttgttgcattgcgcgaaggtcttgatttacctccgactgatgatccaatgcttcttgcgtacctcttggacccgtcaaacacgacgcccgaaggcgtagcccgtcgttacggcggcgagtggaccgaagatgcagctgagcgcgcgttattggccgaacgtttgcacgccaatttattaggacgtttgcaaggcgaggaacgtctcctctggctttacgaagaagtggagaaaccattgagtcgcgtgctcgcgcatatggaagctaccggtgtcaaattagacgtggcgtatttggagaacctcagccttgaagttgctgccgaaatgcgccgcttggaggaagaagtattccgtttagcaggccactcctttaaccttaattctcgcgatcagttagaacgtgtgttgttcgatgaacttggtctccctcctatcggcaagacagagaagaccggtaaacgtagcacttcagcggcggttttagaagctcttcgcgaagtccatcccattgtggacaagatcttgcagtaccgcgaactcgcgaaattgaaaggcacctatattgaccctcttccggcattagtccacccgaaaacgggacgcctccatacccgcttcaaccaaacagccacggcgaccggtcgtttgtcctcctctgatccaaaccttcagaatattccagtacgtaccccattgggccagaagatccgccgcgcgtttgtagctgaggagggttggcgtttagtggccctcgattatagccaaattgaattacgtgtccttgcccatctttctggcgatgagaacctcatccgcgtgtttcaggaaggcaaagacattcacactcaaacggcaagctggatgtttggattatcagcagaagcgatcgatcctttgatgcgtcgtgcagcgaagaccattaatttcggtgttctctacggtatgagtgcccatcgtttgtcgcaggaattaggcattccctatgaagaagctgccgcgttcattcagaagtactttcaaagctatcccaaagttaaagcatggatcgagaagactctcgaagaaggccgcacacgtggttacgtagagaccttatttggacgtcgccgctatgttcccgatttaaacgctcgcgtgaaatctgtccgtgaagccgccgaacgcatggcgttcaacatgcctgtacagggcacggcagctgacctcatgaaacttgcaatggtgcgcctttttccacaattgcgtgaagttggtgcccgcatgctcttgcaggtccacgatgaactcttgttagaagcgccaaaagagcgtgcggaagaggtggcagccctcgcgaaagaggttatggaaggcgtgtggcccttagcggtgcctcttgaagtcgaagttggtattggcgaggattggttggctgccaaaggataatga

SEQ ID NO: 1258 - protein, 841 aa, synthetic construct
  REGION 1..841: note = Variant of DNA polymerase I from Thermus sp. strain 2.9
MHHHHHHGGSGMLPLFEPKGRVLLVDGHHLAYRNFFALKGLTTSRGEPVQGVYGFAKSLLKALKEDGDVVIVVFDAKAPSFRHEAYEAYKAGRAPTPEDFPRQLALMKELVDLLGLERLEVPGFEADDVLATLAKKAEREGYEVQILTADRDLFQLLSPRISVLHPEGHRITPEWLWEKYGLRPEQWVDFRALAGDPSDNIPGVKGIGEKTALKLLKEWGSLENLLKNLDQVKPESVREKILAHLEDLKLSRELSRVRTDLPLEVDFRGRREPDWEGLKAFLERLEFGSLLHEFGLLESPLPAEEAPWPPPEGAFLGYRLSRPEPMWAELSALAASAQGRVYRAEDPHGALRGLKEVRGLLAKDLAVVALREGLDLPPTDDPMLLAYLLDPSNTTPEGVARRYGGEWTEDAAERALLAERLHANLLGRLQGEERLLWLYEEVEKPLSRVLAHMEATGVKLDVAYLENLSLEVAAEMRRLEEEVFRLAGHSFNLNSRDQLERVLFDELGLPPIGKTEKTGKRSTSAAVLEALREVHPIVDKILQYRELAKLKGTYIDPLPALVHPKTGRLHTRFNQTATATGRLSSSDPNLQNIPVRTPLGQKIRRAFVAEEGWRLVALDYSQIELRVLAHLSGDENLIRVFQEGKDIHTQTASWMFGLSAEAIDPLMRRAAKTINFGVLYGMSAHRLSQELGIPYEEAAAFIQKYFQSYPKVKAWIEKTLEEGRTRGYVETLFGRRRYVPDLNARVKSVREAAERMAFNMPVQGTAADLMKLAMVRLFPQLREVGARMLLQVHDELLLEAPKERAEEVAALAKEVMEGVWPLAVPLEVEVGIGEDWLAAKG

SEQ ID NO: 1259 - DNA, 2529 bp, synthetic construct
  misc_feature 1..2529: note = Variant of DNA polymerase I from Thermus sp. strain 2.9
  source 1..2529: mol_type = other DNA
atgcaccatcatcatcatcatggcggtagcggcatgttaccgttgttcgaacctaaaggtcgcgtgcttctggttgatggccatcatctcgcgtatcgtaacttctttgccctgaaaggattaaccaccagccgtggcgagccggtacagggtgtctacggctttgcaaagtcgctcctgaaagctctgaaagaagacggtgatgtggtgattgttgtctttgatgcgaaagcgccaagttttcgccacgaagcgtacgaagcttacaaagccgggcgtgctccaacgccggaagactttcctcgccaattggcgcttatgaaggaattagtggatttgcttggcctcgaacgcttggaagttcccggtttcgaggcagacgacgtattagcgactctcgcaaagaaagccgaacgtgagggctatgaagtccagatcttgacagcagatcgcgatcttttccagcttttatctccgcgcatctcggtgttacacccggaagggcatcgtatcaccccggaatggctctgggagaaatatggtttgcgtcccgaacaatgggtggattttcgcgccttagcaggcgatccgagcgacaatattccgggagttaaaggtatcggcgagaagacggcgctcaagctccttaaagaatgggggtcgttggagaacttgcttaagaatttagatcaggtcaaaccagagtcagtgcgtgagaagattcttgcacacctcgaagacctcaaattaagccgcgaattgtcccgtgtacgcaccgatttgccgctcgaagttgatttccgtggccgccgcgaacctgactgggagggtcttaaagcgtttttagagcgtcttgaatttggttcgctcttgcatgaattcggccttttagaaagcccgttaccagccgaagaagcaccttggccaccgcccgaaggcgcgtttttaggttaccgtttgagtcgcccggaaccgatgtgggccgaattatcggctcttgcagcgtctgcccagggacgtgtgtatcgcgcggaagaccctcatggtgcgctccgcggcctcaaagaagtccgtggactccttgccaaagacttagctgttgttgcattgcgcgaaggtcttgatttacctccgactgatgatccaatgcttcttgcgtacctcttggacccgtcaaacacgacgcccgaaggcgtagcccgtcgttacggcggcgagtggaccgaagatgcaggcgagcgcgcgttattggccgaacgtttgcacgccaatttattaggacgtttgcaaggcgaggaacgtctcctctggctttacgaagaagtggagaaaccattgagtcgcgtgctcgcgcatatggaagctaccggtgtcaaattagacgtggcgtatttggaggctctcagccttgaagttgctgccgaaatgcgccgcttggaggaagaagtattccgtttagcaggccactcctttaaccttaattctcgcgatcagttagaacgtgtgttgttcgatgaacttggtctccctcctatcggcaagacagagaagaccggtaaacgtagcacttcagcggcggttttagaagctcttcgcgaagtccatcccattgtggacaagatcttgcagtaccgcgaactcgcgaaattgaaaggcacctatattgaccctcttccggcattagtccacccgaaaacgggacgcctccatacccgcttcaaccaaacagccacggcgaccggtcgtttgtcctcctctgatccaaaccttcagaatattccagtacgtaccccattgggccagaagatccgccgcgcgtttgtagctgaggagggttggcgtttagtggccctcgattatagccaaattgaattacgtgtccttgcccatctttctggcgatgagaacctcatccgcgtgtttcaggaaggcaaagacattcacactcaaacggcaagctggatgtttggattatcaccagaagcgatcgatcctttgatgcgtcgtgcagcgaagaccgttaatttcggtgttctctacggtatgagtgcccatcgtttgtcgcaggaattaggcattccctatgaagaagctgtcgcgttcattcagcgctactttcaaagctatcccaaagttaaagcatggatcgagaagactctcgaagaaggccgcacacgtggttacgtagagaccttatttggacgtcgccgctatgttcccgatttaaacgctcgcgtgaaatctgtccgtgaagccgccgaacgcatggcgttcaacatgcctgtacagggcacggcagctgacctcatgaaacttgcaatggtgcgcctttttccacaattgcgtgaagttggtgcccgcatgctcttgcaggtccacgatgaactcttgttagaagcgccaaaagagcgtgcggaagaggtggcagccctcgcgaaagaggttatggaaggcgtgtggcccttagcggtgcctcttgaagtcgaagttggtattggcgaggattggttggctgccaaaggataatga

SEQ ID NO: 1260 - protein, 841 aa, synthetic construct
  REGION 1..841: note = Variant of DNA polymerase I from Thermus sp. strain 2.9
MHHHHHHGGSGMLPLFEPKGRVLLVDGHHLAYRNFFALKGLTTSRGEPVQGVYGFAKSLLKALKEDGDVVIVVFDAKAPSFRHEAYEAYKAGRAPTPEDFPRQLALMKELVDLLGLERLEVPGFEADDVLATLAKKAEREGYEVQILTADRDLFQLLSPRISVLHPEGHRITPEWLWEKYGLRPEQWVDFRALAGDPSDNIPGVKGIGEKTALKLLKEWGSLENLLKNLDQVKPESVREKILAHLEDLKLSRELSRVRTDLPLEVDFRGRREPDWEGLKAFLERLEFGSLLHEFGLLESPLPAEEAPWPPPEGAFLGYRLSRPEPMWAELSALAASAQGRVYRAEDPHGALRGLKEVRGLLAKDLAVVALREGLDLPPTDDPMLLAYLLDPSNTTPEGVARRYGGEWTEDAGERALLAERLHANLLGRLQGEERLLWLYEEVEKPLSRVLAHMEATGVKLDVAYLEALSLEVAAEMRRLEEEVFRLAGHSFNLNSRDQLERVLFDELGLPPIGKTEKTGKRSTSAAVLEALREVHPIVDKILQYRELAKLKGTYIDPLPALVHPKTGRLHTRFNQTATATGRLSSSDPNLQNIPVRTPLGQKIRRAFVAEEGWRLVALDYSQIELRVLAHLSGDENLIRVFQEGKDIHTQTASWMFGLSPEAIDPLMRRAAKTVNFGVLYGMSAHRLSQELGIPYEEAVAFIQRYFQSYPKVKAWIEKTLEEGRTRGYVETLFGRRRYVPDLNARVKSVREAAERMAFNMPVQGTAADLMKLAMVRLFPQLREVGARMLLQVHDELLLEAPKERAEEVAALAKEVMEGVWPLAVPLEVEVGIGEDWLAAKG

SEQ ID NO: 1261 - DNA, 2529 bp, synthetic construct
  misc_feature 1..2529: note = Variant of DNA polymerase I from Thermus sp. strain 2.9
  source 1..2529: mol_type = other DNA
atgcaccatcatcatcatcatggcggtagcggcatgttaccgttgttcgaacctaaaggtcgcgtgcttctggttgatggccatcatctcgcgtatcgtaacttctttgccctgaaaggattaaccaccagccgtggcgagccggtacagggtgtctacggctttgcaaagtcgctcctgaaagctctgaaagaagacggtgatgtggtgattgttgtctttgatgcgaaagcgccaagttttcgccacgaagcgtacgaagcttacaaagccgggcgtgctccaacgccggaagactttcctcgccaattggcgcttatgaaggaattagtggatttgcttggcctcgaacgcttggaagttcccggtttcgaggcagacgacgtattagcgactctcgcaaagaaagccgaacgtgagggctatgaagtccagatcttgacagcagatcgcgatcttttccagcttttatctccgcgcatctcggtgttacacccggaagggcatcgtatcaccccggaatggctctgggagaaatatggtttgcgtcccgaacaatgggtggattttcgcgccttagcaggcgatccgagcgacaatattccgggagttaaaggtatcggcgagaagacggcgctcaagctccttaaagaatgggggtcgttggagaacttgcttaagaatttagatcaggtcaaaccagagtcagtgcgtgagaagattcttgcacacctcgaagacctcaaattaagcctggaattgtcccgtgtacgcaccgatttgccgctcgaagttgatttccgtggccgccgcgaacctgactgggagggtcttaaagcgtttttagagcgtcttgaatttggttcgctcttgcatgaattcggccttttagaaagcccgttaccagccgaagaagcaccttggccaccgcccgaaggcgcgtttttaggttaccgtttgagtcgcccggaaccgatgtgggccgaattactggctcttgcagcgtctgcccaggagcgtgtgtatcgcgcggaagaccctcatggtgcgctccgtggcctcaaagaagtccgtggactccttgccaaagacttagctgttgttgcattgcgcgaaggtcttgatttacctccgactgatgatccaatgcttcttgcgtacctcttggacccgtcaaacacgacgcccgaaggcgtagcccgtcgttacggcggcgagtggaccgaagatgcagctgagcgcgcgttattggccgaacgtttgcacgccaatttattaggacgtttgcaaggcgaggaacgtctcctctggctttacgaagaagtggagaaaccattgagtcgcgtgctcgcgcatatggaagctaccggtgtcaaattagacgtggcgtatttggagaacctcagccttgaagttgctgccgaaatgcgccgcttggaggaagaagtattccgtttagcaggccactcctttaaccttaattctcgcgatcagttagaacgtgtgttgttcgatgagcttggtctccctcctatcggcaagacagagaagaccggtaaacgtagcacttcagcggcggttttagaagctcttcgcgaagtccatcccattgtggacaagatcttgcagtaccgcgaactcgcgaaattgaaaggcacctatattgaccctcttccggcattagtccacccgaaaacgggacgcctccatacccgcttcaaccaaacagccacggcgaccggtcgtttgtcctcctctgatccaaaccttcagaatattccagtacgtaccccattgggccagaagatccgccgcgcgtttgtagctgaggagggttggcgtttagtggccctcgattatagccaaattgaattacgtgtccttgcccatctttctggcgatgagaacctcatccgcgtgtttcaggaaggcaaagacattcacactcaaacggcaagctggatgtttggattatcagcagaagcgatcgatcctttgatgcgtcgtgcagcgaagaccgttaatttcggtgttctctacggtatgagtgcccatcgtttgtcgcaggaattaggcattccctatgaagaagctgccgcgttcattcagcgctactttcaaagctatcccaaagttaaagcatggatcgagaagactctcgaagaaggccgcacacgtggttacgtagagaccttatttggacgtcgccgctatgttcccgatttaaacgctcgcgtgaaatctgtccgtgaagccgccgaacgcatggcgttcaacatgcctgtacagggcacggcagctgacctcatgaaacttgcaatggtgcgcctttttccacaattgcgtgaagttggtgcccgcatgctcttgcaggtccacgatgaactcttgttagaagcgccaaaagagcgtgcggaagaggtggcagccctcgcgaaagaggttatggaaggcgtgtggcccttagcggtgcctcttgaagtcgaagttggtattggcgaggattggttggctgccaaaggataatga

SEQ ID NO: 1262 - protein, 841 aa, synthetic construct
  REGION 1..841: note = Variant of DNA polymerase I from Thermus sp. strain 2.9
MHHHHHHGGSGMLPLFEPKGRVLLVDGHHLAYRNFFALKGLTTSRGEPVQGVYGFAKSLLKALKEDGDVVIVVFDAKAPSFRHEAYEAYKAGRAPTPEDFPRQLALMKELVDLLGLERLEVPGFEADDVLATLAKKAEREGYEVQILTADRDLFQLLSPRISVLHPEGHRITPEWLWEKYGLRPEQWVDFRALAGDPSDNIPGVKGIGEKTALKLLKEWGSLENLLKNLDQVKPESVREKILAHLEDLKLSLELSRVRTDLPLEVDFRGRREPDWEGLKAFLERLEFGSLLHEFGLLESPLPAEEAPWPPPEGAFLGYRLSRPEPMWAELLALAASAQERVYRAEDPHGALRGLKEVRGLLAKDLAVVALREGLDLPPTDDPMLLAYLLDPSNTTPEGVARRYGGEWTEDAAERALLAERLHANLLGRLQGEERLLWLYEEVEKPLSRVLAHMEATGVKLDVAYLENLSLEVAAEMRRLEEEVFRLAGHSFNLNSRDQLERVLFDELGLPPIGKTEKTGKRSTSAAVLEALREVHPIVDKILQYRELAKLKGTYIDPLPALVHPKTGRLHTRFNQTATATGRLSSSDPNLQNIPVRTPLGQKIRRAFVAEEGWRLVALDYSQIELRVLAHLSGDENLIRVFQEGKDIHTQTASWMFGLSAEAIDPLMRRAAKTVNFGVLYGMSAHRLSQELGIPYEEAAAFIQRYFQSYPKVKAWIEKTLEEGRTRGYVETLFGRRRYVPDLNARVKSVREAAERMAFNMPVQGTAADLMKLAMVRLFPQLREVGARMLLQVHDELLLEAPKERAEEVAALAKEVMEGVWPLAVPLEVEVGIGEDWLAAKG

SEQ ID NO: 1263 - DNA, 2529 bp, synthetic construct
  misc_feature 1..2529: note = Variant of DNA polymerase I from Thermus sp. strain 2.9
  source 1..2529: mol_type = other DNA
atgcaccatcatcatcatcatggcggtagcggcatgttaccgttgttcgaacctaaaggtcgcgtgcttctggttgatggccatcatctcgcgtatcgtaacttctttgccctgaaaggattaaccaccagccgtggcgagccggtacagggtgtctacggctttgcaaagtcgctcctgaaagctctgaaagaagacggtgatgtggtgattgttgtctttgatgcgaaagcgccaagttttcgccacgaagcgtacgaagcttacaaagccgggcgtgctccaacgccggaagactttcctcgccaattggcgcttatgaaggaattagtggatttgcttggcctcgaacgcttggaagttcccggtttcgaggcagacgacgtattagcgactctcgcaaagaaagccgaacgtgagggctatgaagtccagatcttgacagcagatcgcgatcttttccagcttttatctccgcgcatctcggtgttacacccggaagggcatcgtatcaccccggaatggctctgggagaaatatggtttgcgtcccgaacaatgggtggattttcgcgccttagcaggcgatccgagcgacaatattccgggagttaaaggtatcggcgagaagacggcgctcaagctccttaaagaatgggggtcgttggagaacttgcttaagaatttagatcaggtcaaaccagagtcagtgcgtgagaagattcttgcacacctcgaagacctcaaattaagccgcgaattgtcccgtgtacgcaccgatttgccgctcgaagttgatttccgtggccgccgcgaacctgactgggagggtcttaaagcgtttttagagcgtcttgaatttggttcgctcttgcatgaattcggccttttagaaagcccgttaccagccgaagaagcaccttggccaccgcccgaaggcgcgtttttaggttaccgtttgagtcgcccggaaccgatgtgggccgaattatcggctcttgcagcgtctgcccaggagcgtgtgtatcgcgcggaagaccctcatggtgcgctccgtggcctcaaagaagtccgtggactccttgccaaagacttagctgttgttgcattgcgcgaaggtcttgatttacctccgactgatgatccaatgcttcttgcgtacctcttggacccgtcaaacacgacgcccgaaggcgtagcccgtcgttacggcggcgagtggaccgaagatgcagctgagcgcgcgttattggccgaacgtttgcacgccaatttattaggacgtttgcaaggcgaggaacgtctcctctggctttacgaagaagtggagaaaccattgagtcgcgtgctcgcgcatatggaagctaccggtgtcaaattagacgtggcgtatttggagaacctcagccttgaagttgctgccgaaatgcgccgcttggaggaagaagtattccgtttagcaggccactcctttaaccttaattctcgcgatcagttagaacgtgtgttgttcgataaccttggtctccctcctatcggcaagacagagaagaccggtaaacgtagcacttcagcggcggttttagaagctcttcgcgaagtccatcccattgtggacaagatcttgcagtaccgcgaactcgcgaaattgaaaggcacctatattgaccctcttccggcattagtccacccgaaaacgggacgcctccatacccgcttcaaccaaacagccacggcgaccggtcgtttgtcctcctctgatccaaaccttcagaatattccagtacgtaccccattgggccagaagatccgccgcgcgtttgtagctgaggagggttggcgtttagtggccctcgattatagccaaattgaattacgtgtccttgcccatctttctggcgatgagaacctcatccgcgtgtttcaggaaggcaaagacattcacactcaaacggcaagctggatgtttggattatcagcagaagcgatcgatcctttgatgcgtcgtgcagcgaagaccatcaatttcggtgttctctacggtatgagtgcccatcgtttgtcgcaggaattaggcattccctatgaagaagctgccgcgttcattcagaagtactttcaaagctatcccaaagttaaagcatggatcgagaagactctcgaagaaggccgcacacgtggttacgtagagaccttatttggacgtcgccgctatgttcccgatttaaacgctcgcgtgaaatctgtccgtgaagccgccgaacgcatggcgttcaacatgcctgtacagggcacggcagctgacctcatgaaacttgcaatggtgcgcctttttccacaattgcgtgaagttggtgcccgcatgctcttgcaggtccacgatgaactcttgttagaagcgccaaaagagcgtgcggaagaggtggcagccctcgcgaaagaggttatggaaggcgtgtggcccttagcggtgcctcttgaagtcgaagttggtattggcgaggattggttggctgccaaaggataatga

SEQ ID NO: 1264 - protein, 841 aa, synthetic construct
  REGION 1..841: note = Variant of DNA polymerase I from Thermus sp. strain 2.9
MHHHHHHGGSGMLPLFEPKGRVLLVDGHHLAYRNFFALKGLTTSRGEPVQGVYGFAKSLLKALKEDGDVVIVVFDAKAPSFRHEAYEAYKAGRAPTPEDFPRQLALMKELVDLLGLERLEVPGFEADDVLATLAKKAEREGYEVQILTADRDLFQLLSPRISVLHPEGHRITPEWLWEKYGLRPEQWVDFRALAGDPSDNIPGVKGIGEKTALKLLKEWGSLENLLKNLDQVKPESVREKILAHLEDLKLSRELSRVRTDLPLEVDFRGRREPDWEGLKAFLERLEFGSLLHEFGLLESPLPAEEAPWPPPEGAFLGYRLSRPEPMWAELSALAASAQERVYRAEDPHGALRGLKEVRGLLAKDLAVVALREGLDLPPTDDPMLLAYLLDPSNTTPEGVARRYGGEWTEDAAERALLAERLHANLLGRLQGEERLLWLYEEVEKPLSRVLAHMEATGVKLDVAYLENLSLEVAAEMRRLEEEVFRLAGHSFNLNSRDQLERVLFDNLGLPPIGKTEKTGKRSTSAAVLEALREVHPIVDKILQYRELAKLKGTYIDPLPALVHPKTGRLHTRFNQTATATGRLSSSDPNLQNIPVRTPLGQKIRRAFVAEEGWRLVALDYSQIELRVLAHLSGDENLIRVFQEGKDIHTQTASWMFGLSAEAIDPLMRRAAKTINFGVLYGMSAHRLSQELGIPYEEAAAFIQKYFQSYPKVKAWIEKTLEEGRTRGYVETLFGRRRYVPDLNARVKSVREAAERMAFNMPVQGTAADLMKLAMVRLFPQLREVGARMLLQVHDELLLEAPKERAEEVAALAKEVMEGVWPLAVPLEVEVGIGEDWLAAKG

SEQ ID NO: 1265 - DNA, 2529 bp, synthetic construct
  misc_feature 1..2529: note = Variant of DNA polymerase I from Thermus sp. strain 2.9
  source 1..2529: mol_type = other DNA
atgcaccatcatcatcatcatggcggtagcggcatgttaccgttgttcgaacctaaaggtcgcgtgcttctggttgatggccatcatctcgcgtatcgtaacttctttgccctgaaaggattaaccaccagccgtggcgagccggtacagggtgtctacggctttgcaaagtcgctcctgaaagctctgaaagaagacggtgatgtggtgattgttgtctttgatgcgaaagcgccaagttttcgccacgaagcgtacgaagcttacaaagccgggcgtgctccaacgccggaagactttcctcgccaattggcgcttatgaaggaattagtggatttgcttggcctcgaacgcttggaagttcccggtttcgaggcagacgacgtattagcgactctcgcaaagaaagccgaacgtgagggctatgaagtccagatcttgacagcagatcgcgatcttttccagcttttatctccgcgcatctcggtgttacacccggaagggcatcgtatcaccccggaatggctctgggagaaatatggtttgcgtcccgaacaatgggtggattttcgcgccttagcaggcgatccgagcgacaatattccgggagttaaaggtatcggcgagaagacggcgctcaagctccttaaagaatgggggtcgttggagaacttgcttaagaatttagatcaggtcaaaccagagtcagtgcgtgagaagattcttgcacacctcgaagacctcaaattaagcctggaattgtcccgtgtacgcaccgatttgccgctcgaagttgatttccgtcgtcgccgcgaacctgactgggagggtcttaaagcgtttttagagcgtcttgaatttggttcgctcttgcatgaattcggccttttagaaagcccgttaccagccgaagaagcaccttggccaccgcccgaaggcgcgtttttaggttaccgtttgagtcgcccggaaccgatgtgggccgaattatcggctcttgcagcgtctgcccaggggcgtgtgtatcgcgcggaagaccctcatggtgcgctccgcggcctcaaagaagtccgtggactccttgccaaagacttagctgttgttgcattgcgcgaaggtcttgatttacctccgactgatgatccaatgcttcttgcgtacctcttggacccgtcaaacacgacgcccgaaggcgtagcccgtcgttacggcggcgagtggaccgaagatgcaggcgagcgcgcgttattggccgaacgtttgcacgccaatttattaggacgtttgcaaggcgaggaacgtctcctctggctttacgaagaagtggagaaaccattgagtcgcgtgctcgcgcatatggaagctaccggtgtcaaattagacgtggcgtatttggaggcactcagccttgaagttgctgccgaaatgcgccgcttggaggaagaagtattccgtttagcaggccactcctttaaccttaattctcgcgatcagttagaacgtgtgttgttcgataaccttggtctccctcctatcggcaagacagagaagaccggtaaacgtagcacttcagcggcggttttagaagctcttcgcgaagtccatcccattgtggacaagatcttgcagtaccgcgaactcgcgaaattgaaaggcacctatattgaccctcttccggcattagtccacccgaaaacgggacgcctccatacccgcttcaaccaaacagccacggcgaccggtcgtttgtcctcctctgatccaaaccttcagaatattccagtacgtaccccattgggccagaagatccgccgcgcgtttgtagctgaggagggttggcgtttagtggccctcgattatagccaaattgaattacgtgtccttgcccatctttctggcgatgagaacctcatccgcgtgtttcaggaaggcaaagacattcacactcaaacggcaagctggatgtttggattatcagcagaagcgatcgatcctttgatgcgtcgtgcagcgaagaccgttaatttcggtgttctctacggtatgagtgcccatcgtttgtcgcaggaattaggcattccctatgaagaagctgccgcgttcattcagcgctactttcaaagctatcccaaagttaaagcatggatcgagaagactctcgaagaaggccgcacacgtggttacgtagagaccttatttggacgtcgccgctatgttcccgatttaaacgctcgcgtgaaatctgtccgtgaagccgccgaacgcatggcgttcaacatgcctgtacagggcacggcagctgacctcatgaaacttgcaatggtgcgcctttttccacaattgcgtgaagttggtgcccgcatgctcttgcaggtccacgatgaactcttgttagaagcgccaaaagagcgtgcggaagaggtggcagccctcgcgaaagaggttatggaaggcgtgtggcccttagcggtgcctcttgaagtcgaagttggtattggcgaggattggttggctgccaaaggataatga

SEQ ID NO: 1266 - protein, 841 aa, synthetic construct
  REGION 1..841: note = Variant of DNA polymerase I from Thermus sp. strain 2.9
MHHHHHHGGSGMLPLFEPKGRVLLVDGHHLAYRNFFALKGLTTSRGEPVQGVYGFAKSLLKALKEDGDVVIVVFDAKAPSFRHEAYEAYKAGRAPTPEDFPRQLALMKELVDLLGLERLEVPGFEADDVLATLAKKAEREGYEVQILTADRDLFQLLSPRISVLHPEGHRITPEWLWEKYGLRPEQWVDFRALAGDPSDNIPGVKGIGEKTALKLLKEWGSLENLLKNLDQVKPESVREKILAHLEDLKLSLELSRVRTDLPLEVDFRRRREPDWEGLKAFLERLEFGSLLHEFGLLESPLPAEEAPWPPPEGAFLGYRLSRPEPMWAELSALAASAQGRVYRAEDPHGALRGLKEVRGLLAKDLAVVALREGLDLPPTDDPMLLAYLLDPSNTTPEGVARRYGGEWTEDAGERALLAERLHANLLGRLQGEERLLWLYEEVEKPLSRVLAHMEATGVKLDVAYLEALSLEVAAEMRRLEEEVFRLAGHSFNLNSRDQLERVLFDNLGLPPIGKTEKTGKRSTSAAVLEALREVHPIVDKILQYRELAKLKGTYIDPLPALVHPKTGRLHTRFNQTATATGRLSSSDPNLQNIPVRTPLGQKIRRAFVAEEGWRLVALDYSQIELRVLAHLSGDENLIRVFQEGKDIHTQTASWMFGLSAEAIDPLMRRAAKTVNFGVLYGMSAHRLSQELGIPYEEAAAFIQRYFQSYPKVKAWIEKTLEEGRTRGYVETLFGRRRYVPDLNARVKSVREAAERMAFNMPVQGTAADLMKLAMVRLFPQLREVGARMLLQVHDELLLEAPKERAEEVAALAKEVMEGVWPLAVPLEVEVGIGEDWLAAKG

SEQ ID NO: 1267 - DNA, 2529 bp, synthetic construct
  misc_feature 1..2529: note = Variant of DNA polymerase I from Thermus sp. strain 2.9
  source 1..2529: mol_type = other DNA
atgcaccatcatcatcatcatggcggtagcggcatgttaccgttgttcgaacctaaaggtcgcgtgcttctggttgatggccatcatctcgcgtatcgtaacttctttgccctgaaaggattaaccaccagccgtggcgagccggtacagggtgtctacggctttgcaaagtcgctcctgaaagctctgaaagaagacggtgatgtggtgattgttgtctttgatgcgaaagcgccaagttttcgccacgaagcgtacgaagcttacaaagccgggcgtgctccaacgccggaagactttcctcgccaattggcgcttatgaaggaattagtggatttgcttggcctcgaacgcttggaagttcccggtttcgaggcagacgacgtattagcgactctcgcaaagaaagccgaacgtgagggctatgaagtccagatcttgacagcagatcgcgatcttttccagcttttatctccgcgcatctcggtgttacacccggaagggcatcgtatcaccccggaatggctctgggagaaatatggtttgcgtcccgaacaatgggtggattttcgcgccttagcaggcgatccgagcgacaatattccgggagttaaaggtatcggcgagaagacggcgctcaagctccttaaagaatgggggtcgttggagaacttgcttaagaatttagatcaggtcaaaccagagtcagtgcgtgagaagattcttgcacacctcgaagacctcaaattaagcctggaattgtcccgtgtacgcaccgatttgccgctcgaagttgatttccgtggtcgccgcgaacctgactgggagggtcttaaagcgtttttagagcgtcttgaatttggttcgctcttgcatgaattcggccttttagaaagcccgttaccagccgaagaagcaccttggccaccgcccgaaggcgcgtttttaggttaccgtttgagtcgcccggaaccgatgtgggccgaattactggctcttgcagcgtctgcccaggagcgtgtgtatcgcgcggaagaccctcatggtgcgctccgcggcctcaaagaagtccgtggactccttgccaaagacttagctgttgttgcattgcgcgaaggtcttgatttacctccgactgatgatccaatgcttcttgcgtacctcttggacccgtcaaacacgacgcccgaaggcgtagcccgtcgttacggcggcgagtggaccgaagatgcagctgagcgcgcgttattggccgaacgtttgcacgccaatttattaggacgtttgcaaggcgaggaacgtctcctctggctttacgaagaagtggagaaaccattgagtcgcgtgctcgcgcatatggaagctaccggtgtcaaattagacgtggcgtatttggaggcactcagccttgaagttgctgccgaaatgcgccgcttggaggaagaagtattccgtttagcaggccactcctttaaccttaattctcgcgatcagttagaacgtgtgttgttcgatgaacttggtctccctcctatcggcaagacagagaagaccggtaaacgtagcacttcagcggcggttttagaagctcttcgcgaagtccatcccattgtggacaagatcttgcagtaccgcgaactcgcgaaattgaaaggcacctatattgaccctcttccggcattagtccacccgaaaacgggacgcctccatacccgcttcaaccaaacagccacggcgaccggtcgtttgtcctcctctgatccaaaccttcagaatattccagtacgtaccccattgggccagaagatccgccgcgcgtttgtagctgaggagggttggcgtttagtggccctcgattatagccaaattgaattacgtgtccttgcccatctttctggcgatgagaacctcatccgcgtgtttcaggaaggcaaagacattcacactcaaacggcaagctggatgtttggattatcagctgaagcgatcgatcctttgatgcgtcgtgcagcgaagaccgttaatttcggtgttctctacggtatgagtgcccatcgtttgtcgcaggaattaggcattccctatgaagaagctgccgcgttcattcagaagtactttcaaagctatcccaaagttaaagcatggatcgagaagactctcgaagaaggccgcacacgtggttacgtagagaccttatttggacgtcgccgctatgttcccgatttaaacgctcgcgtgaaatctgtccgtgaagccgccgaacgcatggcgttcaacatgcctgtacagggcacggcagctgacctcatgaaacttgcaatggtgcgcctttttccacaattgcgtgaagttggtgcccgcatgctcttgcaggtccacgatgaactcttgttagaagcgccaaaagagcgtgcggaagaggtggcagccctcgcgaaagaggttatggaaggcgtgtggcccttagcggtgcctcttgaagtcgaagttggtattggcgaggattggttggctgccaaaggataatga

SEQ ID NO: 1268 - protein, 841 aa, synthetic construct
  REGION 1..841: note = Variant of DNA polymerase I from Thermus sp. strain 2.9
MHHHHHHGGSGMLPLFEPKGRVLLVDGHHLAYRNFFALKGLTTSRGEPVQGVYGFAKSLLKALKEDGDVVIVVFDAKAPSFRHEAYEAYKAGRAPTPEDFPRQLALMKELVDLLGLERLEVPGFEADDVLATLAKKAEREGYEVQILTADRDLFQLLSPRISVLHPEGHRITPEWLWEKYGLRPEQWVDFRALAGDPSDNIPGVKGIGEKTALKLLKEWGSLENLLKNLDQVKPESVREKILAHLEDLKLSLELSRVRTDLPLEVDFRGRREPDWEGLKAFLERLEFGSLLHEFGLLESPLPAEEAPWPPPEGAFLGYRLSRPEPMWAELLALAASAQERVYRAEDPHGALRGLKEVRGLLAKDLAVVALREGLDLPPTDDPMLLAYLLDPSNTTPEGVARRYGGEWTEDAAERALLAERLHANLLGRLQGEERLLWLYEEVEKPLSRVLAHMEATGVKLDVAYLEALSLEVAAEMRRLEEEVFRLAGHSFNLNSRDQLERVLFDELGLPPIGKTEKTGKRSTSAAVLEALREVHPIVDKILQYRELAKLKGTYIDPLPALVHPKTGRLHTRFNQTATATGRLSSSDPNLQNIPVRTPLGQKIRRAFVAEEGWRLVALDYSQIELRVLAHLSGDENLIRVFQEGKDIHTQTASWMFGLSAEAIDPLMRRAAKTVNFGVLYGMSAHRLSQELGIPYEEAAAFIQKYFQSYPKVKAWIEKTLEEGRTRGYVETLFGRRRYVPDLNARVKSVREAAERMAFNMPVQGTAADLMKLAMVRLFPQLREVGARMLLQVHDELLLEAPKERAEEVAALAKEVMEGVWPLAVPLEVEVGIGEDWLAAKG

SEQ ID NO: 1269 - DNA, 2529 bp, synthetic construct
  misc_feature 1..2529: note = Variant of DNA polymerase I from Thermus sp. strain 2.9
  source 1..2529: mol_type = other DNA
atgcaccatcatcatcatcatggcggtagcggcatgttaccgttgttcgaacctaaaggtcgcgtgcttctggttgatggccatcatctcgcgtatcgtaacttctttgccctgaaaggattaaccaccagccgtggcgagccggtacagggtgtctacggctttgcaaagtcgctcctgaaagctctgaaagaagacggtgatgtggtgattgttgtctttgatgcgaaagcgccaagttttcgccacgaagcgtacgaagcttacaaagccgggcgtgctccaacgccggaagactttcctcgccaattggcgcttatgaaggaattagtggatttgcttggcctcgaacgcttggaagttcccggtttcgaggcagacgacgtattagcgactctcgcaaagaaagccgaacgtgagggctatgaagtccagatcttgacagcagatcgcgatcttttccagcttttatctccgcgcatctcggtgttacacccggaagggcatcgtatcaccccggaatggctctgggagaaatatggtttgcgtcccgaacaatgggtggattttcgcgccttagcaggcgatccgagcgacaatattccgggagttaaaggtatcggcgagaagacggcgctcaagctccttaaagaatgggggtcgttggagaacttgcttaagaatttagatcaggtcaaaccagagtcagtgcgtgagaagattcttgcacacctcgaagacctcaaattaagccgcgaattgtcccgtgtacgcaccgatttgccgctcgaagttgatttccgtggccgccgcgaacctgactgggagggtcttaaagcgtttttagagcgtcttgaatttggttcgctcttgcatgaattcggccttttagaaagcccgttaccagccgaagaagcaccttggccaccgcccgaaggcgcgtttttaggttaccgtttgagtcgcccggaaccgatgtgggccgaattattggctcttgcagcgtctgcccagggacgtgtgtatcgcgcggaagaccctcatggtgcgctccgcggcctcaaagaagtccgtggactccttgccaaagacttagctgttgttgcattgcgcgaaggtcttgatttacctccgactgatgatccaatgcttcttgcgtacctcttggacccgtcaaacacgacgcccgaaggcgtagcccgtcgttacggcggcgagtggaccgaagatgcaggtaagcgcgcgttattggccgaacgtttgcacgccaatttattaggacgtttgcaaggcgaggaacgtctcctctggctttacgaagaagtggagaaaccattgagtcgcgtgctcgcgcatatggaagctaccggtgtcaaattagacgtggcgtatttggagaacctcagccttgaagttgctgccgaaatgcgccgcttggaggaagaagtattccgtttagcaggccactcctttaaccttaattctcgcgatcagttagaacgtgtgttgttcgatgaacttggtctccctcctatcggcaagacagagaagaccggtaaacgtagcacttcagcggcggttttagaagctcttcgcgaagtccatcccattgtggacaagatcttgcagtaccgcgaactcgcgaaattgaaaggcacctatattgaccctcttccggcattagtccacccgaaaacgggacgcctccatacccgcttcaaccaaacagccacggcgaccggtcgtttgtcctcctctgatccaaaccttcagaatattccagtacgtaccccattgggccagaagatccgccgcgcgtttgtagctgaggagggttggcgtttagtggccctcgattatagccaaattgaattacgtgtccttgcccatctttctggcgatgagaacctcatccgcgtgtttcaggaaggcaaagacattcacactcaaacggcaagctggatgtttggattatcagctgaagcgatcgatcctttgatgcgtcgtgcagcgaagaccatcaatttcggtgttctctacggtatgagtgcccatcgtttgtcgcaggaattaggcattccctatgaagaagctgcggcgttcattcagcgctactttcaaagctatcccaaagttaaagcatggatcgagaagactctcgaagaaggccgcacacgtggttacgtagagaccttatttggacgtcgccgctatgttcccgatttaaacgctcgcgtgaaatctgtccgtgaagccgccgaacgcatggcgttcaacatgcctgtacagggcacggcagctgacctcatgaaacttgcaatggtgcgcctttttccacaattgcgtgaagttggtgcccgcatgctcttgcaggtccacgatgaactcttgttagaagcgccaaaagagcgtgcggaagaggtggcagccctcgcgaaagaggttatggaaggcgtgtggcccttagcggtgcctcttgaagtcgaagttggtattggcgaggattggttggctgccaaaggataatga

SEQ ID NO: 1270 - protein, 841 aa, synthetic construct
  REGION 1..841: note = Variant of DNA polymerase I from Thermus sp. strain 2.9
MHHHHHHGGSGMLPLFEPKGRVLLVDGHHLAYRNFFALKGLTTSRGEPVQGVYGFAKSLLKALKEDGDVVIVVFDAKAPSFRHEAYEAYKAGRAPTPEDFPRQLALMKELVDLLGLERLEVPGFEADDVLATLAKKAEREGYEVQILTADRDLFQLLSPRISVLHPEGHRITPEWLWEKYGLRPEQWVDFRALAGDPSDNIPGVKGIGEKTALKLLKEWGSLENLLKNLDQVKPESVREKILAHLEDLKLSRELSRVRTDLPLEVDFRGRREPDWEGLKAFLERLEFGSLLHEFGLLESPLPAEEAPWPPPEGAFLGYRLSRPEPMWAELLALAASAQGRVYRAEDPHGALRGLKEVRGLLAKDLAVVALREGLDLPPTDDPMLLAYLLDPSNTTPEGVARRYGGEWTEDAGKRALLAERLHANLLGRLQGEERLLWLYEEVEKPLSRVLAHMEATGVKLDVAYLENLSLEVAAEMRRLEEEVFRLAGHSFNLNSRDQLERVLFDELGLPPIGKTEKTGKRSTSAAVLEALREVHPIVDKILQYRELAKLKGTYIDPLPALVHPKTGRLHTRFNQTATATGRLSSSDPNLQNIPVRTPLGQKIRRAFVAEEGWRLVALDYSQIELRVLAHLSGDENLIRVFQEGKDIHTQTASWMFGLSAEAIDPLMRRAAKTINFGVLYGMSAHRLSQELGIPYEEAAAFIQRYFQSYPKVKAWIEKTLEEGRTRGYVETLFGRRRYVPDLNARVKSVREAAERMAFNMPVQGTAADLMKLAMVRLFPQLREVGARMLLQVHDELLLEAPKERAEEVAALAKEVMEGVWPLAVPLEVEVGIGEDWLAAKG

SEQ ID NO: 1271 - DNA, 2529 bp, synthetic construct
  misc_feature 1..2529: note = Variant of DNA polymerase I from Thermus sp. strain 2.9
  source 1..2529: mol_type = other DNA
atgcaccatcatcatcatcatggcggtagcggcatgttaccgttgttcgaacctaaaggtcgcgtgcttctggttgatggccatcatctcgcgtatcgtaacttctttgccctgaaaggattaaccaccagccgtggcgagccggtacagggtgtctacggctttgcaaagtcgctcctgaaagctctgaaagaagacggtgatgtggtgattgttgtctttgatgcgaaagcgccaagttttcgccacgaagcgtacgaagcttacaaagccgggcgtgctccaacgccggaagactttcctcgccaattggcgcttatgaaggaattagtggatttgcttggcctcgaacgcttggaagttcccggtttcgaggcagacgacgtattagcgactctcgcaaagaaagccgaacgtgagggctatgaagtccagatcttgacagcagatcgcgatcttttccagcttttatctccgcgcatctcggtgttacacccggaagggcatcgtatcaccccggaatggctctgggagaaatatggtttgcgtcccgaacaatgggtggattttcgcgccttagcaggcgatccgagcgacaatattccgggagttaaaggtatcggcgagaagacggcgctcaagctccttaaagaatgggggtcgttggagaacttgcttaagaatttagatcaggtcaaaccagagtcagtgcgtgagaagattcttgcacacctcgaagacctcaaattaagccgcgaattgtcccgtgtacgcaccgatttgccgctcgaagttgatttccgtcgtcgccgcgaacctgactgggagggtcttaaagcgtttttagagcgtcttgaatttggttcgctcttgcatgaattcggccttttagaaagcccgttaccagccgaagaagcaccttggccaccgcccgaaggcgcgtttttaggttaccgtttgagtcgcccggaaccgatgtgggccgaattactggctcttgcagcgtctgcccagggacgtgtgtatcgcgcggaagaccctcatggtgcgctccgcggcctcaaagaagtccgtggactccttgccaaagacttagctgttgttgcattgcgcgaaggtcttgatttacctccgactgatgatccaatgcttcttgcgtacctcttggacccgtcaaacacgacgcccgaaggcgtagcccgtcgttacggcggcgagtggaccgaagatgcaggcgagcgcgcgttattggccgaacgtttgcacgccaatttattaggacgtttgcaaggcgaggaacgtctcctctggctttacgaagaagtggagaaaccattgagtcgcgtgctcgcgcatatggaagctaccggtgtcaaattagacgtggcgtatttggaggcactcagccttgaagttgctgccgaaatgcgccgcttggaggaagaagtattccgtttagcaggccactcctttaaccttaattctcgcgatcagttagaacgtgtgttgttcgatgagcttggtctccctcctatcggcaagacagagaagaccggtaaacgtagcacttcagcggcggttttagaagctcttcgcgaagtccatcccattgtggacaagatcttgcagtaccgcgaactcgcgaaattgaaaggcacctatattgaccctcttccggcattagtccacccgaaaacgggacgcctccatacccgcttcaaccaaacagccacggcgaccggtcgtttgtcctcctctgatccaaaccttcagaatattccagtacgtaccccattgggccagaagatccgccgcgcgtttgtagctgaggagggttggcgtttagtggccctcgattatagccaaattgaattacgtgtccttgcccatctttctggcgatgagaacctcatccgcgtgtttcaggaaggcaaagacattcacactcaaacggcaagctggatgtttggattatcagctgaagcgatcgatcctttgatgcgtcgtgcagcgaagaccgttaatttcggtgttctctacggtatgagtgcccatcgtttgtcgcaggaattaggcattccctatgaagaagctgcggcgttcattcagcgctactttcaaagctatcccaaagttaaagcatggatcgagaagactctcgaagaaggccgcacacgtggttacgtagagaccttatttggacgtcgccgctatgttcccgatttaaacgctcgcgtgaaatctgtccgtgaagccgccgaacgcatggcgttcaacatgcctgtacagggcacggcagctgacctcatgaaacttgcaatggtgcgcctttttccacaattgcgtgaagttggtgcccgcatgctcttgcaggtccacgatgaactcttgttagaagcgccaaaagagcgtgcggaagaggtggcagccctcgcgaaagaggttatggaaggcgtgtggcccttagcggtgcctcttgaagtcgaagttggtattggcgaggattggttggctgccaaaggataatga

SEQ ID NO: 1272 - protein, 841 aa, synthetic construct
  REGION 1..841: note = Variant of DNA polymerase I from Thermus sp. strain 2.9
MHHHHHHGGSGMLPLFEPKGRVLLVDGHHLAYRNFFALKGLTTSRGEPVQGVYGFAKSLLKALKEDGDVVIVVFDAKAPSFRHEAYEAYKAGRAPTPEDFPRQLALMKELVDLLGLERLEVPGFEADDVLATLAKKAEREGYEVQILTADRDLFQLLSPRISVLHPEGHRITPEWLWEKYGLRPEQWVDFRALAGDPSDNIPGVKGIGEKTALKLLKEWGSLENLLKNLDQVKPESVREKILAHLEDLKLSRELSRVRTDLPLEVDFRRRREPDWEGLKAFLERLEFGSLLHEFGLLESPLPAEEAPWPPPEGAFLGYRLSRPEPMWAELLALAASAQGRVYRAEDPHGALRGLKEVRGLLAKDLAVVALREGLDLPPTDDPMLLAYLLDPSNTTPEGVARRYGGEWTEDAGERALLAERLHANLLGRLQGEERLLWLYEEVEKPLSRVLAHMEATGVKLDVAYLEALSLEVAAEMRRLEEEVFRLAGHSFNLNSRDQLERVLFDELGLPPIGKTEKTGKRSTSAAVLEALREVHPIVDKILQYRELAKLKGTYIDPLPALVHPKTGRLHTRFNQTATATGRLSSSDPNLQNIPVRTPLGQKIRRAFVAEEGWRLVALDYSQIELRVLAHLSGDENLIRVFQEGKDIHTQTASWMFGLSAEAIDPLMRRAAKTVNFGVLYGMSAHRLSQELGIPYEEAAAFIQRYFQSYPKVKAWIEKTLEEGRTRGYVETLFGRRRYVPDLNARVKSVREAAERMAFNMPVQGTAADLMKLAMVRLFPQLREVGARMLLQVHDELLLEAPKERAEEVAALAKEVMEGVWPLAVPLEVEVGIGEDWLAAKG

SEQ ID NO: 1273 - DNA, 2529 bp, synthetic construct
  misc_feature 1..2529: note = Variant of DNA polymerase I from Thermus sp. strain 2.9
  source 1..2529: mol_type = other DNA
atgcaccatcatcatcatcatggcggtagcggcatgttaccgttgttcgaacctaaaggtcgcgtgcttctggttgatggccatcatctcgcgtatcgtaacttctttgccctgaaaggattaaccaccagccgtggcgagccggtacagggtgtctacggctttgcaaagtcgctcctgaaagctctgaaagaagacggtgatgtggtgattgttgtctttgatgcgaaagcgccaagttttcgccacgaagcgtacgaagcttacaaagccgggcgtgctccaacgccggaagactttcctcgccaattggcgcttatgaaggaattagtggatttgcttggcctcgaacgcttggaagttcccggtttcgaggcagacgacgtattagcgactctcgcaaagaaagccgaacgtgagggctatgaagtccagatcttgacagcagatcgcgatcttttccagcttttatctccgcgcatctcggtgttacacccggaagggcatcgtatcaccccggaatggctctgggagaaatatggtttgcgtcccgaacaatgggtggattttcgcgccttagcaggcgatccgagcgacaatattccgggagttaaaggtatcggcgagaagacggcgctcaagctccttaaagaatgggggtcgttggagaacttgcttaagaatttagatcaggtcaaaccagagtcagtgcgtgagaagattcttgcacacctcgaagacctcaaattaagcctggaattgtcccgtgtacgcaccgatttgccgctcgaagttgatttccgtggccgccgcgaacctgactgggagggtcttaaagcgtttttagagcgtcttgaatttggttcgctcttgcatgaattcggccttttagaaagcccgttaccagccgaagaagcaccttggccaccgcccgaaggcgcgtttttaggttaccgtttgagtcgcccggaaccgatgtgggccgaattatcggctcttgcagcgtctgcccagggacgtgtgtatcgcgcggaagaccctcatggtgcgctccgcggcctcaaagaagtccgtggactccttgccaaagacttagctgttgttgcattgcgcgaaggtcttgatttacctccgactgatgatccaatgcttcttgcgtacctcttggacccgtcaaacacgacgcccgaaggcgtagcccgtcgttacggcggcgagtggaccgaagatgcaggtaagcgcgcgttattggccgaacgtttgcacgccaatttattaggacgtttgcaaggcgaggaacgtctcctctggctttacgaagaagtggagaaaccattgagtcgcgtgctcgcgcatatggaagctaccggtgtcaaattagacgtggcgtatttggaggcactcagccttgaagttgctgccgaaatgcgccgcttggaggaagaagtattccgtttagcaggccactcctttaaccttaattctcgcgatcagttagaacgtgtgttgttcgatgaacttggtctccctcctatcggcaagacagagaagaccggtaaacgtagcacttcagcggcggttttagaagctcttcgcgaagtccatcccattgtggacaagatcttgcagtaccgcgaactcgcgaaattgaaaggcacctatattgaccctcttccggcattagtccacccgaaaacgggacgcctccatacccgcttcaaccaaacagccacggcgaccggtcgtttgtcctcctctgatccaaaccttcagaatattccagtacgtaccccattgggccagaagatccgccgcgcgtttgtagctgaggagggttggcgtttagtggccctcgattatagccaaattgaattacgtgtccttgcccatctttctggcgatgagaacctcatccgcgtgtttcaggaaggcaaagacattcacactcaaacggcaagctggatgtttggattatcagcagaagcgatcgatcctttgatgcgtcgtgcagcgaagaccattaatttcggtgttctctacggtatgagtgcccatcgtttgtcgcaggaattaggcattccctatgaagaagctgcggcgttcattcagcgctactttcaaagctatcccaaagttaaagcatggatcgagaagactctcgaagaaggccgcacacgtggttacgtagagaccttatttggacgtcgccgctatgttcccgatttaaacgctcgcgtgaaatctgtccgtgaagccgccgaacgcatggcgttcaacatgcctgtacagggcacggcagctgacctcatgaaacttgcaatggtgcgcctttttccacaattgcgtgaagttggtgcccgcatgctcttgcaggtccacgatgaactcttgttagaagcgccaaaagagcgtgcggaagaggtggcagccctcgcgaaagaggttatggaaggcgtgtggcccttagcggtgcctcttgaagtcgaagttggtattggcgaggattggttggctgccaaaggataatga

SEQ ID NO: 1274 - protein, 841 aa, synthetic construct
  REGION 1..841: note = Variant of DNA polymerase I from Thermus sp. strain 2.9
MHHHHHHGGSGMLPLFEPKGRVLLVDGHHLAYRNFFALKGLTTSRGEPVQGVYGFAKSLLKALKEDGDVVIVVFDAKAPSFRHEAYEAYKAGRAPTPEDFPRQLALMKELVDLLGLERLEVPGFEADDVLATLAKKAEREGYEVQILTADRDLFQLLSPRISVLHPEGHRITPEWLWEKYGLRPEQWVDFRALAGDPSDNIPGVKGIGEKTALKLLKEWGSLENLLKNLDQVKPESVREKILAHLEDLKLSLELSRVRTDLPLEVDFRGRREPDWEGLKAFLERLEFGSLLHEFGLLESPLPAEEAPWPPPEGAFLGYRLSRPEPMWAELSALAASAQGRVYRAEDPHGALRGLKEVRGLLAKDLAVVALREGLDLPPTDDPMLLAYLLDPSNTTPEGVARRYGGEWTEDAGKRALLAERLHANLLGRLQGEERLLWLYEEVEKPLSRVLAHMEATGVKLDVAYLEALSLEVAAEMRRLEEEVFRLAGHSFNLNSRDQLERVLFDELGLPPIGKTEKTGKRSTSAAVLEALREVHPIVDKILQYRELAKLKGTYIDPLPALVHPKTGRLHTRFNQTATATGRLSSSDPNLQNIPVRTPLGQKIRRAFVAEEGWRLVALDYSQIELRVLAHLSGDENLIRVFQEGKDIHTQTASWMFGLSAEAIDPLMRRAAKTINFGVLYGMSAHRLSQELGIPYEEAAAFIQRYFQSYPKVKAWIEKTLEEGRTRGYVETLFGRRRYVPDLNARVKSVREAAERMAFNMPVQGTAADLMKLAMVRLFPQLREVGARMLLQVHDELLLEAPKERAEEVAALAKEVMEGVWPLAVPLEVEVGIGEDWLAAKG

SEQ ID NO: 1275 - DNA, 2529 bp, synthetic construct
  misc_feature 1..2529: note = Variant of DNA polymerase I from Thermus sp. strain 2.9
  source 1..2529: mol_type = other DNA
atgcaccatcatcatcatcatggcggtagcggcatgttaccgttgttcgaacctaaaggtcgcgtgcttctggttgatggccatcatctcgcgtatcgtaacttctttgccctgaaaggattaaccaccagccgtggcgagccggtacagggtgtctacggctttgcaaagtcgctcctgaaagctctgaaagaagacggtgatgtggtgattgttgtctttgatgcgaaagcgccaagttttcgccacgaagcgtacgaagcttacaaagccgggcgtgctccaacgccggaagactttcctcgccaattggcgcttatgaaggaattagtggatttgcttggcctcgaacgcttggaagttcccggtttcgaggcagacgacgtattagcgactctcgcaaagaaagccgaacgtgagggctatgaagtccagatcttgacagcagatcgcgatcttttccagcttttatctccgcgcatctcggtgttacacccggaagggcatcgtatcaccccggaatggctctgggagaaatatggtttgcgtcccgaacaatgggtggattttcgcgccttagcaggcgatccgagcgacaatattccgggagttaaaggtatcggcgagaagacggcgctcaagctccttaaagaatgggggtcgttggagaacttgcttaagaatttagatcaggtcaaaccagagtcagtgcgtgagaagattcttgcacacctcgaagacctcaaattaagccgcgaattgtcccgtgtacgcaccgatttgccgctcgaagttgatttccgtggccgccgcgaacctgactgggagggtcttaaagcgtttttagagcgtcttgaatttggttcgctcttgcatgaattcggccttttagaaagcccgttaccagccgaagaagcaccttggccaccgcccgaaggcgcgtttttaggttaccgtttgagtcgcccggaaccgatgtgggccgaattattggctcttgcagcgtctgcccagggacgtgtgtatcgcgcggaagaccctcatggtgcgctccgcggcctcaaagaagtccgtggactccttgccaaagacttagctgttgttgcattgcgcgaaggtcttgatttacctccgactgatgatccaatgcttcttgcgtacctcttggacccgtcaaacacgacgcccgaaggcgtagcccgtcgttacggcggcgagtggaccgaagatgcaggcgagcgcgcgttattggccgaacgtttgcacgccaatttattaggacgtttgcaaggcgaggaacgtctcctctggctttacgaagaagtggagaaaccattgagtcgcgtgctcgcgcatatggaagctaccggtgtcaaattagacgtggcgtatttggaggcactcagccttgaagttgctgccgaaatgcgccgcttggaggaagaagtattccgtttagcaggccactcctttaaccttaattctcgcgatcagttagaacgtgtgttgttcgatgaacttggtctccctcctatcggcaagacagagaagaccggtaaacgtagcacttcagcggcggttttagaagctcttcgcttggtccatcccattgtggacaagatcttgcagtaccgcgaactcgcgaaattgaaaggcacctatattgaccctcttccggcattagtccacccgaaaacgggacgcctccatacccgcttcaaccaaacagccacggcgaccggtcgtttgtcctcctctgatccaaaccttcagaatattccagtacgtaccccattgggccagaagatccgccgcgcgtttgtagctgaggagggttggcgtttagtggccctcgattatagccaaattgaattacgtgtccttgcccatctttctggcgatgagaacctcatccgcgtgtttcaggaaggcaaagacattcacactcaaacggcaagctggatgtttggattatcagctgaagcgatcgatcctttgatgcgtcgtgcagcgaagaccatcaatttcggtgttctctacggtatgagtgcccatcgtttgtcgcaggaattaggcattccctatgaagaagctgcggcgttcattcagcgctactttcaaagctatcccaaagttaaagcatggatcgagaagactctcgaagaaggccgcacacgtggttacgtagagaccttatttggacgtcgccgctatgttcccgatttaaacgctcgcgtgaaatctgtccgtgaagccgccgaacgcatggcgttcaacatgcctgtacagggcacggcagctgacctcatgaaacttgcaatggtgcgcctttttccacaattgcgtgaagttggtgcccgcatgctcttgcaggtccacgatgaactcttgttagaagcgccaaaagagcgtgcggaagaggtggcagccctcgcgaaagaggttatggaaggcgtgtggcccttagcggtgcctcttgaagtcgaagttggtattggcgaggattggttggctgccaaaggataatga

SEQ ID NO: 1276 - protein, 841 aa, synthetic construct
  REGION 1..841: note = Variant of DNA polymerase I from Thermus sp. strain 2.9
MHHHHHHGGSGMLPLFEPKGRVLLVDGHHLAYRNFFALKGLTTSRGEPVQGVYGFAKSLLKALKEDGDVVIVVFDAKAPSFRHEAYEAYKAGRAPTPEDFPRQLALMKELVDLLGLERLEVPGFEADDVLATLAKKAEREGYEVQILTADRDLFQLLSPRISVLHPEGHRITPEWLWEKYGLRPEQWVDFRALAGDPSDNIPGVKGIGEKTALKLLKEWGSLENLLKNLDQVKPESVREKILAHLEDLKLSRELSRVRTDLPLEVDFRGRREPDWEGLKAFLERLEFGSLLHEFGLLESPLPAEEAPWPPPEGAFLGYRLSRPEPMWAELLALAASAQGRVYRAEDPHGALRGLKEVRGLLAKDLAVVALREGLDLPPTDDPMLLAYLLDPSNTTPEGVARRYGGEWTEDAGERALLAERLHANLLGRLQGEERLLWLYEEVEKPLSRVLAHMEATGVKLDVAYLEALSLEVAAEMRRLEEEVFRLAGHSFNLNSRDQLERVLFDELGLPPIGKTEKTGKRSTSAAVLEALRLVHPIVDKILQYRELAKLKGTYIDPLPALVHPKTGRLHTRFNQTATATGRLSSSDPNLQNIPVRTPLGQKIRRAFVAEEGWRLVALDYSQIELRVLAHLSGDENLIRVFQEGKDIHTQTASWMFGLSAEAIDPLMRRAAKTINFGVLYGMSAHRLSQELGIPYEEAAAFIQRYFQSYPKVKAWIEKTLEEGRTRGYVETLFGRRRYVPDLNARVKSVREAAERMAFNMPVQGTAADLMKLAMVRLFPQLREVGARMLLQVHDELLLEAPKERAEEVAALAKEVMEGVWPLAVPLEVEVGIGEDWLAAKG

SEQ ID NO: 1277 - DNA, 2529 bp, synthetic construct
  misc_feature 1..2529: note = Variant of DNA polymerase I from Thermus sp. strain 2.9
  source 1..2529: mol_type = other DNA
atgcaccatcatcatcatcatggcggtagcggcatgttaccgttgttcgaacctaaaggtcgcgtgcttctggttgatggccatcatctcgcgtatcgtaacttctttgccctgaaaggattaaccaccagccgtggcgagccggtacagggtgtctacggctttgcaaagtcgctcctgaaagctctgaaagaagacggtgatgtggtgattgttgtctttgatgcgaaagcgccaagttttcgccacgaagcgtacgaagcttacaaagccgggcgtgctccaacgccggaagactttcctcgccaattggcgcttatgaaggaattagtggatttgcttggcctcgaacgcttggaagttcccggtttcgaggcagacgacgtattagcgactctcgcaaagaaagccgaacgtgagggctatgaagtccagatcttgacagcagatcgcgatcttttccagcttttatctccgcgcatctcggtgttacacccggaagggcatcgtatcaccccggaatggctctgggagaaatatggtttgcgtcccgaacaatgggtggattttcgcgccttagcaggcgatccgagcgacaatattccgggagttaaaggtatcggcgagaagacggcgctcaagctccttaaagaatgggggtcgttggagaacttgcttaagaatttagatcaggtcaaaccagagtcagtgcgtgagaagattcttgcacacctcgaagacctcaaattaagcctggaattgtcccgtgtacgcaccgatttgccgctcgaagttgatttccgtggccgccgcgaacctgactgggagggtcttaaagcgtttttagagcgtcttgaatttggttcgctcttgcatgaattcggccttttagaaagcccgttaccagccgaagaagcaccttggccaccgcccgaaggcgcgtttttaggttaccgtttgagtcgcccggaaccgatgtgggccgaattatcggctcttgcagcgtctgcccagggacgtgtgtatcgcgcggaagaccctcatggtgcgctccgcggcctcaaagaagtccgtggactccttgccaaagacttagctgttgttgcattgcgcgaaggtcttgatttacctccgactgatgatccaatgcttcttgcgtacctcttggacccgtcaaacacgacgcccgaaggcgtagcccgtcgttacggcggcgagtggaccgaagatgcagctaagcgcgcgttattggccgaacgtttgcacgccaatttattaggacgtttgcaaggcgaggaacgtctcctctggctttacgaagaagtggagaaaccattgagtcgcgtgctcgcgcatatggaagctaccggtgtcaaattagacgtggcgtatttggaggcactcagccttgaagttgctgccgaaatgcgccgcttggaggaagaagtattccgtttagcaggccactcctttaaccttaattctcgcgatcagttagaacgtgtgttgttcgatgaacttggtctccctcctatcggcaagacagagaagaccggtaaacgtagcacttcagcggcggttttagaagctcttcgcgaagtccatcccattgtggacaagatcttgcagtaccgcgaactcgcgaaattgaaaggcacctatattgaccctcttccggcattagtccacccgaaaacgggacgcctccatacccgcttcaaccaaacagccacggcgaccggtcgtttgtcctcctctgatccaaaccttcagaatattccagtacgtaccccattgggccagaagatccgccgcgcgtttgtagctgaggagggttggcgtttagtggccctcgattatagccaaattgaattacgtgtccttgcccatctttctggcgatgagaacctcatccgcgtgtttcaggaaggcaaagacattcacactcaaacggcaagctggatgtttggattatcagcagaagcgatcgatcctttgatgcgtcgtgcagcgaagaccgttaatttcggtgttctctacggtatgagtgcccatcgtttgtcgcaggaattaggcattccctatgaagaagctgcggcgttcattcagcgctactttcaaagctatcccaaagttaaagcatggatcgagaagactctcgaagaaggccgcacacgtggttacgtagagaccttatttggacgtcgccgctatgttcccgatttaaacgctcgcgtgaaatctgtccgtgaagccgccgaacgcatggcgttcaacatgcctgtacagggcacggcagctgacctcatgaaacttgcaatggtgcgcctttttccacaattgcgtgaagttggtgcccgcatgctcttgcaggtccacgatgaactcttgttagaagcgccaaaagagcgtgcggaagaggtggcagccctcgcgaaagaggttatggaaggcgtgtggcccttagcggtgcctcttgaagtcgaagttggtattggcgaggattggttggctgccaaaggataatga

SEQ ID NO: 1278 - protein, 841 aa, synthetic construct
  REGION 1..841: note = Variant of DNA polymerase I from Thermus sp. strain 2.9
MHHHHHHGGSGMLPLFEPKGRVLLVDGHHLAYRNFFALKGLTTSRGEPVQGVYGFAKSLLKALKEDGDVVIVVFDAKAPSFRHEAYEAYKAGRAPTPEDFPRQLALMKELVDLLGLERLEVPGFEADDVLATLAKKAEREGYEVQILTADRDLFQLLSPRISVLHPEGHRITPEWLWEKYGLRPEQWVDFRALAGDPSDNIPGVKGIGEKTALKLLKEWGSLENLLKNLDQVKPESVREKILAHLEDLKLSLELSRVRTDLPLEVDFRGRREPDWEGLKAFLERLEFGSLLHEFGLLESPLPAEEAPWPPPEGAFLGYRLSRPEPMWAELSALAASAQGRVYRAEDPHGALRGLKEVRGLLAKDLAVVALREGLDLPPTDDPMLLAYLLDPSNTTPEGVARRYGGEWTEDAAKRALLAERLHANLLGRLQGEERLLWLYEEVEKPLSRVLAHMEATGVKLDVAYLEALSLEVAAEMRRLEEEVFRLAGHSFNLNSRDQLERVLFDELGLPPIGKTEKTGKRSTSAAVLEALREVHPIVDKILQYRELAKLKGTYIDPLPALVHPKTGRLHTRFNQTATATGRLSSSDPNLQNIPVRTPLGQKIRRAFVAEEGWRLVALDYSQIELRVLAHLSGDENLIRVFQEGKDIHTQTASWMFGLSAEAIDPLMRRAAKTVNFGVLYGMSAHRLSQELGIPYEEAAAFIQRYFQSYPKVKAWIEKTLEEGRTRGYVETLFGRRRYVPDLNARVKSVREAAERMAFNMPVQGTAADLMKLAMVRLFPQLREVGARMLLQVHDELLLEAPKERAEEVAALAKEVMEGVWPLAVPLEVEVGIGEDWLAAKG

SEQ ID NO: 1279 - DNA, 2529 bp, synthetic construct
  misc_feature 1..2529: note = Variant of DNA polymerase I from Thermus sp. strain 2.9
  source 1..2529: mol_type = other DNA
atgcaccatcatcatcatcatggcggtagcggcatgttaccgttgttcgaacctaaaggtcgcgtgcttctggttgatggccatcatctcgcgtatcgtaacttctttgccctgaaaggattaaccaccagccgtggcgagccggtacagggtgtctacggctttgcaaagtcgctcctgaaagctctgaaagaagacggtgatgtggtgattgttgtctttgatgcgaaagcgccaagttttcgccacgaagcgtacgaagcttacaaagccgggcgtgctccaacgccggaagactttcctcgccaattggcgcttatgaaggaattagtggatttgcttggcctcgaacgcttggaagttcccggtttcgaggcagacgacgtattagcgactctcgcaaagaaagccgaacgtgagggctatgaagtccagatcttgacagcagatcgcgatcttttccagcttttatctccgcgcatctcggtgttacacccggaagggcatcgtatcaccccggaatggctctgggagaaatatggtttgcgtcccgaacaatgggtggattttcgcgccttagcaggcgatccgagcgacaatattccgggagttaaaggtatcggcgagaagacggcgctcaagctccttaaagaatgggggtcgttggagaacttgcttaagaatttagatcaggtcaaaccagagtcagtgcgtgagaagattcttgcacacctcgaagacctcaaattaagcctggaattgtcccgtgtacgcaccgatttgccgctcgaagttgatttccgtggccgccgcgaacctgactgggagggtcttaaagcgtttttagagcgtcttgaatttggttcgctcttgcatgaattcggccttttagaaagcccgttaccagccgaagaagcaccttggccaccgcccgaaggcgcgtttttaggttaccgtttgagtcgcccggaaccgatgtgggccgaattatcggctcttgcagcgtctgcccagggacgtgtgtatcgcgcggaagaccctcatggtgcgctccgcggcctcaaagaagtccgtggactccttgccaaagacttagctgttgttgcattgcgcgaaggtcttgatttacctccgactgatgatccaatgcttcttgcgtacctcttggacccgtcaaacacgacgcccgaaggcgtagcccgtcgttacggcggcgagtggaccgaagatgcaggcgagcgcgcgttattggccgaacgtttgcacgccaatttattaggacgtttgcaaggcgaggaacgtctcctctggctttacgaagaagtggagaaaccattgagtcgcgtgctcgcgcatatggaagctaccggtgtcaaattagacgtggcgtatttggaggcactcagccttgaagttgctgccgaaatgcgccgcttggaggaagaagtattccgtttagcaggccactcctttaaccttaattctcgcgatcagttagaacgtgtgttgttcgatgaacttggtctccctcctatcggcaagacagagaagaccggtaaacgtagcacttcagcggcggttttagaagctcttcgcgaagtccatcccattgtggacaagatcttgcagtaccgcgaactcgcgaaattgaaaggcacctatattgaccctcttccggcattagtccacccgaaaacgggacgcctccatacccgcttcaaccaaacagccacggcgaccggtcgtttgtcctcctctgatccaaaccttcagaatattccagtacgtaccccattgggccagaagatccgccgcgcgtttgtagctgaggagggttggcgtttagtggccctcgattatagccaaattgaattacgtgtccttgcccatctttctggcgatgagaacctcatccgcgtgtttcaggaaggcaaagacattcacactcaaacggcaagctggatgtttggattatcagctgaagcgatcgatcctttgatgcgtcgtgcagcgaagaccatcaatttcggtgttctctacggtatgagtgcccatcgtttgtcgcaggaattaggcattccctatgaagaagctgtcgcgttcattcagcgctactttcaaagctatcccaaagttaaagcatggatcgagaagactctcgaagaaggccgcacacgtggttacgtagagaccttatttggacgtcgccgctatgttcccgatttaaacgctcgcgtgaaatctgtccgtgaagccgccgaacgcatggcgttcaacatgcctgtacagggcacggcagctgacctcatgaaacttgcaatggtgcgcctttttccacaattgcgtgaagttggtgcccgcatgctcttgcaggtccacgatgaactcttgttagaagcgccaaaagagcgtgcggaagaggtggcagccctcgcgaaagaggttatggaaggcgtgtggcccttagcggtgcctcttgaagtcgaagttggtattggcgaggattggttggctgccaaaggataatga

SEQ ID NO: 1280 - protein, 841 aa, synthetic construct
  REGION 1..841: note = Variant of DNA polymerase I from Thermus sp. strain 2.9
MHHHHHHGGSGMLPLFEPKGRVLLVDGHHLAYRNFFALKGLTTSRGEPVQGVYGFAKSLLKALKEDGDVVIVVFDAKAPSFRHEAYEAYKAGRAPTPEDFPRQLALMKELVDLLGLERLEVPGFEADDVLATLAKKAEREGYEVQILTADRDLFQLLSPRISVLHPEGHRITPEWLWEKYGLRPEQWVDFRALAGDPSDNIPGVKGIGEKTALKLLKEWGSLENLLKNLDQVKPESVREKILAHLEDLKLSLELSRVRTDLPLEVDFRGRREPDWEGLKAFLERLEFGSLLHEFGLLESPLPAEEAPWPPPEGAFLGYRLSRPEPMWAELSALAASAQGRVYRAEDPHGALRGLKEVRGLLAKDLAVVALREGLDLPPTDDPMLLAYLLDPSNTTPEGVARRYGGEWTEDAGERALLAERLHANLLGRLQGEERLLWLYEEVEKPLSRVLAHMEATGVKLDVAYLEALSLEVAAEMRRLEEEVFRLAGHSFNLNSRDQLERVLFDELGLPPIGKTEKTGKRSTSAAVLEALREVHPIVDKILQYRELAKLKGTYIDPLPALVHPKTGRLHTRFNQTATATGRLSSSDPNLQNIPVRTPLGQKIRRAFVAEEGWRLVALDYSQIELRVLAHLSGDENLIRVFQEGKDIHTQTASWMFGLSAEAIDPLMRRAAKTINFGVLYGMSAHRLSQELGIPYEEAVAFIQRYFQSYPKVKAWIEKTLEEGRTRGYVETLFGRRRYVPDLNARVKSVREAAERMAFNMPVQGTAADLMKLAMVRLFPQLREVGARMLLQVHDELLLEAPKERAEEVAALAKEVMEGVWPLAVPLEVEVGIGEDWLAAKG

SEQ ID NO: 1281 - DNA, 2529 bp, synthetic construct
  misc_feature 1..2529: note = Variant of DNA polymerase I from Thermus sp. strain 2.9
  source 1..2529: mol_type = other DNA
atgcaccatcatcatcatcatggcggtagcggcatgttaccgttgttcgaacctaaaggtcgcgtgcttctggttgatggccatcatctcgcgtatcgtaacttctttgccctgaaaggattaaccaccagccgtggcgagccggtacagggtgtctacggctttgcaaagtcgctcctgaaagctctgaaagaagacggtgatgtggtgattgttgtctttgatgcgaaagcgccaagttttcgccacgaagcgtacgaagcttacaaagccgggcgtgctccaacgccggaagactttcctcgccaattggcgcttatgaaggaattagtggatttgcttggcctcgaacgcttggaagttcccggtttcgaggcagacgacgtattagcgactctcgcaaagaaagccgaacgtgagggctatgaagtccagatcttgacagcagatcgcgatcttttccagcttttatctccgcgcatctcggtgttacacccggaagggcatcgtatcaccccggaatggctctgggagaaatatggtttgcgtcccgaacaatgggtggattttcgcgccttagcaggcgatccgagcgacaatattccgggagttaaaggtatcggcgagaagacggcgctcaagctccttaaagaatgggggtcgttggagaacttgcttaagaatttagatcaggtcaaaccagagtcagtgcgtgagaagattcttgcacacctcgaagacctcaaattaagcctggaattgtcccgtgtacgcaccgatttgccgctcgaagttgatttccgtggccgccgcgaacctgactgggagggtcttaaagcgtttttagagcgtcttgaatttggttcgctcttgcatgaattcggccttttagaaagcccgttaccagccgaagaagcaccttggccaccgcccgaaggcgcgtttttaggttaccgtttgagtcgcccggaaccgatgtgggccgaattatcggctcttgcagcgtctgcccagggacgtgtgtatcgcgcggaagaccctcatggtgcgctcaagggcctcaaagaagtccgtggactccttgccaaagacttagctgttgttgcattgcgcgaaggtcttgatttacctccgactgatgatccaatgcttcttgcgtacctcttggacccgtcaaacacgacgcccgaaggcgtagcccgtcgttacggcggcgagtggaccgaagatgcagctgagcgcgcgttattggccgaacgtttgcacgccaatttattaggacgtttgcaaggcgaggaacgtctcctctggctttacgaagaagtggagaaaccattgagtcgcgtgctcgcgcatatggaagctaccggtgtcaaattagacgtggcgtatttggaggcactcagccttgaagttgctgccgaaatgcgccgcttggaggaagaagtattccgtttagcaggccactcctttaaccttaattctcgcgatcagttagaacgtgtgttgttcgataaccttggtctccctcctatcggcaagacagagaagaccggtaaacgtagcacttcagcggcggttttagaagctcttcgcgaagtccatcccattgtggacaagatcttgcagtaccgcgaactcgcgaaattgaaaggcacctatattgaccctcttccggcattagtccacccgaaaacgggacgcctccatacccgcttcaaccaaacagccacggcgaccggtcgtttgtcctcctctgatccaaaccttcagaatattccagtacgtaccccattgggccagaagatccgccgcgcgtttgtagctgaggagggttggcgtttagtggccctcgattatagccaaattgaattacgtgtccttgcccatctttctggcgatgagaacctcatccgcgtgtttcaggaaggcaaagacattcacactcaaacggcaagctggatgtttggattatcagctgaagcgatcgatcctttgatgcgtcgtgcagcgaagaccgttaatttcggtgttctctacggtatgagtgcccatcgtttgtcgcaggaattaggcattccctatgaagaagctgcggcgttcattcagcgctactttcaaagctatcccaaagttaaagcatggatcgagaagactctcgaagaaggccgcacacgtggttacgtagagaccttatttggacgtcgccgctatgttcccgatttaaacgctcgcgtgaaatctgtccgtgaagccgccgaacgcatggcgttcaacatgcctgtacagggcacggcagctgacctcatgaaacttgcaatggtgcgcctttttccacaattgcgtgaagttggtgcccgcatgctcttgcaggtccacgatgaactcttgttagaagcgccaaaagagcgtgcggaagaggtggcagccctcgcgaaagaggttatggaaggcgtgtggcccttagcggtgcctcttgaagtcgaagttggtattggcgaggattggttggctgccaaaggataatga

SEQ ID NO: 1282 - protein, 841 aa, synthetic construct
  REGION 1..841: note = Variant of DNA polymerase I from Thermus sp. strain 2.9
MHHHHHHGGSGMLPLFEPKGRVLLVDGHHLAYRNFFALKGLTTSRGEPVQGVYGFAKSLLKALKEDGDVVIVVFDAKAPSFRHEAYEAYKAGRAPTPEDFPRQLALMKELVDLLGLERLEVPGFEADDVLATLAKKAEREGYEVQILTADRDLFQLLSPRISVLHPEGHRITPEWLWEKYGLRPEQWVDFRALAGDPSDNIPGVKGIGEKTALKLLKEWGSLENLLKNLDQVKPESVREKILAHLEDLKLSLELSRVRTDLPLEVDFRGRREPDWEGLKAFLERLEFGSLLHEFGLLESPLPAEEAPWPPPEGAFLGYRLSRPEPMWAELSALAASAQGRVYRAEDPHGALKGLKEVRGLLAKDLAVVALREGLDLPPTDDPMLLAYLLDPSNTTPEGVARRYGGEWTEDAAERALLAERLHANLLGRLQGEERLLWLYEEVEKPLSRVLAHMEATGVKLDVAYLEALSLEVAAEMRRLEEEVFRLAGHSFNLNSRDQLERVLFDNLGLPPIGKTEKTGKRSTSAAVLEALREVHPIVDKILQYRELAKLKGTYIDPLPALVHPKTGRLHTRFNQTATATGRLSSSDPNLQNIPVRTPLGQKIRRAFVAEEGWRLVALDYSQIELRVLAHLSGDENLIRVFQEGKDIHTQTASWMFGLSAEAIDPLMRRAAKTVNFGVLYGMSAHRLSQELGIPYEEAAAFIQRYFQSYPKVKAWIEKTLEEGRTRGYVETLFGRRRYVPDLNARVKSVREAAERMAFNMPVQGTAADLMKLAMVRLFPQLREVGARMLLQVHDELLLEAPKERAEEVAALAKEVMEGVWPLAVPLEVEVGIGEDWLAAKG

SEQ ID NO: 1283 - DNA, 2529 bp, synthetic construct
  misc_feature 1..2529: note = Variant of DNA polymerase I from Thermus sp. strain 2.9
  source 1..2529: mol_type = other DNA
atgcaccatcatcatcatcatggcggtagcggcatgttagagttgttcgaacctaaaggtcgcgtgcttctggttgatggccatcatctcgcgtatcgtaacttctttgccctgaaaggattaaccaccagccgtggcgagccggtacagggtgtctacggctttgcaaagtcgctcctgaaagctctgaaagaagacggtgatgtggtgattgttgtctttgatgcgaaagcgccaagttttcgccacgaagcgtacgaagcttacaaagccgggcgtgctccaacgccggaagactttcctcgccaattggcgcttatgaaggaattagtggatttgcttggcctcgaacgcttggaagttcccggtttcgaggcagacgacgtattagcgactctcgcaaagaaagccgaacgtgagggctatgaagtccagatcttgacagcagatcgcgatcttttccagcttttatctccgcgcatctcggtgttacacccggaagggcatcgtatcaccccggaatggctctgggagaaatatggtttgcgtcccgaacaatgggtggattttcgcgccttagcaggcgatccgagcgacaatattccgggagttaaaggtatcggcgagaagacggcgctcaagctccttaaagaatgggggtcgttggagaacttgcttaagaatttagatcaggtcaaaccagagtcagtgcgtgagaagattcttgcacacctcgaagacctcaaattaagccgcgaattgtcccgtgtacgcaccgatttgccgctcgaagttgatttccgtggccgccgcgaacctgactgggagggtcttaaagcgtttttagagcgtcttgaatttggttcgctcttgcatgaattcggccttttagaaagcccgttaccagccgaagaagcaccttggccaccgcccgaaggcgcgtttttaggttaccgtttgagtcgcccggaaccgatgtgggccgaattattggctcttgcagcgtctgcccagggacgtgtgtatcgcgcggaagaccctcatggtgcgctccgcggcctcaaagaagtccgtggactccttgccaaagacttagctgttgttgcattgcgcgaaggtcttgatttacctccgactgatgatccaatgcttcttgcgtacctcttggacccgtcaaacacgacgcccgaaggcgtagcccgtcgttacggcggcgagtggaccgaagatgcaggcgagcgcgcgttattggccgaacgtttgcacgccaatttattaggacgtttgcaaggcgaggaacgtctcctctggctttacgaagaagtggagaaaccattgagtcgcgtgctcgcgcatatggaagctaccggtgtcaaattagacgtggcgtatttggaggcactcagccttgaagttgctgccgaaatgcgccgcttggaggaagaagtattccgtttagcaggccactcctttaaccttaattctcgcgatcagttagaacgtgtgttgttcgatgaacttggtctccctcctatcggcaagacagagaagaccggtaaacgtagcacttcagcggcggttttagaagctcttcgcgaagtccatcccattgtggacaagatcttgcagtaccgcgaactcgcgaaattgaaaggcacctatattgaccctcttccggcattagtccacccgaaaacgggacgcctccatacccgcttcaaccaaacagccacggcgaccggtcgtttgtcctcctctgatccaaaccttcagaatattccagtacgtaccccattgggccagaagatccgccgcgcgtttgtagctgaggagggttggcgtttagtggccctcgattatagccaaattgaattacgtgtccttgcccatctttctggcgatgagaacctcatccgcgtgtttcaggaaggcaaagacattcacactcaaacggcaagctggatgtttggattatcagctgaagcgatcgatcctttgatgcgtcgtgcagcgaagaccatcaatttcggtgttctctacggtatgagtgcccatcgtttgtcgcaggaattaggcattccctatgaagaagctgcggcgttcattcagcgctactttcaaagctatcccaaagttaaagcatggatcgagaagactctcgaagaaggccgcacacgtggttacgtagagaccttatttggacgtcgccgctatgttcccgatttaaacgctcgcgtgaaatctgtccgtgaagccgccgaacgcatggcgttcaacatgcctgtacagggcacggcagctgacctcatgaaacttgcaatggtgcgcctttttccacaattgcgtgaagttggtgcccgcatgctcttgcaggtccacgatgaactcttgttagaagcgccaaaagagcgtgcggaagaggtggcagccctcgcgaaagaggttatggaaggcgtgtggcccttagcggtgcctcttgaagtcgaagttggtattggcgaggattggttggctgccaaaggataatga

SEQ ID NO: 1284 - protein, 841 aa, synthetic construct
  REGION 1..841: note = Variant of DNA polymerase I from Thermus sp. strain 2.9
MHHHHHHGGSGMLELFEPKGRVLLVDGHHLAYRNFFALKGLTTSRGEPVQGVYGFAKSLLKALKEDGDVVIVVFDAKAPSFRHEAYEAYKAGRAPTPEDFPRQLALMKELVDLLGLERLEVPGFEADDVLATLAKKAEREGYEVQILTADRDLFQLLSPRISVLHPEGHRITPEWLWEKYGLRPEQWVDFRALAGDPSDNIPGVKGIGEKTALKLLKEWGSLENLLKNLDQVKPESVREKILAHLEDLKLSRELSRVRTDLPLEVDFRGRREPDWEGLKAFLERLEFGSLLHEFGLLESPLPAEEAPWPPPEGAFLGYRLSRPEPMWAELLALAASAQGRVYRAEDPHGALRGLKEVRGLLAKDLAVVALREGLDLPPTDDPMLLAYLLDPSNTTPEGVARRYGGEWTEDAGERALLAERLHANLLGRLQGEERLLWLYEEVEKPLSRVLAHMEATGVKLDVAYLEALSLEVAAEMRRLEEEVFRLAGHSFNLNSRDQLERVLFDELGLPPIGKTEKTGKRSTSAAVLEALREVHPIVDKILQYRELAKLKGTYIDPLPALVHPKTGRLHTRFNQTATATGRLSSSDPNLQNIPVRTPLGQKIRRAFVAEEGWRLVALDYSQIELRVLAHLSGDENLIRVFQEGKDIHTQTASWMFGLSAEAIDPLMRRAAKTINFGVLYGMSAHRLSQELGIPYEEAAAFIQRYFQSYPKVKAWIEKTLEEGRTRGYVETLFGRRRYVPDLNARVKSVREAAERMAFNMPVQGTAADLMKLAMVRLFPQLREVGARMLLQVHDELLLEAPKERAEEVAALAKEVMEGVWPLAVPLEVEVGIGEDWLAAKG

SEQ ID NO: 1285 - DNA, 2529 bp, synthetic construct
  misc_feature 1..2529: note = Variant of DNA polymerase I from Thermus sp. strain 2.9
  source 1..2529: mol_type = other DNA
atgcaccatcatcatcatcatggcggtagcggcatgttaccgttgttcgaacctaaaggtcgcgtgcttctggttgatggccatcatctcgcgtatcgtaacttctttgccctgaaaggattaaccaccagccgtggcgagccggtacagggtgtctacggctttgcaaagtcgctcctgaaagctctgaaagaagacggtgatgtggtgattgttgtctttgatgcgaaagcgccaagttttcgccacgaagcgtacgaagcttacaaagccgggcgtgctccaacgccggaagactttcctcgccaattggcgcttatgaaggaattagtggatttgcttggcctcgaacgcttggaagttcccggtttcgaggcagacgacgtattagcgactctcgcaaagaaagccgaacgtgagggctatgaagtccagatcttgacagcagatcgcgatcttttccagcttttatctccgcgcatctcggtgttacacccggaagggcatcgtatcaccccggaatggctctgggagaaatatggtttgcgtcccgaacaatgggtggattttcgcgccttagcaggcgatccgagcgacaatattccgggagttaaaggtatcggcgagaagacggcgctcaagctccttaaagaatgggggtcgttggagaacttgcttaagaatttagatcaggtcaaaccagagtcagtgcgtgagaagattcttgcacacctcgaagacctcaaattaagccgcgaattgtcccgtgtacgcaccgatttgccgctcgaagttgatttccgtggtcgccgcgaacctgactgggagggtcttaaagcgtttttagagcgtcttgaatttggttcgctcttgcatgaattcggccttttagaaagcccgttaccagccgaagaagcaccttggccaccgcccgaaggcgcgtttttaggttaccgtttgagtcgcccggaaccgatgtgggccgaattactggctcttgcagcgtctgcccaggggcgtgtgtatcgcgcggaagaccctcatggtgcgctccgcggcctcaaagaagtccgtggactccttgccaaagacttagctgttgttgcattgcgcgaaggtcttgatttacctccgactgatgatccaatgcttcttgcgtacctcttggacccgtcaaacacgacgcccgaaggcgtagcccgtcgttacggcggcgagtggaccgaagatgcaggtaagcgcgcgttattggccgaacgtttgcacgccaatttattaggacgtttgcaaggcgaggaacgtctcctctggctttacgaagaagtggagaaaccattgagtcgcgtgctcgcgcatatggaagctaccggtgtcaaattagacgtggcgtatttggaggctctcagccttgaagttgctgccgaaatgcgccgcttggaggaagaagtattccgtttagcaggccactcctttaaccttaattctcgcgatcagttagaacgtgtgttgttcgataaccttggtctccctcctatcggcaagacagagaagaccggtaaacgtagcacttcagcggcggttttagaagctcttcgcgaagtccatcccattgtggacaagatcttgcagtaccgcgaactcgcgaaattgaaaggcacctatattgaccctcttccggcattagtccacccgaaaacgggacgcctccatacccgcttcaaccaaacagccacggcgaccggtcgtttgtcctcctctgatccaaaccttcagaatattccagtacgtaccccattgggccagaagatccgccgcgcgtttgtagctgaggagggttggcgtttagtggccctcgattatagccaaattgaattacgtgtccttgcccatctttctggcgatgagaacctcatccgcgtgtttcaggaaggcaaagacattcacactcaaacggcaagctggatgtttggattatcagcagaagcgatcgatcctttgatgcgtcgtgcagcgaagaccattaatttcggtgttctctacggtatgagtgcccatcgtttgtcgcaggaattaggcattccctatgaagaagctgccgcgttcattcagaagtactttcaaagctatcccaaagttaaagcatggatcgagaagactctcgaagaaggccgcacacgtggttacgtagagaccttatttggacgtcgccgctatgttcccgatttaaacgctcgcgtgaaatctgtccgtgaagccgccgaacgcatggcgttcaacatgcctgtacagggcacggcagctgacctcatgaaacttgcaatggtgcgcctttttccacaattgcgtgaagttggtgcccgcatgctcttgcaggtccacgatgaactcttgttagaagcgccaaaagagcgtgcggaagaggtggcagccctcgcgaaagaggttatggaaggcgtgtggcccttagcggtgcctcttgaagtcgaagttggtattggcgaggattggttggctgccaaaggataatga

SEQ ID NO: 1286 - protein, 841 aa, synthetic construct
  REGION 1..841: note = Variant of DNA polymerase I from Thermus sp. strain 2.9
MHHHHHHGGSGMLPLFEPKGRVLLVDGHHLAYRNFFALKGLTTSRGEPVQGVYGFAKSLLKALKEDGDVVIVVFDAKAPSFRHEAYEAYKAGRAPTPEDFPRQLALMKELVDLLGLERLEVPGFEADDVLATLAKKAEREGYEVQILTADRDLFQLLSPRISVLHPEGHRITPEWLWEKYGLRPEQWVDFRALAGDPSDNIPGVKGIGEKTALKLLKEWGSLENLLKNLDQVKPESVREKILAHLEDLKLSRELSRVRTDLPLEVDFRGRREPDWEGLKAFLERLEFGSLLHEFGLLESPLPAEEAPWPPPEGAFLGYRLSRPEPMWAELLALAASAQGRVYRAEDPHGALRGLKEVRGLLAKDLAVVALREGLDLPPTDDPMLLAYLLDPSNTTPEGVARRYGGEWTEDAGKRALLAERLHANLLGRLQGEERLLWLYEEVEKPLSRVLAHMEATGVKLDVAYLEALSLEVAAEMRRLEEEVFRLAGHSFNLNSRDQLERVLFDNLGLPPIGKTEKTGKRSTSAAVLEALREVHPIVDKILQYRELAKLKGTYIDPLPALVHPKTGRLHTRFNQTATATGRLSSSDPNLQNIPVRTPLGQKIRRAFVAEEGWRLVALDYSQIELRVLAHLSGDENLIRVFQEGKDIHTQTASWMFGLSAEAIDPLMRRAAKTINFGVLYGMSAHRLSQELGIPYEEAAAFIQKYFQSYPKVKAWIEKTLEEGRTRGYVETLFGRRRYVPDLNARVKSVREAAERMAFNMPVQGTAADLMKLAMVRLFPQLREVGARMLLQVHDELLLEAPKERAEEVAALAKEVMEGVWPLAVPLEVEVGIGEDWLAAKG

SEQ ID NO: 1287 - DNA, 2529 bp, synthetic construct
  misc_feature 1..2529: note = Variant of DNA polymerase I from Thermus sp. strain 2.9
  source 1..2529: mol_type = other DNA
atgcaccatcatcatcatcatggcggtagcggcatgttaccgttgttcgaacctaaaggtcgcgtgcttctggttgatggccatcatctcgcgtatcgtaacttctttgccctgaaaggattaaccaccagccgtggcgagccggtacagggtgtctacggctttgcaaagtcgctcctgaaagctctgaaagaagacggtgatgtggtgattgttgtctttgatgcgaaagcgccaagttttcgccacgaagcgtacgaagcttacaaagccgggcgtgctccaacgccggaagactttcctcgccaattggcgcttatgaaggaattagtggatttgcttggcctcgaacgcttggaagttcccggtttcgaggcagacgacgtattagcgactctcgcaaagaaagccgaacgtgagggctatgaagtccagatcttgacagcagatcgcgatcttttccagcttttatctccgcgcatctcggtgttacacccggaagggcatcgtatcaccccggaatggctctgggagaaatatggtttgcgtcccgaacaatgggtggattttcgcgccttagcaggcgatccgagcgacaatattccgggagttaaaggtatcggcgagaagacggcgctcaagctccttaaagaatgggggtcgttggagaacttgcttaagaatttagatcaggtcaaaccagagtcagtgcgtgagaagattcttgcacacctcgaagacctcaaattaagccgcgaattgtcccgtgtacgcaccgatttgccgctcgaagttgatttccgtcgtcgccgcgaacctgactgggagggtcttaaagcgtttttagagcgtcttgaatttggttcgctcttgcatgaattcggccttttagaaagcccgttaccagccgaagaagcaccttggccaccgcccgaaggcgcgtttttaggttaccgtttgagtcgcccggaaccgatgtgggccgaattatcggctcttgcagcgtctgcccaggggcgtgtgtatcgcgcggaagaccctcatggtgcgctccgtggcctcaaagaagtccgtggactccttgccaaagacttagctgttgttgcattgcgcgaaggtcttgatttacctccgactgatgatccaatgcttcttgcgtacctcttggacccgtcaaacacgacgcccgaaggcgtagcccgtcgttacggcggcgagtggaccgaagatgcaggcgagcgcgcgttattggccgaacgtttgcacgccaatttattaggacgtttgcaaggcgaggaacgtctcctctggctttacgaagaagtggagaaaccattgagtcgcgtgctcgcgcatatggaagctaccggtgtcaaattagacgtggcgtatttggagaacctcagccttgaagttgctgccgaaatgcgccgcttggaggaagaagtattccgtttagcaggccactcctttaaccttaattctcgcgatcagttagaacgtgtgttgttcgataaccttggtctccctcctatcggcaagacagagaagaccggtaaacgtagcacttcagcggcggttttagaagctcttcgcgaagtccatcccattgtggacaagatcttgcagtaccgcgaactcgcgaaattgaaaggcacctatattgaccctcttccggcattagtccacccgaaaacgggacgcctccatacccgcttcaaccaaacagccacggcgaccggtcgtttgtcctcctctgatccaaaccttcagaatattccagtacgtaccccattgggccagaagatccgccgcgcgtttgtagctgaggagggttggcgtttagtggccctcgattatagccaaattgaattacgtgtccttgcccatctttctggcgatgagaacctcatccgcgtgtttcaggaaggcaaagacattcacactcaaacggcaagctggatgtttggattatcaccagaagcgatcgatcctttgatgcgtcgtgcagcgaagaccatcaatttcggtgttctctacggtatgagtgcccatcgtttgtcgcaggaattaggcattccctatgaagaagctgccgcgttcattcagcgctactttcaaagctatcccaaagttaaagcatggatcgagaagactctcgaagaaggccgcacacgtggttacgtagagaccttatttggacgtcgccgctatgttcccgatttaaacgctcgcgtgaaatctgtccgtgaagccgccgaacgcatggcgttcaacatgcctgtacagggcacggcagctgacctcatgaaacttgcaatggtgcgcctttttccacaattgcgtgaagttggtgcccgcatgctcttgcaggtccacgatgaactcttgttagaagcgccaaaagagcgtgcggaagaggtggcagccctcgcgaaagaggttatggaaggcgtgtggcccttagcggtgcctcttgaagtcgaagttggtattggcgaggattggttggctgccaaaggataatga

SEQ ID NO: 1288 - protein, 841 aa, synthetic construct
  REGION 1..841: note = Variant of DNA polymerase I from Thermus sp. strain 2.9
MHHHHHHGGSGMLPLFEPKGRVLLVDGHHLAYRNFFALKGLTTSRGEPVQGVYGFAKSLLKALKEDGDVVIVVFDAKAPSFRHEAYEAYKAGRAPTPEDFPRQLALMKELVDLLGLERLEVPGFEADDVLATLAKKAEREGYEVQILTADRDLFQLLSPRISVLHPEGHRITPEWLWEKYGLRPEQWVDFRALAGDPSDNIPGVKGIGEKTALKLLKEWGSLENLLKNLDQVKPESVREKILAHLEDLKLSRELSRVRTDLPLEVDFRRRREPDWEGLKAFLERLEFGSLLHEFGLLESPLPAEEAPWPPPEGAFLGYRLSRPEPMWAELSALAASAQGRVYRAEDPHGALRGLKEVRGLLAKDLAVVALREGLDLPPTDDPMLLAYLLDPSNTTPEGVARRYGGEWTEDAGERALLAERLHANLLGRLQGEERLLWLYEEVEKPLSRVLAHMEATGVKLDVAYLENLSLEVAAEMRRLEEEVFRLAGHSFNLNSRDQLERVLFDNLGLPPIGKTEKTGKRSTSAAVLEALREVHPIVDKILQYRELAKLKGTYIDPLPALVHPKTGRLHTRFNQTATATGRLSSSDPNLQNIPVRTPLGQKIRRAFVAEEGWRLVALDYSQIELRVLAHLSGDENLIRVFQEGKDIHTQTASWMFGLSPEAIDPLMRRAAKTINFGVLYGMSAHRLSQELGIPYEEAAAFIQRYFQSYPKVKAWIEKTLEEGRTRGYVETLFGRRRYVPDLNARVKSVREAAERMAFNMPVQGTAADLMKLAMVRLFPQLREVGARMLLQVHDELLLEAPKERAEEVAALAKEVMEGVWPLAVPLEVEVGIGEDWLAAKG

SEQ ID NO: 1289 - DNA, 2529 bp, synthetic construct
  misc_feature 1..2529: note = Variant of DNA polymerase I from Thermus sp. strain 2.9
  source 1..2529: mol_type = other DNA
atgcaccatcatcatcatcatggcggtagcggcatgttaccgttgttcgaacctaaaggtcgcgtgcttctggttgatggccatcatctcgcgtatcgtaacttctttgccctgaaaggattaaccaccagccgtggcgagccggtacagggtgtctacggctttgcaaagtcgctcctgaaagctctgaaagaagacggtgatgtggtgattgttgtctttgatgcgaaagcgccaagttttcgccacgaagcgtacgaagcttacaaagccgggcgtgctccaacgccggaagactttcctcgccaattggcgcttatgaaggaattagtggatttgcttggcctcgaacgcttggaagttcccggtttcgaggcagacgacgtattagcgactctcgcaaagaaagccgaacgtgagggctatgaagtccagatcttgacagcagatcgcgatcttttccagcttttatctccgcgcatctcggtgttacacccggaagggcatcgtatcaccccggaatggctctgggagaaatatggtttgcgtcccgaacaatgggtggattttcgcgccttagcaggcgatccgagcgacaatattccgggagttaaaggtatcggcgagaagacggcgctcaagctccttaaagaatgggggtcgttggagaacttgcttaagaatttagatcaggtcaaaccagagtcagtgcgtgagaagattcttgcacacctcgaagacctcaaattaagccgcgaattgtcccgtgtacgcaccgatttgccgctcgaagttgatttccgtggccgccgcgaacctgactgggagggtcttaaagcgtttttagagcgtcttgaatttggttcgctcttgcatgaattcggccttttagaaagcccgttaccagccgaagaagcaccttggccaccgcccgaaggcgcgtttttaggttaccgtttgagtcgcccggaaccgatgtgggccgaattattggctcttgcagcgtctgcccagggacgtgtgtatcgcgcggaagaccctcatggtgcgctccgcggcctcaaagaagtccgtggactccttgccaaagacttagctgttgttgcattgcgcgaaggtcttgatttacctccgactgatgatccaatgcttcttgcgtacctcttggacccgtcaaacacgacgcccgaaggcgtagcccgtcgttacggcggcgagtggaccgaagatgcaggcgagcgcgcgttattggccgaacgtttgcacgccaatttattaggacgtttgcaaggcgagaagcgtctcctctggctttacgaagaagtggagaaaccattgagtcgcgtgctcgcgcatatggaagctaccggtgtcaaattagacgtggcgtatttggaggcactcagccttgaagttgctgccgaaatgcgccgcttggaggaagaagtattccgtttagcaggccactcctttaaccttaattctcgcgatcagttagaacgtgtgttgttcgatgaacttggtctccctcctatcggcaagacagagaagaccggtaaacgtagcacttcagcggcggttttagaagctcttcgcgaagtccatcccattgtggacaagatcttgcagtaccgcgaactcgcgaaattgaaaggcacctatattgaccctcttccggcattagtccacccgaaaacgggacgcctccatacccgcttcaaccaaacagccacggcgaccggtcgtttgtcctcctctgatccaaaccttcagaatattccagtacgtaccccattgggccagaagatccgccgcgcgtttgtagctgaggagggttggcgtttagtggccctcgattatagccaaattgaattacgtgtccttgcccatctttctggcgatgagaacctcatccgcgtgtttcaggaaggcaaagacattcacactcaaacggcaagctggatgtttggattatcagctgaagcgatcgatcctttgatgcgtcgtgcagcgaagaccatcaatttcggtgttctctacggtatgagtgcccatcgtttgtcgcaggaattaggcattccctatgaagaagctgcggcgttcattcagcgctactttcaaagctatcccaaagttaaagcatggatcgagaagactctcgaagaaggccgcacacgtggttacgtagagaccttatttggacgtcgccgctatgttcccgatttaaacgctcgcgtgaaatctgtccgtgaagccgccgaacgcatggcgttcaacatgcctgtacagggcacggcagctgacctcatgaaacttgcaatggtgcgcctttttccacaattgcgtgaagttggtgcccgcatgctcttgcaggtccacgatgaactcttgttagaagcgccaaaagagcgtgcggaagaggtggcagccctcgcgaaagaggttatggaaggcgtgtggcccttagcggtgcctcttgaagtcgaagttggtattggcgaggattggttggctgccaaaggataatga

SEQ ID NO: 1290 - protein, 841 aa, synthetic construct
  REGION 1..841: note = Variant of DNA polymerase I from Thermus sp. strain 2.9
MHHHHHHGGSGMLPLFEPKGRVLLVDGHHLAYRNFFALKGLTTSRGEPVQGVYGFAKSLLKALKEDGDVVIVVFDAKAPSFRHEAYEAYKAGRAPTPEDFPRQLALMKELVDLLGLERLEVPGFEADDVLATLAKKAEREGYEVQILTADRDLFQLLSPRISVLHPEGHRITPEWLWEKYGLRPEQWVDFRALAGDPSDNIPGVKGIGEKTALKLLKEWGSLENLLKNLDQVKPESVREKILAHLEDLKLSRELSRVRTDLPLEVDFRGRREPDWEGLKAFLERLEFGSLLHEFGLLESPLPAEEAPWPPPEGAFLGYRLSRPEPMWAELLALAASAQGRVYRAEDPHGALRGLKEVRGLLAKDLAVVALREGLDLPPTDDPMLLAYLLDPSNTTPEGVARRYGGEWTEDAGERALLAERLHANLLGRLQGEKRLLWLYEEVEKPLSRVLAHMEATGVKLDVAYLEALSLEVAAEMRRLEEEVFRLAGHSFNLNSRDQLERVLFDELGLPPIGKTEKTGKRSTSAAVLEALREVHPIVDKILQYRELAKLKGTYIDPLPALVHPKTGRLHTRFNQTATATGRLSSSDPNLQNIPVRTPLGQKIRRAFVAEEGWRLVALDYSQIELRVLAHLSGDENLIRVFQEGKDIHTQTASWMFGLSAEAIDPLMRRAAKTINFGVLYGMSAHRLSQELGIPYEEAAAFIQRYFQSYPKVKAWIEKTLEEGRTRGYVETLFGRRRYVPDLNARVKSVREAAERMAFNMPVQGTAADLMKLAMVRLFPQLREVGARMLLQVHDELLLEAPKERAEEVAALAKEVMEGVWPLAVPLEVEVGIGEDWLAAKG

SEQ ID NO: 1291 - DNA, 2529 bp, synthetic construct
  misc_feature 1..2529: note = Variant of DNA polymerase I from Thermus sp. strain 2.9
  source 1..2529: mol_type = other DNA
atgcaccatcatcatcatcatggcggtagcggcatgttaccgttgttcgaacctaaaggtcgcgtgcttctggttgatggccatcatctcgcgtatcgtaacttctttgccctgaaaggattaaccaccagccgtggcgagccggtacagggtgtctacggctttgcaaagtcgctcctgaaagctctgaaagaagacggtgatgtggtgattgttgtctttgatgcgaaagcgccaagttttcgccacgaagcgtacgaagcttacaaagccgggcgtgctccaacgccggaagactttcctcgccaattggcgcttatgaaggaattagtggatttgcttggcctcgaacgcttggaagttcccggtttcgaggcagacgacgtattagcgactctcgcaaagaaagccgaacgtgagggctatgaagtccagatcttgacagcagatcgcgatcttttccagcttttatctccgcgcatctcggtgttacacccggaagggcatcgtatcaccccggaatggctctgggagaaatatggtttgcgtcccgaacaatgggtggattttcgcgccttagcaggcgatccgagcgacaatattccgggagttaaaggtatcggcgagaagacggcgctcaagctccttaaagaatgggggtcgttggagaacttgcttaagaatttagatcaggtcaaaccagagtcagtgcgtgagaagattcttgcacacctcgaagacctcaaattaagcctggaattgtcccgtgtacgcaccgatttgccgctcgaagttgatttccgtcgtcgccgcgaacctgactgggagggtcttaaagcgtttttagagcgtcttgaatttggttcgctcttgcatgaattcggccttttagaaagcccgttaccagccgaagaagcaccttggccaccgcccgaaggcgcgtttttaggttaccgtttgagtcgcccggaaccgatgtgggccgaattactggctcttgcagcgtctgcccaggggcgtgtgtatcgcgcggaagaccctcatggtgcgctccgtggcctcaaagaagtccgtggactccttgccaaagacttagctgttgttgcattgcgcgaaggtcttgatttacctccgactgatgatccaatgcttcttgcgtacctcttggacccgtcaaacacgacgcccgaaggcgtagcccgtcgttacggcggcgagtggaccgaagatgcaggcgagcgcgcgttattggccgaacgtttgcacgccaatttattaggacgtttgcaaggcgaggaacgtctcctctggctttacgaagaagtggagaaaccattgagtcgcgtgctcgcgcatatggaagctaccggtgtcaaattagacgtggcgtatttggaggctctcagccttgaagttgctgccgaaatgcgccgcttggaggaagaagtattccgtttagcaggccactcctttaaccttaattctcgcgatcagttagaacgtgtgttgttcgatgaacttggtctccctcctatcggcaagacagagaagaccggtaaacgtagcacttcagcggcggttttagaagctcttcgcgaagtccatcccattgtggacaagatcttgcagtaccgcgaactcgcgaaattgaaaggcacctatattgaccctcttccggcattagtccacccgaaaacgggacgcctccatacccgcttcaaccaaacagccacggcgaccggtcgtttgtcctcctctgatccaaaccttcagaatattccagtacgtaccccattgggccagaagatccgccgcgcgtttgtagctgaggagggttggcgtttagtggccctcgattatagccaaattgaattacgtgtccttgcccatctttctggcgatgagaacctcatccgcgtgtttcaggaaggcaaagacattcacactcaaacggcaagctggatgtttggattatcagctgaagcgatcgatcctttgatgcgtcgtgcagcgaagaccgttaatttcggtgttctctacggtatgagtgcccatcgtttgtcgcaggaattaggcattccctatgaagaagctgcggcgttcattcagcgctactttcaaagctatcccaaagttaaagcatggatcgagaagactctcgaagaaggccgcacacgtggttacgtagagaccttatttggacgtcgccgctatgttcccgatttaaacgctcgcgtgaaatctgtccgtgaagccgccgaacgcatggcgttcaacatgcctgtacagggcacggcagctgacctcatgaaacttgcaatggtgcgcctttttccacaattgcgtgaagttggtgcccgcatgctcttgcaggtccacgatgaactcttgttagaagcgccaaaagagcgtgcggaagaggtggcagccctcgcgaaagaggttatggaaggcgtgtggcccttagcggtgcctcttgaagtcgaagttggtattggcgaggattggttggctgccaaaggataatga

SEQ ID NO: 1292 - protein, 841 aa, synthetic construct
  REGION 1..841: note = Variant of DNA polymerase I from Thermus sp. strain 2.9
MHHHHHHGGSGMLPLFEPKGRVLLVDGHHLAYRNFFALKGLTTSRGEPVQGVYGFAKSLLKALKEDGDVVIVVFDAKAPSFRHEAYEAYKAGRAPTPEDFPRQLALMKELVDLLGLERLEVPGFEADDVLATLAKKAEREGYEVQILTADRDLFQLLSPRISVLHPEGHRITPEWLWEKYGLRPEQWVDFRALAGDPSDNIPGVKGIGEKTALKLLKEWGSLENLLKNLDQVKPESVREKILAHLEDLKLSLELSRVRTDLPLEVDFRRRREPDWEGLKAFLERLEFGSLLHEFGLLESPLPAEEAPWPPPEGAFLGYRLSRPEPMWAELLALAASAQGRVYRAEDPHGALRGLKEVRGLLAKDLAVVALREGLDLPPTDDPMLLAYLLDPSNTTPEGVARRYGGEWTEDAGERALLAERLHANLLGRLQGEERLLWLYEEVEKPLSRVLAHMEATGVKLDVAYLEALSLEVAAEMRRLEEEVFRLAGHSFNLNSRDQLERVLFDELGLPPIGKTEKTGKRSTSAAVLEALREVHPIVDKILQYRELAKLKGTYIDPLPALVHPKTGRLHTRFNQTATATGRLSSSDPNLQNIPVRTPLGQKIRRAFVAEEGWRLVALDYSQIELRVLAHLSGDENLIRVFQEGKDIHTQTASWMFGLSAEAIDPLMRRAAKTVNFGVLYGMSAHRLSQELGIPYEEAAAFIQRYFQSYPKVKAWIEKTLEEGRTRGYVETLFGRRRYVPDLNARVKSVREAAERMAFNMPVQGTAADLMKLAMVRLFPQLREVGARMLLQVHDELLLEAPKERAEEVAALAKEVMEGVWPLAVPLEVEVGIGEDWLAAKG

SEQ ID NO: 1293 - DNA, 2529 bp, synthetic construct
  misc_feature 1..2529: note = Variant of DNA polymerase I from Thermus sp. strain 2.9
  source 1..2529: mol_type = other DNA
atgcaccatcatcatcatcatggcggtagcggcatgttaccgttgttcgaacctaaaggtcgcgtgcttctggttgatggccatcatctcgcgtatcgtaacttctttgccctgaaaggattaaccaccagccgtggcgagccggtacagggtgtctacggctttgcaaagtcgctcctgaaagctctgaaagaagacggtgatgtggtgattgttgtctttgatgcgaaagcgccaagttttcgccacgaagcgtacgaagcttacaaagccgggcgtgctccaacgccggaagactttcctcgccaattggcgcttatgaaggaattagtggatttgcttggcctcgaacgcttggaagttcccggtttcgaggcagacgacgtattagcgactctcgcaaagaaagccgaacgtgagggctatgaagtccagatcttgacagcagatcgcgatcttttccagcttttatctccgcgcatctcggtgttacacccggaagggcatcgtatcaccccggaatggctctgggagaaatatggtttgcgtcccgaacaatgggtggattttcgcgccttagcaggcgatccgagcgacaatattccgggagttaaaggtatcggcgagaagacggcgctcaagctccttaaagaatgggggtcgttggagaacttgcttaagaatttagatcaggtcaaaccagagtcagtgcgtgagaagattcttgcacacctcgaagacctcaaattaagccgcgaattgtcccgtgtacgcaccgatttgccgctcgaagttgatttccgtggtcgccgcgaacctgactgggagggtcttaaagcgtttttagagcgtcttgaatttggttcgctcttgcatgaattcggccttttagaaagcccgttaccagccgaagaagcaccttggccaccgcccgaaggcgcgtttttaggttaccgtttgagtcgcccggaaccgatgtgggccgaattattggctcttgcagcgtctgcccagggacgtgtgtatcgcgcggaagaccctcatggtgcgctccgcggcctcaaagaagtccgtggactccttgccaaagacttagctgttgttgcattgcgcgaaggtcttgatttacctccgactgatgatccaatgcttcttgcgtacctcttggacccgtcaaacacgacgcccgaaggcgtagcccgtcgttacggcggcgagtggaccgaagatgcagctaagcgcgcgttattggccgaacgtttgcacgccaatttattaggacgtttgcaaggcgaggaacgtctcctctggctttacgaagaagtggagaaaccattgagtcgcgtgctcgcgcatatggaagctaccggtgtcaaattagacgtggcgtatttggagaacctcagccttgaagttgctgccgaaatgcgccgcttggaggaagaagtattccgtttagcaggccactcctttaaccttaattctcgcgatcagttagaacgtgtgttgttcgatgaacttggtctccctcctatcggcaagacagagaagaccggtaaacgtagcacttcagcggcggttttagaagctcttcgcgaagtccatcccattgtggacaagatcttgcagtaccgcgaactcgcgaaattgaaaggcacctatattgaccctcttccggcattagtccacccgaaaacgggacgcctccatacccgcttcaaccaaacagccacggcgaccggtcgtttgtcctcctctgatccaaaccttcagaatattccagtacgtaccccattgggccagaagatccgccgcgcgtttgtagctgaggagggttggcgtttagtggccctcgattatagccaaattgaattacgtgtccttgcccatctttctggcgatgagaacctcatccgcgtgtttcaggaaggcaaagacattcacactcaaacggcaagctggatgtttggattatcagctgaagcgatcgatcctttgatgcgtcgtgcagcgaagaccgttaatttcggtgttctctacggtatgagtgcccatcgtttgtcgcaggaattaggcattccctatgaagaagctgcggcgttcattcagcgctactttcaaagctatcccaaagttaaagcatggatcgagaagactctcgaagaaggccgcacacgtggttacgtagagaccttatttggacgtcgccgctatgttcccgatttaaacgctcgcgtgaaatctgtccgtgaagccgccgaacgcatggcgttcaacatgcctgtacagggcacggcagctgacctcatgaaacttgcaatggtgcgcctttttccacaattgcgtgaagttggtgcccgcatgctcttgcaggtccacgatgaactcttgttagaagcgccaaaagagcgtgcggaagaggtggcagccctcgcgaaagaggttatggaaggcgtgtggcccttagcggtgcctcttgaagtcgaagttggtattggcgaggattggttggctgccaaaggataatga

SEQ ID NO: 1294 - protein, 841 aa, synthetic construct
  REGION 1..841: note = Variant of DNA polymerase I from Thermus sp. strain 2.9
MHHHHHHGGSGMLPLFEPKGRVLLVDGHHLAYRNFFALKGLTTSRGEPVQGVYGFAKSLLKALKEDGDVVIVVFDAKAPSFRHEAYEAYKAGRAPTPEDFPRQLALMKELVDLLGLERLEVPGFEADDVLATLAKKAEREGYEVQILTADRDLFQLLSPRISVLHPEGHRITPEWLWEKYGLRPEQWVDFRALAGDPSDNIPGVKGIGEKTALKLLKEWGSLENLLKNLDQVKPESVREKILAHLEDLKLSRELSRVRTDLPLEVDFRGRREPDWEGLKAFLERLEFGSLLHEFGLLESPLPAEEAPWPPPEGAFLGYRLSRPEPMWAELLALAASAQGRVYRAEDPHGALRGLKEVRGLLAKDLAVVALREGLDLPPTDDPMLLAYLLDPSNTTPEGVARRYGGEWTEDAAKRALLAERLHANLLGRLQGEERLLWLYEEVEKPLSRVLAHMEATGVKLDVAYLENLSLEVAAEMRRLEEEVFRLAGHSFNLNSRDQLERVLFDELGLPPIGKTEKTGKRSTSAAVLEALREVHPIVDKILQYRELAKLKGTYIDPLPALVHPKTGRLHTRFNQTATATGRLSSSDPNLQNIPVRTPLGQKIRRAFVAEEGWRLVALDYSQIELRVLAHLSGDENLIRVFQEGKDIHTQTASWMFGLSAEAIDPLMRRAAKTVNFGVLYGMSAHRLSQELGIPYEEAAAFIQRYFQSYPKVKAWIEKTLEEGRTRGYVETLFGRRRYVPDLNARVKSVREAAERMAFNMPVQGTAADLMKLAMVRLFPQLREVGARMLLQVHDELLLEAPKERAEEVAALAKEVMEGVWPLAVPLEVEVGIGEDWLAAKG

SEQ ID NO: 1295 - DNA, 2529 bp, synthetic construct
  misc_feature 1..2529: note = Variant of DNA polymerase I from Thermus sp. strain 2.9
  source 1..2529: mol_type = other DNA
atgcaccatcatcatcatcatggcggtagcggcatgttaccgttgttcgaacctaaaggtcgcgtgcttctggttgatggccatcatctcgcgtatcgtaacttctttgccctgaaaggattaaccaccagccgtggcgagccggtacagggtgtctacggctttgcaaagtcgctcctgaaagctctgaaagaagacggtgatgtggtgattgttgtctttgatgcgaaagcgccaagttttcgccacgaagcgtacgaagcttacaaagccgggcgtgctccaacgccggaagactttcctcgccaattggcgcttatgaaggaattagtggatttgcttggcctcgaacgcttggaagttcccggtttcgaggcagacgacgtattagcgactctcgcaaagaaagccgaacgtgagggctatgaagtccagatcttgacagcagatcgcgatcttttccagcttttatctccgcgcatctcggtgttacacccggaagggcatcgtatcaccccggaatggctctgggagaaatatggtttgcgtcccgaacaatgggtggattttcgcgccttagcaggcgatccgagcgacaatattccgggagttaaaggtatcggcgagaagacggcgctcaagctccttaaagaatgggggtcgttggagaacttgcttaagaatttagatcaggtcaaaccagagtcagtgcgtgagaagattcttgcacacctcgaagacctcaaattaagccgcgaattgtcccgtgtacgcaccgatttgccgctcgaagttgatttccgtcgtcgccgcgaacctgactgggagggtcttaaagcgtttttagagcgtcttgaatttggttcgctcttgcatgaattcggccttttagaaagcccgttaccagccgaagaagcaccttggccaccgcccgaaggcgcgtttttaggttaccgtttgagtcgcccggaaccgatgtgggccgaattattggctcttgcagcgtctgcccagggacgtgtgtatcgcgcggaagaccctcatggtgcgctccgcggcctcaaagaagtccgtggactccttgccaaagacttagctgttgttgcattgcgcgaaggtcttgatttacctccgactgatgatccaatgcttcttgcgtacctcttggacccgtcaaacacgacgcccgaaggcgtagcccgtcgttacggcggcgagtggaccgaagatgcagctaagcgcgcgttattggccgaacgtttgcacgccaatttattaggacgtttgcaaggcgaggaacgtctcctctggctttacgaagaagtggagaaaccattgagtcgcgtgctcgcgcatatggaagctaccggtgtcaaattagacgtggcgtatttggaggcactcagccttgaagttgctgccgaaatgcgccgcttggaggaagaagtattccgtttagcaggccactcctttaaccttaattctcgcgatcagttagaacgtgtgttgttcgataaccttggtctccctcctatcggcaagacagagaagaccggtaaacgtagcacttcagcggcggttttagaagctcttcgcgaagtccatcccattgtggacaagatcttgcagtaccgcgaactcgcgaaattgaaaggcacctatattgaccctcttccggcattagtccacccgaaaacgggacgcctccatacccgcttcaaccaaacagccacggcgaccggtcgtttgtcctcctctgatccaaaccttcagaatattccagtacgtaccccattgggccagaagatccgccgcgcgtttgtagctgaggagggttggcgtttagtggccctcgattatagccaaattgaattacgtgtccttgcccatctttctggcgatgagaacctcatccgcgtgtttcaggaaggcaaagacattcacactcaaacggcaagctggatgtttggattatcagctgaagcgatcgatcctttgatgcgtcgtgcagcgaagaccattaatttcggtgttctctacggtatgagtgcccatcgtttgtcgcaggaattaggcattccctatgaagaagctgccgcgttcattcagaagtactttcaaagctatcccaaagttaaagcatggatcgagaagactctcgaagaaggccgcacacgtggttacgtagagaccttatttggacgtcgccgctatgttcccgatttaaacgctcgcgtgaaatctgtccgtgaagccgccgaacgcatggcgttcaacatgcctgtacagggcacggcagctgacctcatgaaacttgcaatggtgcgcctttttccacaattgcgtgaagttggtgcccgcatgctcttgcaggtccacgatgaactcttgttagaagcgccaaaagagcgtgcggaagaggtggcagccctcgcgaaagaggttatggaaggcgtgtggcccttagcggtgcctcttgaagtcgaagttggtattggcgaggattggttggctgccaaaggataatga

SEQ ID NO: 1296 - protein, 841 aa, synthetic construct
  REGION 1..841: note = Variant of DNA polymerase I from Thermus sp. strain 2.9
MHHHHHHGGSGMLPLFEPKGRVLLVDGHHLAYRNFFALKGLTTSRGEPVQGVYGFAKSLLKALKEDGDVVIVVFDAKAPSFRHEAYEAYKAGRAPTPEDFPRQLALMKELVDLLGLERLEVPGFEADDVLATLAKKAEREGYEVQILTADRDLFQLLSPRISVLHPEGHRITPEWLWEKYGLRPEQWVDFRALAGDPSDNIPGVKGIGEKTALKLLKEWGSLENLLKNLDQVKPESVREKILAHLEDLKLSRELSRVRTDLPLEVDFRRRREPDWEGLKAFLERLEFGSLLHEFGLLESPLPAEEAPWPPPEGAFLGYRLSRPEPMWAELLALAASAQGRVYRAEDPHGALRGLKEVRGLLAKDLAVVALREGLDLPPTDDPMLLAYLLDPSNTTPEGVARRYGGEWTEDAAKRALLAERLHANLLGRLQGEERLLWLYEEVEKPLSRVLAHMEATGVKLDVAYLEALSLEVAAEMRRLEEEVFRLAGHSFNLNSRDQLERVLFDNLGLPPIGKTEKTGKRSTSAAVLEALREVHPIVDKILQYRELAKLKGTYIDPLPALVHPKTGRLHTRFNQTATATGRLSSSDPNLQNIPVRTPLGQKIRRAFVAEEGWRLVALDYSQIELRVLAHLSGDENLIRVFQEGKDIHTQTASWMFGLSAEAIDPLMRRAAKTINFGVLYGMSAHRLSQELGIPYEEAAAFIQKYFQSYPKVKAWIEKTLEEGRTRGYVETLFGRRRYVPDLNARVKSVREAAERMAFNMPVQGTAADLMKLAMVRLFPQLREVGARMLLQVHDELLLEAPKERAEEVAALAKEVMEGVWPLAVPLEVEVGIGEDWLAAKG

SEQ ID NO: 1297 - DNA, 2529 bp, synthetic construct
  misc_feature 1..2529: note = Variant of DNA polymerase I from Thermus sp. strain 2.9
  source 1..2529: mol_type = other DNA
atgcaccatcatcatcatcatggcggtagcggcatgttaccgttgttcgaacctaaaggtcgcgtgcttctggttgatggccatcatctcgcgtatcgtaacttctttgccctgaaaggattaaccaccagccgtggcgagccggtacagggtgtctacggctttgcaaagtcgctcctgaaagctctgaaagaagacggtgatgtggtgattgttgtctttgatgcgaaagcgccaagttttcgccacgaagcgtacgaagcttacaaagccgggcgtgctccaacgccggaagactttcctcgccaattggcgcttatgaaggaattagtggatttgcttggcctcgaacgcttggaagttcccggtttcgaggcagacgacgtattagcgactctcgcaaagaaagccgaacgtgagggctatgaagtccagatcttgacagcagatcgcgatcttttccagcttttatctccgcgcatctcggtgttacacccggaagggcatcgtatcaccccggaatggctctgggagaaatatggtttgcgtcccgaacaatgggtggattttcgcgccttagcaggcgatccgagcgacaatattccgggagttaaaggtatcggcgagaagacggcgctcaagctccttaaagagtgggggtcgttggagaacttgcttaagaatttagatcaggtcaaaccagagtcagtgcgtgagaagattcttgcacacctcgaagacctcaaattaagccgcgaattgtcccgtgtacgcaccgatttgccgctcgaagttgatttccgtggccgccgcgaacctgactgggagggtcttaaagcgtttttagagcgtcttgaatttggttcgctcttgcatgaattcggccttttagaaagcccgttaccagccgaagaagcaccttggccaccgcccgaaggcgcgtttttaggttaccgtttgagtcgcccggaaccgatgtgggccgaattattggctcttgcagcgtctgcccaggagcgtgtgtatcgcgcggaagaccctcatggtgcgctccgcggcctcaaagaagtccgtggactccttgccaaagacttagctgttgttgcattgcgcgaaggtcttgatttacctccgactgatgatccaatgcttcttgcgtacctcttggacccgtcaaacacgacgcccgaaggcgtagcccgtcgttacggcggcgagtggaccgaagatgcaggcgagcgcgcgttattggccgaacgtttgcacgccaatttattaggacgtttgcaaggcgaggaacgtctcctctggctttacgaagaagtggagaaaccattgagtcgcgtgctcgcgcatatggaagctaccggtgtcaaattagacgtggcgtatttggaggcactcagccttgaagttgctgccgaaatgcgccgcttggaggaagaagtattccgtttagcaggccactcctttaaccttaattctcgcgatcagttagaacgtgtgttgttcgatgaacttggtctccctcctatcggcaagacagagaagaccggtaaacgtagcacttcagcggcggttttagaagctcttcgcgaagtccatcccattgtggacaagatcttgcagtaccgcgaactcgcgaaattgaaaggcacctatattgaccctcttccggcattagtccacccgaaaacgggacgcctccatacccgcttcaaccaaacagccacggcgaccggtcgtttgtcctcctctgatccaaaccttcagaatattccagtacgtaccccattgggccagaagatccgccgcgcgtttgtagctgaggagggttggcgtttagtggccctcgattatagccaaattgaattacgtgtccttgcccatctttctggcgatgagaacctcatccgcgtgtttcaggaaggcaaagacattcacactcaaacggcaagctggatgtttggattatcagcagaagcgatcgatcctttgatgcgtcgtgcagcgaagaccattaatttcggtgttctctacggtatgagtgcccatcgtttgtcgcaggaattaggcattccctatgaagaagctgcggcgttcattcagcgctactttcaaagctatcccaaagttaaagcatggatcgagaagactctcgaagaaggccgcacacgtggttacgtagagaccttatttggacgtcgccgctatgttcccgatttaaacgctcgcgtgaaatctgtccgtgaagccgccgaacgcatggcgttcaacatgcctgtacagggcacggcagctgacctcatgaaacttgcaatggtgcgcctttttccacaattgcgtgaagttggtgcccgcatgctcttgcaggtccacgatgaactcttgttagaagcgccaaaagagcgtgcggaagaggtggcagccctcgcgaaagaggttatggaaggcgtgtggcccttagcggtgcctcttgaagtcgaagttggtattggcgaggattggttggctgccaaaggataatga

SEQ ID NO: 1298 - protein, 841 aa, synthetic construct
  REGION 1..841: note = Variant of DNA polymerase I from Thermus sp. strain 2.9
MHHHHHHGGSGMLPLFEPKGRVLLVDGHHLAYRNFFALKGLTTSRGEPVQGVYGFAKSLLKALKEDGDVVIVVFDAKAPSFRHEAYEAYKAGRAPTPEDFPRQLALMKELVDLLGLERLEVPGFEADDVLATLAKKAEREGYEVQILTADRDLFQLLSPRISVLHPEGHRITPEWLWEKYGLRPEQWVDFRALAGDPSDNIPGVKGIGEKTALKLLKEWGSLENLLKNLDQVKPESVREKILAHLEDLKLSRELSRVRTDLPLEVDFRGRREPDWEGLKAFLERLEFGSLLHEFGLLESPLPAEEAPWPPPEGAFLGYRLSRPEPMWAELLALAASAQERVYRAEDPHGALRGLKEVRGLLAKDLAVVALREGLDLPPTDDPMLLAYLLDPSNTTPEGVARRYGGEWTEDAGERALLAERLHANLLGRLQGEERLLWLYEEVEKPLSRVLAHMEATGVKLDVAYLEALSLEVAAEMRRLEEEVFRLAGHSFNLNSRDQLERVLFDELGLPPIGKTEKTGKRSTSAAVLEALREVHPIVDKILQYRELAKLKGTYIDPLPALVHPKTGRLHTRFNQTATATGRLSSSDPNLQNIPVRTPLGQKIRRAFVAEEGWRLVALDYSQIELRVLAHLSGDENLIRVFQEGKDIHTQTASWMFGLSAEAIDPLMRRAAKTINFGVLYGMSAHRLSQELGIPYEEAAAFIQRYFQSYPKVKAWIEKTLEEGRTRGYVETLFGRRRYVPDLNARVKSVREAAERMAFNMPVQGTAADLMKLAMVRLFPQLREVGARMLLQVHDELLLEAPKERAEEVAALAKEVMEGVWPLAVPLEVEVGIGEDWLAAKG

SEQ ID NO: 1299 - DNA, 2529 bp, synthetic construct
  misc_feature 1..2529: note = Variant of DNA polymerase I from Thermus sp. strain 2.9
  source 1..2529: mol_type = other DNA
atgcaccatcatcatcatcatggcggtagcggcatgttaccgttgttcgaacctaaaggtcgcgtgcttctggttgatggccatcatctcgcgtatcgtaacttctttgccctgaaaggattaaccaccagccgtggcgagccggtacagggtgtctacggctttgcaaagtcgctcctgaaagctctgaaagaagacggtgatgtggtgattgttgtctttgatgcgaaagcgccaagttttcgccacgaagcgtacgaagcttacaaagccgggcgtgctccaacgccggaagactttcctcgccaattggcgcttatgaaggaattagtggatttgcttggcctcgaacgcttggaagttcccggtttcgaggcagacgacgtattagcgactctcgcaaagaaagccgaacgtgagggctatgaagtccagatcttgacagcagatcgcgatcttttccagcttttatctccgcgcatctcggtgttacacccggaagggcatcgtatcaccccggaatggctctgggagaaatatggtttgcgtcccgaacaatgggtggattttcgcgccttagcaggcgatccgagcgacaatattccgggagttaaaggtatcggcgagaagacggcgctcaagctccttaaagaatgggggtcgttggagaacttgcttaagaatttagatcaggtcaaaccagagtcagtgcgtgagaagattcttgcacacctcgaagacctcaaattaagccgcgaattgtcccgtgtacgcaccgatttgccgctcgaagttgatttccgtggccgccgcgaacctgactgggagggtcttaaagcgtttttagagcgtcttgaatttggttcgctcttgcatgaattcggccttttagaaagcccgttaccagccgaagaagcaccttggccaccgcccgaaggcgcgtttttaggttaccgtttgagtcgcccggaaccgatgtgggccgaattattggctcttgcagcgtctgcccagggacgtgtgtatcgcgcggaagaccctcatggtgcgctccgcggcctcaaagaagtccgtggactccttgccaaagacttagctgttgttgcattgcgcgaaggtcttgatttacctccgactgatgatccaatgcttcttgcgtacctcttggacccgtcaaacacgacgcccgaaggcgtagcccgtcgttacggcggcgagtggaccgaagatgcaggcgagcgcgcgttattggccgaacgtttgcacgccaatttattaggacgtttgcaaggcgaggaacgtctcctctggctttacgaagaagtggagaaaccattgagtcgcgtgctcgcgcatatggaagctaccggtgtcaaattagacgtggcgtatttggaggcactcagccttgaagttgctgccgaaatgcgccgcttggaggaagaagtattccgtttagcaggccactcctttaaccttaattctcgcgatcagttagaacgtgtgttgttcgatgaacttggtctccctcctatcggcaagacagagaagaccggtaaacgtagcacttcagcggcggttttagaagctcttcgcgaagtccatcccattgtggacaagatcttgcagtaccgcgaactcgcgaaattgaaaggcacctatattgaccctcttccggcattagtccacccgaaaacgggacgcctccatacccgcttcaaccaaacagccacggcgaccggtcgtttgtcctcctctgatccaaaccttcagaatattccagtacgtaccccattgggccagaagatccgccgcgcgtttgtagctgaggagggttggcgtttagtggccctcgattatagccaaattgaattacgtgtccttgcccatctttctggcgatgagaacctcatccgcgtgtttcaggaaggcaaagacattcacactcaaacggcaagctggatgtttggattatcagctgaagcgatcgatcctttgatgcgtcgtgcagcgaagaccatcaatttcggtgttctctacggtatgagtgcccatcgtttgtcgcaggaattaggcattccctatgaagaagctgcggcgttcattcagcgctactttcaaagctatcccaaagttaaagcatggatcgagaagactctcgaagaaggccgccatcgtggttacgtagagaccttatttggacgtcgccgctatgttcccgatttaaacgctcgcgtgaaatctgtccgtgaagccgccgaacgcatggcgttcaacatgcctgtacagggcacggcagctgacctcatgaaacttgcaatggtgcgcctttttccacaattgcgtgaagttggtgcccgcatgctcttgcaggtccacgatgaactcttgttagaagcgccaaaagagcgtgcggaagaggtggcagccctcgcgaaagaggttatggaaggcgtgtggcccttagcggtgcctcttgaagtcgaagttggtattggcgaggattggttggctgccaaaggataatga

SEQ ID NO: 1300 - protein, 841 aa, synthetic construct
  REGION 1..841: note = Variant of DNA polymerase I from Thermus sp. strain 2.9
MHHHHHHGGSGMLPLFEPKGRVLLVDGHHLAYRNFFALKGLTTSRGEPVQGVYGFAKSLLKALKEDGDVVIVVFDAKAPSFRHEAYEAYKAGRAPTPEDFPRQLALMKELVDLLGLERLEVPGFEADDVLATLAKKAEREGYEVQILTADRDLFQLLSPRISVLHPEGHRITPEWLWEKYGLRPEQWVDFRALAGDPSDNIPGVKGIGEKTALKLLKEWGSLENLLKNLDQVKPESVREKILAHLEDLKLSRELSRVRTDLPLEVDFRGRREPDWEGLKAFLERLEFGSLLHEFGLLESPLPAEEAPWPPPEGAFLGYRLSRPEPMWAELLALAASAQGRVYRAEDPHGALRGLKEVRGLLAKDLAVVALREGLDLPPTDDPMLLAYLLDPSNTTPEGVARRYGGEWTEDAGERALLAERLHANLLGRLQGEERLLWLYEEVEKPLSRVLAHMEATGVKLDVAYLEALSLEVAAEMRRLEEEVFRLAGHSFNLNSRDQLERVLFDELGLPPIGKTEKTGKRSTSAAVLEALREVHPIVDKILQYRELAKLKGTYIDPLPALVHPKTGRLHTRFNQTATATGRLSSSDPNLQNIPVRTPLGQKIRRAFVAEEGWRLVALDYSQIELRVLAHLSGDENLIRVFQEGKDIHTQTASWMFGLSAEAIDPLMRRAAKTINFGVLYGMSAHRLSQELGIPYEEAAAFIQRYFQSYPKVKAWIEKTLEEGRHRGYVETLFGRRRYVPDLNARVKSVREAAERMAFNMPVQGTAADLMKLAMVRLFPQLREVGARMLLQVHDELLLEAPKERAEEVAALAKEVMEGVWPLAVPLEVEVGIGEDWLAAKG

SEQ ID NO: 1301 - DNA, 2529 bp, synthetic construct
  misc_feature 1..2529: note = Variant of DNA polymerase I from Thermus sp. strain 2.9
  source 1..2529: mol_type = other DNA
atgcaccatcatcatcatcatggcggtagcggcatgttaccgttgttcgaacctaaaggtcgcgtgcttctggttgatggccatcatctcgcgtatcgtaacttctttgccctgaaaggattaaccaccagccgtggcgagccggtacagggtgtctacggctttgcaaagtcgctcctgaaagctctgaaagaagacggtgatgtggtgattgttgtctttgatgcgaaagcgccaagttttcgccacgaagcgtacgaagcttacaaagccgggcgtgctccaacgccggaagactttcctcgccaattggcgcttatgaaggaattagtggatttgcttggcctcgaacgcttggaagttcccggtttcgaggcagacgacgtattagcgactctcgcaaagaaagccgaacgtgagggctatgaagtccagatcttgacagcagatcgcgatcttttccagcttttatctccgcgcatctcggtgttacacccggaagggcatcgtatcaccccggaatggctctgggagaaatatggtttgcgtcccgaacaatgggtggattttcgcgccttagcaggcgatccgagcgacaatattccgggagttaaaggtatcggcgagaagacggcgctcaagctccttaaagaatgggggtcgttggagaacttgcttaagaatttagatcaggtcaaaccagagtcagtgcgtgagaagattcttgcacacctcgaagacctcaaattaagcctggaattgtcccgtgtacgcaccgatttgccgctcgaagttgatttccgtggtcgccgcgaacctgactgggagggtcttaaagcgtttttagagcgtcttgaatttggttcgctcttgcatgaattcggccttttagaaagcccgttaccagccgaagaagcaccttggccaccgcccgaaggcgcgtttttaggttaccgtttgagtcgcccggaaccgatgtgggccgaattactggctcttgcagcgtctgcccaggggcgtgcgtatcgcgcggaagaccctcatggtgcgctccgcggcctcaaagaagtccgtggactccttgccaaagacttagctgttgttgcattgcgcgaaggtcttgatttacctccgactgatgatccaatgcttcttgcgtacctcttggacccgtcaaacacgacgcccgaaggcgtagcccgtcgttacggcggcgagtggaccgaagatgcagctgagcgcgcgttattggccgaacgtttgcacgccaatttattaggacgtttgcaaggcgaggaacgtctcctctggctttacgaagaagtggagaaaccattgagtcgcgtgctcgcgcatatggaagctaccggtgtcaaattagacgtggcgtatttggaggcactcagccttgaagttgctgccgaaatgcgccgcttggaggaagaagtattccgtttagcaggccactcctttaaccttaattctcgcgatcagttagaacgtgtgttgttcgatgagcttggtctccctcctatcggcaagacagagaagaccggtaaacgtagcacttcagcggcggttttagaagctcttcgcgaagtccatcccattgtggacaagatcttgcagtaccgcgaactcgcgaaattgaaaggcacctatattgaccctcttccggcattagtccacccgaaaacgggacgcctccatacccgcttcaaccaaacagccacggcgaccggtcgtttgtcctcctctgatccaaaccttcagaatattccagtacgtaccccattgggccagaagatccgccgcgcgtttgtagctgaggagggttggcgtttagtggccctcgattatagccaaattgaattacgtgtccttgcccatctttctggcgatgagaacctcatccgcgtgtttcaggaaggcaaagacattcacactcaaacggcaagctggatgtttggattatcagctgaagcgatcgatcctttgatgcgtcgtgcagcgaagaccgttaatttcggtgttctctacggtatgagtgcccatcgtttgtcgcaggaattaggcattccctatgaagaagctgccgcgttcattcagcgctactttcaaagctatcccaaagttaaagcatggatcgagaagactctcgaagaaggccgcacacgtggttacgtagagaccttatttggacgtcgccgctatgttcccgatttaaacgctcgcgtgaaatctgtccgtgaagccgccgaacgcatggcgttcaacatgcctgtacagggcacggcagctgacctcatgaaacttgcaatggtgcgcctttttccacaattgcgtgaagttggtgcccgcatgctcttgcaggtccacgatgaactcttgttagaagcgccaaaagagcgtgcggaagaggtggcagccctcgcgaaagaggttatggaaggcgtgtggcccttagcggtgcctcttgaagtcgaagttggtattggcgaggattggttggctgccaaaggataatga

SEQ ID NO: 1302 - protein, 841 aa, synthetic construct
  REGION 1..841: note = Variant of DNA polymerase I from Thermus sp. strain 2.9
MHHHHHHGGSGMLPLFEPKGRVLLVDGHHLAYRNFFALKGLTTSRGEPVQGVYGFAKSLLKALKEDGDVVIVVFDAKAPSFRHEAYEAYKAGRAPTPEDFPRQLALMKELVDLLGLERLEVPGFEADDVLATLAKKAEREGYEVQILTADRDLFQLLSPRISVLHPEGHRITPEWLWEKYGLRPEQWVDFRALAGDPSDNIPGVKGIGEKTALKLLKEWGSLENLLKNLDQVKPESVREKILAHLEDLKLSLELSRVRTDLPLEVDFRGRREPDWEGLKAFLERLEFGSLLHEFGLLESPLPAEEAPWPPPEGAFLGYRLSRPEPMWAELLALAASAQGRAYRAEDPHGALRGLKEVRGLLAKDLAVVALREGLDLPPTDDPMLLAYLLDPSNTTPEGVARRYGGEWTEDAAERALLAERLHANLLGRLQGEERLLWLYEEVEKPLSRVLAHMEATGVKLDVAYLEALSLEVAAEMRRLEEEVFRLAGHSFNLNSRDQLERVLFDELGLPPIGKTEKTGKRSTSAAVLEALREVHPIVDKILQYRELAKLKGTYIDPLPALVHPKTGRLHTRFNQTATATGRLSSSDPNLQNIPVRTPLGQKIRRAFVAEEGWRLVALDYSQIELRVLAHLSGDENLIRVFQEGKDIHTQTASWMFGLSAEAIDPLMRRAAKTVNFGVLYGMSAHRLSQELGIPYEEAAAFIQRYFQSYPKVKAWIEKTLEEGRTRGYVETLFGRRRYVPDLNARVKSVREAAERMAFNMPVQGTAADLMKLAMVRLFPQLREVGARMLLQVHDELLLEAPKERAEEVAALAKEVMEGVWPLAVPLEVEVGIGEDWLAAKG

SEQ ID NO: 1303 - DNA, 2529 bp, synthetic construct
  misc_feature 1..2529: note = Variant of DNA polymerase I from Thermus sp. strain 2.9
  source 1..2529: mol_type = other DNA
atgcaccatcatcatcatcatggcggtagcggcatgttaccgttgttcgaacctaaaggtcgcgtgcttctggttgatggccatcatctcgcgtatcgtaacttctttgccctgaaaggattaaccaccagccgtggcgagccggtacagggtgtctacggctttgcaaagtcgctcctgaaagctctgaaagaagacggtgatgtggtgattgttgtctttgatgcgaaagcgccaagttttcgccacgaagcgtacgaagcttacaaagccgggcgtgctccaacgccggaagactttcctcgccaattggcgcttatgaaggaattagtggatttgcttggcctcgaacgcttggaagttcccggtttcgaggcagacgacgtattagcgactctcgcaaagaaagccgaacgtgagggctatgaagtccagatcttgacagcagatcgcgatcttttccagcttttatctccgcgcatctcggtgttacacccggaagggcatcgtatcaccccggaatggctctgggagaaatatggtttgcgtcccgaacaatgggtggattttcgcgccttagcaggcgatccgagcgacaatattccgggagttaaaggtatcggcgagaagacggcgctcaagctccttaaagaatgggggtcgttggagaacttgcttaagaatttagatcaggtcaaaccagagtcagtgcgtgagaagattcttgcacacctcgaagacctcaaattaagccgcgaattgtcccgtgtacgcaccgatttgccgctcgaagttgatttccgtggccgccgcgaacctgactgggagggtcttaaagcgtttttagagcgtcttgaatttggttcgctcttgcatgaattcggccttttagaaagcccgttaccagccgaagaagcaccttggccaccgcccgaaggcgcgtttttaggttaccgtttgagtcgcccggaaccgatgtgggccgaattattggctcttgcagcgtctgcccagggacgtgtgtatcgcgcggaagaccctcatggtgcgctccgcggcctcaaagaagtccgtggactccttgccaaagacttagctgttgttgcattgcgcgaaggtcttgatttacctccgactgatgatccaatgcttcttgcgtacctcttggacccgtcaaacacgacgcccgaaggcgtagcccgtcgttacggcggcgagtggaccgaagatgcaggcgagcgcgcgttattggccgaacgtttgcacgccaatttattaggacgtttgcaaggcgaggaacgtctcctctggctttacgaagaagtggagaaaccattgagtcgcgtgctcgcgcatatggaagctaccggtgtcaaattagacgtggcgtatttggaggcactcagccttgaagttgctgccgaaatgcgccgcttggaggaagaagtattccgtttagcaggccactcctttaaccttaattctcgcgatcagttagaacgtgtgttgttcgatgaacttggtctccctcctatcggcaagacagagaagaccggtaaacgtagcacttcagcggcggttttagaagctcttcgcgaagtccatcccattgtggacaagatcttgcagtaccgcgaactcgcgaaattgaaaggcacctatattgaccctcttccggcattagtccacccgaaaacgggacgcctccatacccgcttcaaccaaacagccacggcgaccggtcgtttgtcctcctctgatccaaaccttcagaatattccagtacgtaccccattgggccagaagatccgccgcgcgtttgtagctgaggagggttggcgtttagtggccctcgattatagccaaattgaattacgtgtccttgcccatctttctggcgatgagaacctcatccgcgtgtttcaggaaggcaaagacattcacactcaaacggcaagctggatgtttggattatcagctgaagcgatcgatcctttgatgcgtcgtgcagcgaagaccatcaatttcggtgttctctacggtatgagtgcccatcgtttgtcgcaggaattaggcattccctatggggaagctgcggcgttcattcagcgctactttcaaagctatcccaaagttaaagcatggatcgagaagactctcgaagaaggccgcacacgtggttacgtagagaccttatttggacgtcgccgctatgttcccgatttaaacgctcgcgtgaaatctgtccgtgaagccgccgaacgcatggcgttcaacatgcctgtacagggcacggcagctgacctcatgaaacttgcaatggtgcgcctttttccacaattgcgtgaagttggtgcccgcatgctcttgcaggtccacgatgaactcttgttagaagcgccaaaagagcgtgcggaagaggtggcagccctcgcgaaagaggttatggaaggcgtgtggcccttagcggtgcctcttgaagtcgaagttggtattggcgaggattggttggctgccaaaggataatga

SEQ ID NO: 1304 - protein, 841 aa, synthetic construct
  REGION 1..841: note = Variant of DNA polymerase I from Thermus sp. strain 2.9
MHHHHHHGGSGMLPLFEPKGRVLLVDGHHLAYRNFFALKGLTTSRGEPVQGVYGFAKSLLKALKEDGDVVIVVFDAKAPSFRHEAYEAYKAGRAPTPEDFPRQLALMKELVDLLGLERLEVPGFEADDVLATLAKKAEREGYEVQILTADRDLFQLLSPRISVLHPEGHRITPEWLWEKYGLRPEQWVDFRALAGDPSDNIPGVKGIGEKTALKLLKEWGSLENLLKNLDQVKPESVREKILAHLEDLKLSRELSRVRTDLPLEVDFRGRREPDWEGLKAFLERLEFGSLLHEFGLLESPLPAEEAPWPPPEGAFLGYRLSRPEPMWAELLALAASAQGRVYRAEDPHGALRGLKEVRGLLAKDLAVVALREGLDLPPTDDPMLLAYLLDPSNTTPEGVARRYGGEWTEDAGERALLAERLHANLLGRLQGEERLLWLYEEVEKPLSRVLAHMEATGVKLDVAYLEALSLEVAAEMRRLEEEVFRLAGHSFNLNSRDQLERVLFDELGLPPIGKTEKTGKRSTSAAVLEALREVHPIVDKILQYRELAKLKGTYIDPLPALVHPKTGRLHTRFNQTATATGRLSSSDPNLQNIPVRTPLGQKIRRAFVAEEGWRLVALDYSQIELRVLAHLSGDENLIRVFQEGKDIHTQTASWMFGLSAEAIDPLMRRAAKTINFGVLYGMSAHRLSQELGIPYGEAAAFIQRYFQSYPKVKAWIEKTLEEGRTRGYVETLFGRRRYVPDLNARVKSVREAAERMAFNMPVQGTAADLMKLAMVRLFPQLREVGARMLLQVHDELLLEAPKERAEEVAALAKEVMEGVWPLAVPLEVEVGIGEDWLAAKG

SEQ ID NO: 1305 - DNA, 2529 bp, synthetic construct
  misc_feature 1..2529: note = Variant of DNA polymerase I from Thermus sp. strain 2.9
  source 1..2529: mol_type = other DNA
atgcaccatcatcatcatcatggcggtagcggcatgttaccgttgttcgaacctaaaggtcgcgtgcttctggttgatggccatcatctcgcgtatcgtaacttctttgccctgaaaggattaaccaccagccgtggcgagccggtacagggtgtctacggctttgcaaagtcgctcctgaaagctctgaaagaagacggtgatgtggtgattgttgtctttgatgcgaaagcgccaagttttcgccacgaagcgtacgaagcttacaaagccgggcgtgctccaacgccggaagactttcctcgccaattggcgcttatgaaggaattagtggatttgcttggcctcgaacgcttggaagttcccggtttcgaggcagacgacgtattagcgactctcgcaaagaaagccgaacgtgagggctatgaagtccagatcttgacagcagatcgcgatcttttccagcttttatctccgcgcatctcggtgttacacccggaagggcatcgtatcaccccggaatggctctgggagaaatatggtttgcgtcccgaacaatgggtggattttcgcgccttagcaggcgatccgagcgacaatattccgggagttaaaggtatcggcgagaagacggcgctcaagctccttaaagaatgggggtcgttggagaacttgcttaagaatttagatcaggtcaaaccagagtcagtgcgtgagaagattcttgcacacctcgaagacctcaaattaagccgcgaattgtcccgtgtacgcaccgatttgccgctcgaagttgatttccgtggccgccgcgaacctgactgggagggtcttaaagcgtttttagagcgtcttgaatttggttcgctcttgcatgaattcggccttttagaaagcccgttaccagccgaagaagcaccttggccaccgcccgaaggcgcgtttttaggttaccgtttgagtcgccaggaaccgatgtgggccgaattattggctcttgcagcgtctgcccagggacgtgtgtatcgcgcggaagaccctcatggtgcgctccgcggcctcaaagaagtccgtggactccttgccaaagacttagctgttgttgcattgcgcgaaggtcttgatttacctccgactgatgatccaatgcttcttgcgtacctcttggacccgtcaaacacgacgcccgaaggcgtagcccgtcgttacggcggcgagtggaccgaagatgcaggcgagcgcgcgttattggccgaacgtttgcacgccaatttattaggacgtttgcaaggcgaggaacgtctcctctggctttacgaagaagtggagaaaccattgagtcgcgtgctcgcgcatatggaagctaccggtgtcaaattagacgtggcgtatttggaggcactcagccttgaagttgctgccgaaatgcgccgcttggaggaagaagtattccgtttagcaggccactcctttaaccttaattctcgcgatcagttagaacgtgtgttgttcgatgaacttggtctccctcctatcggcaagacagagaagaccggtaaacgtagcacttcagcggcggttttagaagctcttcgcgaagtccatcccattgtggacaagatcttgcagtaccgcgaactcgcgaaattgaaaggcacctatattgaccctcttccggcattagtccacccgaaaacgggacgcctccatacccgcttcaaccaaacagccacggcgaccggtcgtttgtcctcctctgatccaaaccttcagaatattccagtacgtaccccattgggccagaagatccgccgcgcgtttgtagctgaggagggttggcgtttagtggccctcgattatagccaaattgaattacgtgtccttgcccatctttctggcgatgagaacctcatccgcgtgtttcaggaaggcaaagacattcacactcaaacggcaagctggatgtttggattatcagctgaagcgatcgatcctttgatgcgtcgtgcagcgaagaccatcaatttcggtgttctctacggtatgagtgcccatcgtttgtcgcaggaattaggcattccctatgaagaagctgcggcgttcattcagcgctactttcaaagctatcccaaagttaaagcatggatcgagaagactctcgaagaaggccgcacacgtggttacgtagagaccttatttggacgtcgccgctatgttcccgatttaaacgctcgcgtgaaatctgtccgtgaagccgccgaacgcatggcgttcaacatgcctgtacagggcacggcagctgacctcatgaaacttgcaatggtgcgcctttttccacaattgcgtgaagttggtgcccgcatgctcttgcaggtccacgatgaactcttgttagaagcgccaaaagagcgtgcggaagaggtggcagccctcgcgaaagaggttatggaaggcgtgtggcccttagcggtgcctcttgaagtcgaagttggtattggcgaggattggttggctgccaaaggataatga

SEQ ID NO: 1306 - protein, 841 aa, synthetic construct
  REGION 1..841: note = Variant of DNA polymerase I from Thermus sp. strain 2.9
MHHHHHHGGSGMLPLFEPKGRVLLVDGHHLAYRNFFALKGLTTSRGEPVQGVYGFAKSLLKALKEDGDVVIVVFDAKAPSFRHEAYEAYKAGRAPTPEDFPRQLALMKELVDLLGLERLEVPGFEADDVLATLAKKAEREGYEVQILTADRDLFQLLSPRISVLHPEGHRITPEWLWEKYGLRPEQWVDFRALAGDPSDNIPGVKGIGEKTALKLLKEWGSLENLLKNLDQVKPESVREKILAHLEDLKLSRELSRVRTDLPLEVDFRGRREPDWEGLKAFLERLEFGSLLHEFGLLESPLPAEEAPWPPPEGAFLGYRLSRQEPMWAELLALAASAQGRVYRAEDPHGALRGLKEVRGLLAKDLAVVALREGLDLPPTDDPMLLAYLLDPSNTTPEGVARRYGGEWTEDAGERALLAERLHANLLGRLQGEERLLWLYEEVEKPLSRVLAHMEATGVKLDVAYLEALSLEVAAEMRRLEEEVFRLAGHSFNLNSRDQLERVLFDELGLPPIGKTEKTGKRSTSAAVLEALREVHPIVDKILQYRELAKLKGTYIDPLPALVHPKTGRLHTRFNQTATATGRLSSSDPNLQNIPVRTPLGQKIRRAFVAEEGWRLVALDYSQIELRVLAHLSGDENLIRVFQEGKDIHTQTASWMFGLSAEAIDPLMRRAAKTINFGVLYGMSAHRLSQELGIPYEEAAAFIQRYFQSYPKVKAWIEKTLEEGRTRGYVETLFGRRRYVPDLNARVKSVREAAERMAFNMPVQGTAADLMKLAMVRLFPQLREVGARMLLQVHDELLLEAPKERAEEVAALAKEVMEGVWPLAVPLEVEVGIGEDWLAAKG

SEQ ID NO: 1307 - DNA, 2529 bp, synthetic construct
  misc_feature 1..2529: note = Variant of DNA polymerase I from Thermus sp. strain 2.9
  source 1..2529: mol_type = other DNA
atgcaccatcatcatcatcatggcggtagcggcatgttaccgttgttcgaacctaaaggtcgcgtgcttctggttgatggccatcatctcgcgtatcgtaacttctttgccctgaaaggattaaccaccagccgtggcgagccggtacagggtgtctacggctttgcaaagtcgctcctgaaagctctgaaagaagacggtgatgtggtgattgttgtctttgatgcgaaagcgccaagttttcgccacgaagcgtacgaagcttacaaagccgggcgtgctccaacgccggaagactttcctcgccaattggcgcttatgaaggaattagtggatttgcttggcctcgaacgcttggaagttcccggtttcgaggcagacgacgtattagcgactctcgcaaagaaagccgaacgtgagggctatgaagtccagatcttgacagcagatcgcgatcttttccagcttttatctccgcgcatctcggtgttacacccggaagggcatcgtatcaccccggaatggctctgggagatgtatggtttgcgtcccgaacaatgggtggattttcgcgccttagcaggcgatccgagcgacaatattccgggagttaaaggtatcggcgagaagacggcgctcaagctccttaaagaatgggggtcgttggagaacttgcttaagaatttagatcaggtcaaaccagagtcagtgcgtgagaagattcttgcacacctcgaagacctcaaattaagccgcgaattgtcccgtgtacgcaccgatttgccgctcgaagttgatttccgtggccgccgcgaacctgactgggagggtcttaaagcgtttttagagcgtcttgaatttggttcgctcttgcatgaattcggccttttagaaagcccgttaccagccgaagaagcaccttggccaccgcccgaaggcgcgtttttaggttaccgtttgagtcgcccggaaccgatgtgggccgaattattggctcttgcagcgtctgcccagggacgtgtgtatcgcgcggaagaccctcatggtgcgctccgcggcctcaaagaagtccgtggactccttgccaaagacttagctgttgttgcattgcgcgaaggtcttgatttacctccgactgatgatccaatgcttcttgcgtacctcttggacccgtcaaacacgacgcccgaaggcgtagcccgtcgttacggcggcgagtggaccgaagatgcaggcgagcgcgcgttattggccgaacgtttgcacgccaatttattaggacgtttgcaaggcgaggaacgtctcctctggctttacgaagaagtggagaaaccattgagtcgcgtgctcgcgcatatggaagctaccggtgtcaaattagacgtggcgtatttggaggcactcagccttgaagttgctgccgaaatgcgccgcttggaggaagaagtattccgtttagcaggccactcctttaaccttaattctcgcgatcagttagaacgtgtgttgttcgatgaacttggtctccctcctatcggcaagacagagaagaccggtaaacgtagcacttcagcggcggttttagaagctcttcgcgaagtccatcccattgtggacaagatcttgcagtaccgcgaactcgcgaaattgaaaggcacctatattgaccctcttccggcattagtccacccgaaaacgggacgcctccatacccgcttcaaccaaacagccacggcgaccggtcgtttgtcctcctctgatccaaaccttcagaatattccagtacgtaccccattgggccagaagatccgccgcgcgtttgtagctgaggagggttggcgtttagtggccctcgattatagccaaattgaattacgtgtccttgcccatctttctggcgatgagaacctcatccgcgtgtttcaggaaggcaaagacattcacactcaaacggcaagctggatgtttggattatcagctgaagcgatcgatcctttgatgcgtcgtgcagcgaagaccatcaatttcggtgttctctacggtatgagtgcccatcgtttgtcgcaggaattaggcattccctatgaagaagctgcggcgttcattcagcgctactttcaaagctatcccaaagttaaagcatggatcgagaagactctcgaagaaggccgcacacgtggttacgtagagaccttatttggacgtcgccgctatgttcccgatttaaacgctcgcgtgaaatctgtccgtgaagccgccgaacgcatggcgttcaacatgcctgtacagggcacggcagctgacctcatgaaacttgcaatggtgcgcctttttccacaattgcgtgaagttggtgcccgcatgctcttgcaggtccacgatgaactcttgttagaagcgccaaaagagcgtgcggaagaggtggcagccctcgcgaaagaggttatggaaggcgtgtggcccttagcggtgcctcttgaagtcgaagttggtattggcgaggattggttggctgccaaaggataatga

SEQ ID NO: 1308 - protein, 841 aa, synthetic construct
  REGION 1..841: note = Variant of DNA polymerase I from Thermus sp. strain 2.9
MHHHHHHGGSGMLPLFEPKGRVLLVDGHHLAYRNFFALKGLTTSRGEPVQGVYGFAKSLLKALKEDGDVVIVVFDAKAPSFRHEAYEAYKAGRAPTPEDFPRQLALMKELVDLLGLERLEVPGFEADDVLATLAKKAEREGYEVQILTADRDLFQLLSPRISVLHPEGHRITPEWLWEMYGLRPEQWVDFRALAGDPSDNIPGVKGIGEKTALKLLKEWGSLENLLKNLDQVKPESVREKILAHLEDLKLSRELSRVRTDLPLEVDFRGRREPDWEGLKAFLERLEFGSLLHEFGLLESPLPAEEAPWPPPEGAFLGYRLSRPEPMWAELLALAASAQGRVYRAEDPHGALRGLKEVRGLLAKDLAVVALREGLDLPPTDDPMLLAYLLDPSNTTPEGVARRYGGEWTEDAGERALLAERLHANLLGRLQGEERLLWLYEEVEKPLSRVLAHMEATGVKLDVAYLEALSLEVAAEMRRLEEEVFRLAGHSFNLNSRDQLERVLFDELGLPPIGKTEKTGKRSTSAAVLEALREVHPIVDKILQYRELAKLKGTYIDPLPALVHPKTGRLHTRFNQTATATGRLSSSDPNLQNIPVRTPLGQKIRRAFVAEEGWRLVALDYSQIELRVLAHLSGDENLIRVFQEGKDIHTQTASWMFGLSAEAIDPLMRRAAKTINFGVLYGMSAHRLSQELGIPYEEAAAFIQRYFQSYPKVKAWIEKTLEEGRTRGYVETLFGRRRYVPDLNARVKSVREAAERMAFNMPVQGTAADLMKLAMVRLFPQLREVGARMLLQVHDELLLEAPKERAEEVAALAKEVMEGVWPLAVPLEVEVGIGEDWLAAKG

SEQ ID NO: 1309 - DNA, 2529 bp, synthetic construct
  misc_feature 1..2529: note = Variant of DNA polymerase I from Thermus sp. strain 2.9
  source 1..2529: mol_type = other DNA
atgcaccatcatcatcatcatggcggtagcggcatgttaccgttgttcgaacctaaaggtcgcgtgcttctggttgatggccatcatctcgcgtatcgtaacttctttgccctgaaaggattaaccaccagccgtggcgagccggtacagggtgtctacggctttgcaaagtcgctcctgaaagctctgaaagaagacggtgatgtggtgattgttgtctttgatgcgaaagcgccaagttttcgccacgaagcgtacgaagcttacaaagccgggcgtgctccaacgccggaagactttcctcgccaattggcgcttatgaaggaattagtggatttgcttggcctcgaacgcttggaagttcccggtttcgaggcagacgacgtattagcgactctcgcaaagaaagccgaacgtgagggctatgaagtccagatcttgacagcagatcgcgatcttttccagcttttatctccgcgcatctcggtgttacacccggaagggcatcgtatcaccccggaatggctctgggagaaatatggtttgcgtcccgaacaatgggtggattttcgcgccttagcaggcgatccgagcgacaatattccgggagttaaaggtatcggcgagaagacggcgctcaagctccttaaagaatgggggtcgttggagaacttgcttaagaatttagatcaggtcaaaccagagtcagtgcgtgagaagattcttgcacacctcgaagacctcaaattaagcctggaattgtcccgtgtacgcaccgatttgccgctcgaagttgatttccgtggtcgccgcgaacctgactgggagggtcttaaagcgtttttagagcgtcttgaatttggttcgctcttgcatgaattcggccttttagaaagcccgttaccagccgaagaagcaccttggccaccgcccgaaggcgcgtttttaggttaccgtttgagtcgcccggaaccgatgtgggccgaattactggctcttgcagcgtctgcccaggggcgtgtgtatcgcgcggaagaccctcatggtgcgctccgcggcctcaaagaagtccgtggactccttgccaaagacttagctgttgttgcattgcgcgaaggtcttgatttacctccgactgatgatccaatgcttcttgcgtacctcttggacccgtcaaacacgacgcccgaaggcgtagcccgtcgttacggcggcgagtggaccgaagatgcaggcgagcgcgcgttattggccgaacgtttgcacgccaatttattaggacgtttgcaaggcgaggaacgtctcctctggctttacgaagaagtggagaaaccattgagtcgcgtgctcgcgcatatggaagctaccggtgtcaaattagacgtggcgtatttggaggcactcagccttgaagttgctgccgaaatgcgccgcttggaggaagaagtattccgtttagcaggccactcctttaaccttaattctcgcgatcagttagaacgtgtgttgttcgataaccttggtctccctcctatcggcaagacagagaagaccggtaaacgtagcacttcagcggcggttttagaagctcttcgcgaagtccatcccattgtggacaagatcttgcagtaccgcgaactcgcgaaattgaaaggcacctatattgaccctcttccggcattagtccacccgaaaacgggacgcctccatacccgcttcaaccaaacagccacggcgaccggtcgtttgtcctcctctgatccaaaccttcagaatattccagtacgtaccccattgggccagaagatccgccgcgcgtttgtagctgaggagggttggcgtttagtggccctcgattatagccaaattgaattacgtgtccttgcccatctttctggcgatgagaacctcatccgcgtgtttcaggaaggcaaagacattcacactcaaacggcaagctggatgtttggattatcagctgaagcgatcgatcctttgatgcgtcgtgcagcgaagaccattaatttcggtgttctctacggtatgagtgcccatcgtttgtcgcaggaattaggcattccctatgaagaagctgccgcgttcattcagaagtactttcaaagctatcccaaagttaaagcatggatcgagaagactctcgaagaaggccgcacacgtggttacgtagagaccttatttggacgtcgccgctatgttcccgatttaaacgctcgcgtgaaatctgtccgtgaagccgccgaacgcatggcgttcaacatgcctgtacagggcacggcagctgacctcatgaaacttgcaatggtgcgcctttttccacaattgcgtgaagttggtgcccgcatgctcttgcaggtccacgatgaactcttgttagaagcgccaaaagagcgtgcggaagaggtggcagccctcgcgaaagaggttatggaaggcgtgtggcccttagcggtgcctcttgaagtcgaagttggtattggcgaggattggttggctgccaaaggataatga

SEQ ID NO: 1310 - protein, 841 aa, synthetic construct
  REGION 1..841: note = Variant of DNA polymerase I from Thermus sp. strain 2.9
MHHHHHHGGSGMLPLFEPKGRVLLVDGHHLAYRNFFALKGLTTSRGEPVQGVYGFAKSLLKALKEDGDVVIVVFDAKAPSFRHEAYEAYKAGRAPTPEDFPRQLALMKELVDLLGLERLEVPGFEADDVLATLAKKAEREGYEVQILTADRDLFQLLSPRISVLHPEGHRITPEWLWEKYGLRPEQWVDFRALAGDPSDNIPGVKGIGEKTALKLLKEWGSLENLLKNLDQVKPESVREKILAHLEDLKLSLELSRVRTDLPLEVDFRGRREPDWEGLKAFLERLEFGSLLHEFGLLESPLPAEEAPWPPPEGAFLGYRLSRPEPMWAELLALAASAQGRVYRAEDPHGALRGLKEVRGLLAKDLAVVALREGLDLPPTDDPMLLAYLLDPSNTTPEGVARRYGGEWTEDAGERALLAERLHANLLGRLQGEERLLWLYEEVEKPLSRVLAHMEATGVKLDVAYLEALSLEVAAEMRRLEEEVFRLAGHSFNLNSRDQLERVLFDNLGLPPIGKTEKTGKRSTSAAVLEALREVHPIVDKILQYRELAKLKGTYIDPLPALVHPKTGRLHTRFNQTATATGRLSSSDPNLQNIPVRTPLGQKIRRAFVAEEGWRLVALDYSQIELRVLAHLSGDENLIRVFQEGKDIHTQTASWMFGLSAEAIDPLMRRAAKTINFGVLYGMSAHRLSQELGIPYEEAAAFIQKYFQSYPKVKAWIEKTLEEGRTRGYVETLFGRRRYVPDLNARVKSVREAAERMAFNMPVQGTAADLMKLAMVRLFPQLREVGARMLLQVHDELLLEAPKERAEEVAALAKEVMEGVWPLAVPLEVEVGIGEDWLAAKG

SEQ ID NO: 1311 - DNA, 2529 bp, synthetic construct
  misc_feature 1..2529: note = Variant of DNA polymerase I from Thermus sp. strain 2.9
  source 1..2529: mol_type = other DNA
atgcaccatcatcatcatcatggcggtagcggctcgttaccgttgttcgaacctaaaggtcgcgtgcttctggttgatggccatcatctcgcgtatcgtaacttctttgccctgaaaggattaaccaccagccgtggcgagccggtacagggtgtctacggctttgcaaagtcgctcctgaaagctctgaaagaagacggtgatgtggtgattgttgtctttgatgcgaaagcgccaagttttcgccacgaagcgtacgaagcttacaaagccgggcgtgctccaacgccggaagactttcctcgccaattggcgcttatgaaggaattagtggatttgcttggcctcgaacgcttggaagttcccggtttcgaggcagacgacgtattagcgactctcgcaaagaaagccgaacgtgagggctatgaagtccagatcttgacagcagatcgcgatcttttccagcttttatctccgcgcatctcggtgttacacccggaagggcatcgtatcaccccggaatggctctgggagaaatatggtttgcgtcccgaacaatgggtggattttcgcgccttagcaggcgatccgagcgacaatattccgggagttaaaggtatcggcgagaagacggcgctcaagctccttaaagaatgggggtcgttggagaacttgcttaagaatttagatcaggtcaaaccagagtcagtgcgtgagaagattcttgcacacctcgaagacctcaaattaagccgcgaattgtcccgtgtacgcaccgatttgccgctcgaagttgatttccgtggccgccgcgaacctgactgggagggtcttaaagcgtttttagagcgtcttgaatttggttcgctcttgcatgaattcggccttttagaaagcccgttaccagccgaagaagcaccttggccaccgcccgaaggcgcgtttttaggttaccgtttgagtcgcccggaaccgatgtgggccgaattattggctcttgcagcgtctgcccagggacgtgtgtatcgcgcggaagaccctcatggtgcgctccgcggcctcaaagaagtccgtggactccttgccaaagacttagctgttgttgcattgcgcgaaggtcttgatttacctccgactgatgatccaatgcttcttgcgtacctcttggacccgtcaaacacgacgcccgaaggcgtagcccgtcgttacggcggcgagtggaccgaagatgcaggcgagcgcgcgttattggccgaacgtttgcacgccaatttattaggacgtttgcaaggcgaggaacgtctcctctggctttacgaagaagtggagaaaccattgagtcgcgtgctcgcgcatatggaagctaccggtgtcaaattagacgtggcgtatttggaggcactcagccttgaagttgctgccgaaatgcgccgcttggaggaagaagtattccgtttagcaggccactcctttaaccttaattctcgcgatcagttagaacgtgtgttgttcgatgaacttggtctccctcctatcggcaagacagagaagaccggtaaacgtagcacttcagcggcggttttagaagctcttcgcgaagtccatcccattgtggacaagatcttgcagtaccgcgaactcgcgaaattgaaaggcacctatattgaccctcttccggcattagtccacccgaaaacgggacgcctccatacccgcttcaaccaaacagccacggcgaccggtcgtttgtcctcctctgatccaaaccttcagaatattccagtacgtaccccattgggccagaagatccgccgcgcgtttgtagctgaggagggttggcgtttagtggccctcgattatagccaaattgaattacgtgtccttgcccatctttctggcgatgagaacctcatccgcgtgtttcaggaaggcaaagacattcacactcaaacggcaagctggatgtttggattatcagctgaagcgatcgatcctttgatgcgtcgtgcagcgaagaccatcaatttcggtgttctctacggtatgagtgcccatcgtttgtcgcaggaattaggcattccctatgaagaagctgcggcgttcattcagcgctactttcaaagctatcccaaagttaaagcatggatcgagaagactctcgaagaaggccgcacacgtggttacgtagagaccttatttggacgtcgccgctatgttcccgatttaaacgctcgcgtgaaatctgtccgtgaagccgccgaacgcatggcgttcaacatgcctgtacagggcacggcagctgacctcatgaaacttgcaatggtgcgcctttttccacaattgcgtgaagttggtgcccgcatgctcttgcaggtccacgatgaactcttgttagaagcgccaaaagagcgtgcggaagaggtggcagccctcgcgaaagaggttatggaaggcgtgtggcccttagcggtgcctcttgaagtcgaagttggtattggcgaggattggttggctgccaaaggataatga

SEQ ID NO: 1312 - protein, 841 aa, synthetic construct
  REGION 1..841: note = Variant of DNA polymerase I from Thermus sp. strain 2.9
MHHHHHHGGSGSLPLFEPKGRVLLVDGHHLAYRNFFALKGLTTSRGEPVQGVYGFAKSLLKALKEDGDVVIVVFDAKAPSFRHEAYEAYKAGRAPTPEDFPRQLALMKELVDLLGLERLEVPGFEADDVLATLAKKAEREGYEVQILTADRDLFQLLSPRISVLHPEGHRITPEWLWEKYGLRPEQWVDFRALAGDPSDNIPGVKGIGEKTALKLLKEWGSLENLLKNLDQVKPESVREKILAHLEDLKLSRELSRVRTDLPLEVDFRGRREPDWEGLKAFLERLEFGSLLHEFGLLESPLPAEEAPWPPPEGAFLGYRLSRPEPMWAELLALAASAQGRVYRAEDPHGALRGLKEVRGLLAKDLAVVALREGLDLPPTDDPMLLAYLLDPSNTTPEGVARRYGGEWTEDAGERALLAERLHANLLGRLQGEERLLWLYEEVEKPLSRVLAHMEATGVKLDVAYLEALSLEVAAEMRRLEEEVFRLAGHSFNLNSRDQLERVLFDELGLPPIGKTEKTGKRSTSAAVLEALREVHPIVDKILQYRELAKLKGTYIDPLPALVHPKTGRLHTRFNQTATATGRLSSSDPNLQNIPVRTPLGQKIRRAFVAEEGWRLVALDYSQIELRVLAHLSGDENLIRVFQEGKDIHTQTASWMFGLSAEAIDPLMRRAAKTINFGVLYGMSAHRLSQELGIPYEEAAAFIQRYFQSYPKVKAWIEKTLEEGRTRGYVETLFGRRRYVPDLNARVKSVREAAERMAFNMPVQGTAADLMKLAMVRLFPQLREVGARMLLQVHDELLLEAPKERAEEVAALAKEVMEGVWPLAVPLEVEVGIGEDWLAAKG

SEQ ID NO: 1313 - DNA, 2529 bp, synthetic construct
  misc_feature 1..2529: note = Variant of DNA polymerase I from Thermus sp. strain 2.9
  source 1..2529: mol_type = other DNA
atgcaccatcatcatcatcatggcggtagcggcatgttaccgttgttcgaacctaaaggtcgcgtgcttctggttgatggccatcatctcgcgtatcgtaacttccatgccctgaaaggattaaccaccagccgtggcgagccggtacagggtgtctacggctttgcaaagtcgctcctgaaagctctgaaagaagacggtgatgtggtgattgttgtctttgatgcgaaagcgccaagttttcgccacgaagcgtacgaagcttacaaagccgggcgtgctccaacgccggaagactttcctcgccaattggcgcttatgaaggaattagtggatttgcttggcctcgaacgcttggaagttcccggtttcgaggcagacgacgtattagcgactctcgcaaagaaagccgaacgtgagggctatgaagtccagatcttgacagcagatcgcgatcttttccagcttttatctccgcgcatctcggtgttacacccggaagggcatcgtatcaccccggaatggctctgggagaaatatggtttgcgtcccgaacaatgggtggattttcgcgccttagcaggcgatccgagcgacaatattccgggagttaaaggtatcggcgagaagacggcgctcaagctccttaaagaatgggggtcgttggagaacttgcttaagaatttagatcaggtcaaaccagagtcagtgcgtgagaagattcttgcacacctcgaagacctcaaattaagccgcgaattgtcccgtgtacgcaccgatttgccgctcgaagttgatttccgtggccgccgcgaacctgactgggagggtcttaaagcgtttttagagcgtcttgaatttggttcgctcttgcatgaattcggccttttagaaagcccgttaccagccgaagaagcaccttggccaccgcccgaaggcgcgtttttaggttaccgtttgagtcgcccggaaccgatgtgggccgaattattggctcttgcagcgtctgcccagggacgtgtgtatcgcgcggaagaccctcatggtgcgctccgcggcctcaaagaagtccgtggactccttgccaaagacttagctgttgttgcattgcgcgaaggtcttgatttacctccgactgatgatccaatgcttcttgcgtacctcttggacccgtcaaacacgacgcccgaaggcgtagcccgtcgttacggcggcgagtggaccgaagatgcaggcgagcgcgcgttattggccgaacgtttgcacgccaatttattaggacgtttgcaaggcgaggaacgtctcctctggctttacgaagaagtggagaaaccattgagtcgcgtgctcgcgcatatggaagctaccggtgtcaaattagacgtggcgtatttggaggcactcagccttgaagttgctgccgaaatgcgccgcttggaggaagaagtattccgtttagcaggccactcctttaaccttaattctcgcgatcagttagaacgtgtgttgttcgatgaacttggtctccctcctatcggcaagacagagaagaccggtaaacgtagcacttcagcggcggttttagaagctcttcgcgaagtccatcccattgtggacaagatcttgcagtaccgcgaactcgcgaaattgaaaggcacctatattgaccctcttccggcattagtccacccgaaaacgggacgcctccatacccgcttcaaccaaacagccacggcgaccggtcgtttgtcctcctctgatccaaaccttcagaatattccagtacgtaccccattgggccagaagatccgccgcgcgtttgtagctgaggagggttggcgtttagtggccctcgattatagccaaattgaattacgtgtccttgcccatctttctggcgatgagaacctcatccgcgtgtttcaggaaggcaaagacattcacactcaaacggcaagctggatgtttggattatcagctgaagcgatcgatcctttgatgcgtcgtgcagcgaagaccatcaatttcggtgttctctacggtatgagtgcccatcgtttgtcgcaggaattaggcattccctatgaagaagctgcggcgttcattcagcgctactttcaaagctatcccaaagttaaagcatggatcgagaagactctcgaagaaggccgcacacgtggttacgtagagaccttatttggacgtcgccgctatgttcccgatttaaacgctcgcgtgaaatctgtccgtgaagccgccgaacgcatggcgttcaacatgcctgtacagggcacggcagctgacctcatgaaacttgcaatggtgcgcctttttccacaattgcgtgaagttggtgcccgcatgctcttgcaggtccacgatgaactcttgttagaagcgccaaaagagcgtgcggaagaggtggcagccctcgcgaaagaggttatggaaggcgtgtggcccttagcggtgcctcttgaagtcgaagttggtattggcgaggattggttggctgccaaaggataatga

SEQ ID NO: 1314 - protein, 841 aa, synthetic construct
  REGION 1..841: note = Variant of DNA polymerase I from Thermus sp. strain 2.9
MHHHHHHGGSGMLPLFEPKGRVLLVDGHHLAYRNFHALKGLTTSRGEPVQGVYGFAKSLLKALKEDGDVVIVVFDAKAPSFRHEAYEAYKAGRAPTPEDFPRQLALMKELVDLLGLERLEVPGFEADDVLATLAKKAEREGYEVQILTADRDLFQLLSPRISVLHPEGHRITPEWLWEKYGLRPEQWVDFRALAGDPSDNIPGVKGIGEKTALKLLKEWGSLENLLKNLDQVKPESVREKILAHLEDLKLSRELSRVRTDLPLEVDFRGRREPDWEGLKAFLERLEFGSLLHEFGLLESPLPAEEAPWPPPEGAFLGYRLSRPEPMWAELLALAASAQGRVYRAEDPHGALRGLKEVRGLLAKDLAVVALREGLDLPPTDDPMLLAYLLDPSNTTPEGVARRYGGEWTEDAGERALLAERLHANLLGRLQGEERLLWLYEEVEKPLSRVLAHMEATGVKLDVAYLEALSLEVAAEMRRLEEEVFRLAGHSFNLNSRDQLERVLFDELGLPPIGKTEKTGKRSTSAAVLEALREVHPIVDKILQYRELAKLKGTYIDPLPALVHPKTGRLHTRFNQTATATGRLSSSDPNLQNIPVRTPLGQKIRRAFVAEEGWRLVALDYSQIELRVLAHLSGDENLIRVFQEGKDIHTQTASWMFGLSAEAIDPLMRRAAKTINFGVLYGMSAHRLSQELGIPYEEAAAFIQRYFQSYPKVKAWIEKTLEEGRTRGYVETLFGRRRYVPDLNARVKSVREAAERMAFNMPVQGTAADLMKLAMVRLFPQLREVGARMLLQVHDELLLEAPKERAEEVAALAKEVMEGVWPLAVPLEVEVGIGEDWLAAKG

SEQ ID NO: 1315 - DNA, 2529 bp, synthetic construct
  misc_feature 1..2529: note = Variant of DNA polymerase I from Thermus sp. strain 2.9
  source 1..2529: mol_type = other DNA
atgcaccatcatcatcatcatggcggtagcggcatgttaccgttgttcgaacctaaaggtcgcgtgcttctggttgatggccatcatctcgcgtatcgtaacttctttgccctgaaaggattaaccaccagccgtggcgagccggtacagggtgtctacggctttgcaaagtcgctcctgaaagctctgaaagaagacggtgatgtggtgattgttgtctttgatgcgaaagcgccaagttttcgccacgaagcgtacgaagcttacaaagccgggcgtgctccaacgccggaagactttcctcgccaattggcgcttatgaaggaattagtggatttgcttggcctcgaacgcttggaagttcccggtttcgaggcagacgacgtattagcgactctcgcaaagaaagccgaacgtgagggctatgaagtccagatcttgacagcagatcgcgatcttttccagcttttatctccgcgcatctcggtgttacacccggaagggcatcgtatcaccccggaatggctctgggagaaatatggtttgcgtcccgaacaatgggtggattttcgcgccttagcaggcgatccgagcgacaatattccgggagttaaaggtatcggcgagaagacggcgctcaagctccttaaagaatgggggtcgttggagaacttgcttaagaatttagatcaggtcaaaccagagtcagtgcgtgagaagattcttgcacacctcgaagacctcaaattaagcctggaattgtcccgtgtacgcaccgatttgccgctcgaagttgatttccgtggtcgccgcgaacctgactgggagggtcttaaagcgtttttagagcgtcttgaatttggttcgctcttgcatgaattcggccttttagaaagcccgttaccagccgaagaagcaccttggccaccgcccgaaggcgcgtttttaggttaccgtttgagtcgcccggaaccgatgtgggccgaattactggctcttgcagcgtctgcccaggagcgtgtgtatcgcgcggaagaccctcatggtgcgctccgcggcctcaaagaagtccgtggactccttgccaaagacttagctgttgttgcattgcgcgaaggtcttgatttacctccgactgatgatccaatgcttcttgcgtacctcttggacccgtcaaacacgacgcccgaaggcgtagcccgtcgttacggcggcgagtggaccgaagatgcaggcgagcgcgcgttattggccgaacgtttgcacgccaatttattaggacgtttgcaaggcgaggaacgtctcctctggctttacgaagaagtggagaaaccattgagtcgcgtgctcgcgcatatggaagctaccggtgtcaaattagacgtggcgtatttggagaacctcagccttgaagttgctgccgaaatgcgccgcttggaggaagaagtattccgtttagcaggccactcctttaaccttaattctcgcgatcagttagaacgtgtgttgttcgataaccttggtctccctcctatcggcaagacagagaagaccggtaaacgtagcacttcagcggcggttttagaagctcttcgcgaagtccatcccattgtggacaagatcttgcagtaccgcgaactcgcgaaattgaaaggcacctatattgaccctcttccggcattagtccacccgaaaacgggacgcctccatacccgcttcaaccaaacagccacggcgaccggtcgtttgtcctcctctgatccaaaccttcagaatattccagtacgtaccccattgggccagaagatccgccgcgcgtttgtagctgaggagggttggcgtttagtggccctcgattatagccaaattgaattacgtgtccttgcccatctttctggcgatgagaacctcatccgcgtgtttcaggaaggcaaagacattcacactcaaacggcaagctggatgtttggattatcagctgaagcgatcgatcctttgatgcgtcgtgcagcgaagaccattaatttcggtgttctctacggtatgagtgcccatcgtttgtcgcaggaattaggcattccctatgaagaagctgtcgcgttcattcagaagtactttcaaagctatcccaaagttaaagcatggatcgagaagactctcgaagaaggccgcacacgtggttacgtagagaccttatttggacgtcgccgctatgttcccgatttaaacgctcgcgtgaaatctgtccgtgaagccgccgaacgcatggcgttcaacatgcctgtacagggcacggcagctgacctcatgaaacttgcaatggtgcgcctttttccacaattgcgtgaagttggtgcccgcatgctcttgcaggtccacgatgaactcttgttagaagcgccaaaagagcgtgcggaagaggtggcagccctcgcgaaagaggttatggaaggcgtgtggcccttagcggtgcctcttgaagtcgaagttggtattggcgaggattggttggctgccaaaggataatga

SEQ ID NO: 1316 - protein, 841 aa, synthetic construct
  REGION 1..841: note = Variant of DNA polymerase I from Thermus sp. strain 2.9
MHHHHHHGGSGMLPLFEPKGRVLLVDGHHLAYRNFFALKGLTTSRGEPVQGVYGFAKSLLKALKEDGDVVIVVFDAKAPSFRHEAYEAYKAGRAPTPEDFPRQLALMKELVDLLGLERLEVPGFEADDVLATLAKKAEREGYEVQILTADRDLFQLLSPRISVLHPEGHRITPEWLWEKYGLRPEQWVDFRALAGDPSDNIPGVKGIGEKTALKLLKEWGSLENLLKNLDQVKPESVREKILAHLEDLKLSLELSRVRTDLPLEVDFRGRREPDWEGLKAFLERLEFGSLLHEFGLLESPLPAEEAPWPPPEGAFLGYRLSRPEPMWAELLALAASAQERVYRAEDPHGALRGLKEVRGLLAKDLAVVALREGLDLPPTDDPMLLAYLLDPSNTTPEGVARRYGGEWTEDAGERALLAERLHANLLGRLQGEERLLWLYEEVEKPLSRVLAHMEATGVKLDVAYLENLSLEVAAEMRRLEEEVFRLAGHSFNLNSRDQLERVLFDNLGLPPIGKTEKTGKRSTSAAVLEALREVHPIVDKILQYRELAKLKGTYIDPLPALVHPKTGRLHTRFNQTATATGRLSSSDPNLQNIPVRTPLGQKIRRAFVAEEGWRLVALDYSQIELRVLAHLSGDENLIRVFQEGKDIHTQTASWMFGLSAEAIDPLMRRAAKTINFGVLYGMSAHRLSQELGIPYEEAVAFIQKYFQSYPKVKAWIEKTLEEGRTRGYVETLFGRRRYVPDLNARVKSVREAAERMAFNMPVQGTAADLMKLAMVRLFPQLREVGARMLLQVHDELLLEAPKERAEEVAALAKEVMEGVWPLAVPLEVEVGIGEDWLAAKG

SEQ ID NO: 1317 - DNA, 2529 bp, synthetic construct
  misc_feature 1..2529: note = Variant of DNA polymerase I from Thermus sp. strain 2.9
  source 1..2529: mol_type = other DNA
atgcaccatcatcatcatcatggcggtagcggcatgttaccgttgttcgaacctaaaggtcgcgtgcttctggttgatggccatcatctcgcgtatcgtaacttctttgccctgaaaggattaaccaccagccgtggcgagccggtacagggtgtctacggctttgcaaagtcgctcctgaaagctctgaaagaagacggtgatgtggtgattgttgtctttgatgcgaaagcgccaagttttcgccacgaagcgtacgaagcttacaaagccgggcgtgctccaacgccggaagactttcctcgccaattggcgcttatgaaggaattagtggatttgcttggcctcgaacgcttggaagttcccggtttcgaggcagacgacgtattagcgactctcgcaaagaaagccgaacgtgagggctatgaagtccagatcttgacagcagatcgcgatcttttccagcttttatctccgcgcatctcggtgttacacccggaagggcatcgtatcaccccggaatggctctgggagaaatatggtttgcgtcccgaacaatgggtggattttcgcgccttagcaggcgatccgagcgacaatattccgggagttaaaggtatcggcgagaagacggcgctcaagctccttaaagaatgggggtcgttggagaacttgcttaagaatttagatcaggtcaaaccagagtcagtgcgtgagaagattcttgcacacctcgaagacctcaaattaagccgcgaattgtcccgtgtacgcaccgatttgccgctcgaagttgatttccgtcgtcgccgcgaacctgactgggagggtcttaaagcgtttttagagcgtcttgaatttggttcgctcttgcatgaattcggccttttagaaagcccgttaccagccgaagaagcaccttggccaccgcccgaaggcgcgtttttaggttaccgtttgagtcgcccggaaccgatgtgggccgaattattggctcttgcagcgtctgcccagggacgtgtgtatcgcgcggaagaccctcatggtgcgctccgcggcctcaaagaagtccgtggactccttgccaaagacttagctgttgttgcattgcgcgaaggtcttgatttacctccgactgatgatccaatgcttcttgcgtacctcttggacccgtcaaacacgacgcccgaaggcgtagcccgtcgttacggcggcgagtggaccgaagatgcaggtgagcgcgcgttattggccgaacgtttgcacgccaatttattaggacgtttgcaaggcgaggaacgtctcctctggctttacgaagaagtggagaaaccattgagtcgcgtgctcgcgcatatggaagctaccggtgtcaaattagacgtggcgtatttggagaacctcagccttgaagttgctgccgaaatgcgccgcttggaggaagaagtattccgtttagcaggccactcctttaaccttaattctcgcgatcagttagaacgtgtgttgttcgataaccttggtctccctcctatcggcaagacagagaagaccggtaaacgtagcacttcagcggcggttttagaagctcttcgcgaagtccatcccattgtggacaagatcttgcagtaccgcgaactcgcgaaattgaaaggcacctatattgaccctcttccggcattagtccacccgaaaacgggacgcctccatacccgcttcaaccaaacagccacggcgaccggtcgtttgtcctcctctgatccaaaccttcagaatattccagtacgtaccccattgggccagaagatccgccgcgcgtttgtagctgaggagggttggcgtttagtggccctcgattatagccaaattgaattacgtgtccttgcccatctttctggcgatgagaacctcatccgcgtgtttcaggaaggcaaagacattcacactcaaacggcaagctggatgtttggattatcagctgaagcgatcgatcctttgatgcgtcgtgcagcgaagaccatcaatttcggtgttctctacggtatgagtgcccatcgtttgtcgcaggaattaggcattccctatgaagaagctgcggcgttcattcagcgctactttcaaagctatcccaaagttaaagcatggatcgagaagactctcgaagaaggccgcacacgtggttacgtagagaccttatttggacgtcgccgctatgttcccgatttaaacgctcgcgtgaaatctgtccgtgaagccgccgaacgcatggcgttcaacatgcctgtacagggcacggcagctgacctcatgaaacttgcaatggtgcgcctttttccacaattgcgtgaagttggtgcccgcatgctcttgcaggtccacgatgaactcttgttagaagcgccaaaagagcgtgcggaagaggtggcagccctcgcgaaagaggttatggaaggcgtgtggcccttagcggtgcctcttgaagtcgaagttggtattggcgaggattggttggctgccaaaggataatga

SEQ ID NO: 1318 - protein, 841 aa, synthetic construct
  REGION 1..841: note = Variant of DNA polymerase I from Thermus sp. strain 2.9
MHHHHHHGGSGMLPLFEPKGRVLLVDGHHLAYRNFFALKGLTTSRGEPVQGVYGFAKSLLKALKEDGDVVIVVFDAKAPSFRHEAYEAYKAGRAPTPEDFPRQLALMKELVDLLGLERLEVPGFEADDVLATLAKKAEREGYEVQILTADRDLFQLLSPRISVLHPEGHRITPEWLWEKYGLRPEQWVDFRALAGDPSDNIPGVKGIGEKTALKLLKEWGSLENLLKNLDQVKPESVREKILAHLEDLKLSRELSRVRTDLPLEVDFRRRREPDWEGLKAFLERLEFGSLLHEFGLLESPLPAEEAPWPPPEGAFLGYRLSRPEPMWAELLALAASAQGRVYRAEDPHGALRGLKEVRGLLAKDLAVVALREGLDLPPTDDPMLLAYLLDPSNTTPEGVARRYGGEWTEDAGERALLAERLHANLLGRLQGEERLLWLYEEVEKPLSRVLAHMEATGVKLDVAYLENLSLEVAAEMRRLEEEVFRLAGHSFNLNSRDQLERVLFDNLGLPPIGKTEKTGKRSTSAAVLEALREVHPIVDKILQYRELAKLKGTYIDPLPALVHPKTGRLHTRFNQTATATGRLSSSDPNLQNIPVRTPLGQKIRRAFVAEEGWRLVALDYSQIELRVLAHLSGDENLIRVFQEGKDIHTQTASWMFGLSAEAIDPLMRRAAKTINFGVLYGMSAHRLSQELGIPYEEAAAFIQRYFQSYPKVKAWIEKTLEEGRTRGYVETLFGRRRYVPDLNARVKSVREAAERMAFNMPVQGTAADLMKLAMVRLFPQLREVGARMLLQVHDELLLEAPKERAEEVAALAKEVMEGVWPLAVPLEVEVGIGEDWLAAKG

SEQ ID NO: 1319 - DNA, 2529 bp, synthetic construct
  misc_feature 1..2529: note = Variant of DNA polymerase I from Thermus sp. strain 2.9
  source 1..2529: mol_type = other DNA
atgcaccatcatcatcatcatggcggtagcggcatgttaccgttgttcgaacctaaaggtcgcgtgcttctggttgatggccatcatctcgcgtatcgtaacttctttgccctgaaaggattaaccaccagccgtggcgagccggtacagggtgtctacggctttgcaaagtcgctcctgaaagctctgaaagaagacggtgatgtggtgattgttgtctttgatgcgaaagcgccaagttttcgccacgaagcgtacgaagcttacaaagccgggcgtgctccaacgccggaagactttcctcgccaattggcgcttatgaaggaattagtggatttgcttggcctcgaacgcttggaagttcccggtttcgaggcagacgacgtattagcgactctcgcaaagaaagccgaacgtgagggctatgaagtccagatcttgacagcagatcgcgatcttttccagcttttatctccgcgcatctcggtgttacacccggaagggcatcgtatcaccccggaatggctctgggagaaatatggtttgcgtcccgaacaatgggtggattttcgcgccttagcaggcgatccgagcgacaatattccgggagttaaaggtatcggcgagaagacggcgctcaagctccttaaagaatgggggtcgttggagaacttgcttaagaatttagatcaggtcaaaccagagtcagtgcgtgagaagattcttgcacacctcgaagacctcaaattaagcctggaattgtcccgtgtacgcaccgatttgccgctcgaagttgatttccgtggccgccgcgaacctgactgggagggtcttaaagcgtttttagagcgtcttgaatttggttcgctcttgcatgaattcggccttttagaaagcccgttaccagccgaagaagcaccttggccaccgcccgaaggcgcgtttttaggttaccgtttgagtcgcccggaaccgatgtgggccgaattactggctcttgcagcgtctgcccagggacgtgtgtatcgcgcggaagaccctcatggtgcgctccgcggcctcaaagaagtccgtggactccttgccaaagacttagctgttgttgcattgcgcgaaggtcttgatttacctccgactgatgatccaatgcttcttgcgtacctcttggacccgtcaaacacgacgcccgaaggcgtagcccgtcgttacggcggcgagtggaccgaagatgcaggcgagcgcgcgttattggccgaacgtttgcacgccaatttattaggacgtttgcaaggcgaggaacgtctcctctggctttacgaagaagtggagaaaccattgagtcgcgtgctcgcgcatatggaagctaccggtgtcaaattagacgtggcgtatttggagaacctcagccttgaagttgctgccgaaatgcgccgcttggaggaagaagtattccgtttagcaggccactcctttaaccttaattctcgcgatcagttagaacgtgtgttgttcgataaccttggtctccctcctatcggcaagacagagaagaccggtaaacgtagcacttcagcggcggttttagaagctcttcgcgaagtccatcccattgtggacaagatcttgcagtaccgcgaactcgcgaaattgaaaggcacctatattgaccctcttccggcattagtccacccgaaaacgggacgcctccatacccgcttcaaccaaacagccacggcgaccggtcgtttgtcctcctctgatccaaaccttcagaatattccagtacgtaccccattgggccagaagatccgccgcgcgtttgtagctgaggagggttggcgtttagtggccctcgattatagccaaattgaattacgtgtccttgcccatctttctggcgatgagaacctcatccgcgtgtttcaggaaggcaaagacattcacactcaaacggcaagctggatgtttggattatcagctgaagcgatcgatcctttgatgcgtcgtgcagcgaagaccgttaatttcggtgttctctacggtatgagtgcccatcgtttgtcgcaggaattaggcattccctatgaagaagctgccgcgttcattcagaagtactttcaaagctatcccaaagttaaagcatggatcgagaagactctcgaagaaggccgcacacgtggttacgtagagaccttatttggacgtcgccgctatgttcccgatttaaacgctcgcgtgaaatctgtccgtgaagccgccgaacgcatggcgttcaacatgcctgtacagggcacggcagctgacctcatgaaacttgcaatggtgcgcctttttccacaattgcgtgaagttggtgcccgcatgctcttgcaggtccacgatgaactcttgttagaagcgccaaaagagcgtgcggaagaggtggcagccctcgcgaaagaggttatggaaggcgtgtggcccttagcggtgcctcttgaagtcgaagttggtattggcgaggattggttggctgccaaaggataatga

SEQ ID NO: 1320 - protein, 841 aa, synthetic construct
  REGION 1..841: note = Variant of DNA polymerase I from Thermus sp. strain 2.9
MHHHHHHGGSGMLPLFEPKGRVLLVDGHHLAYRNFFALKGLTTSRGEPVQGVYGFAKSLLKALKEDGDVVIVVFDAKAPSFRHEAYEAYKAGRAPTPEDFPRQLALMKELVDLLGLERLEVPGFEADDVLATLAKKAEREGYEVQILTADRDLFQLLSPRISVLHPEGHRITPEWLWEKYGLRPEQWVDFRALAGDPSDNIPGVKGIGEKTALKLLKEWGSLENLLKNLDQVKPESVREKILAHLEDLKLSLELSRVRTDLPLEVDFRGRREPDWEGLKAFLERLEFGSLLHEFGLLESPLPAEEAPWPPPEGAFLGYRLSRPEPMWAELLALAASAQGRVYRAEDPHGALRGLKEVRGLLAKDLAVVALREGLDLPPTDDPMLLAYLLDPSNTTPEGVARRYGGEWTEDAGERALLAERLHANLLGRLQGEERLLWLYEEVEKPLSRVLAHMEATGVKLDVAYLENLSLEVAAEMRRLEEEVFRLAGHSFNLNSRDQLERVLFDNLGLPPIGKTEKTGKRSTSAAVLEALREVHPIVDKILQYRELAKLKGTYIDPLPALVHPKTGRLHTRFNQTATATGRLSSSDPNLQNIPVRTPLGQKIRRAFVAEEGWRLVALDYSQIELRVLAHLSGDENLIRVFQEGKDIHTQTASWMFGLSAEAIDPLMRRAAKTVNFGVLYGMSAHRLSQELGIPYEEAAAFIQKYFQSYPKVKAWIEKTLEEGRTRGYVETLFGRRRYVPDLNARVKSVREAAERMAFNMPVQGTAADLMKLAMVRLFPQLREVGARMLLQVHDELLLEAPKERAEEVAALAKEVMEGVWPLAVPLEVEVGIGEDWLAAKG

SEQ ID NO: 1321 - DNA, 2529 bp, synthetic construct
  misc_feature 1..2529: note = Variant of DNA polymerase I from Thermus sp. strain 2.9
  source 1..2529: mol_type = other DNA
atgcaccatcatcatcatcatggcggtagcggcatgttaccgttgttcgaacctaaaggtcgcgtgcttctggttgatggccatcatctcgcgtatcgtaacttctttgccctgaaaggattaaccaccagccgtggcgagccggtacagggtgtctacggctttgcaaagtcgctcctgaaagctctgaaagaagacggtgatgtggtgattgttgtctttgatgcgaaagcgccaagttttcgccacgaagcgtacgaagcttacaaagccgggcgtgctccaacgccggaagactttcctcgccaattggcgcttatgaaggaattagtggatttgcttggcctcgaacgcttggaagttcccggtttcgaggcagacgacgtattagcgactctcgcaaagaaagccgaacgtgagggctatgaagtccagatcttgacagcagatcgcgatcttttccagcttttatctccgcgcatctcggtgttacacccggaagggcatcgtatcaccccggaatggctctgggagaaatatggtttgcgtcccgaacaatgggtggattttcgcgccttagcaggcgatccgagcgacaatattccgggagttaaaggtatcggcgagaagacggcgctcaagctccttaaagaatgggggtcgttggagaacttgcttaagaatttagatcaggtcaaaccagagtcagtgcgtgagaagattcttgcacacctcgaagacctcaaattaagcctggaattgtcccgtgtacgcaccgatttgccgctcgaagttgatttccgtggtcgccgcgaacctgactgggagggtcttaaagcgtttttagagcgtcttgaatttggttcgctcttgcatgaattcggccttttagaaagcccgttaccagccgaagaagcaccttggccaccgcccgaaggcgcgtttttaggttaccgtttgagtcgcccggaaccgatgtgggccgaattatcggctcttgcagcgtctgcccaggggcgtgtgtatcgcgcggaagaccctcatggtgcgctccgtggcctcaaagaagtccgtggactccttgccaaagacttagctgttgttgcattgcgcgaaggtcttgatttacctccgactgatgatccaatgcttcttgcgtacctcttggacccgtcaaacacgacgcccgaaggcgtagcccgtcgttacggcggcgagtggaccgaagatgcagctgagcgcgcgttattggccgaacgtttgcacgccaatttattaggacgtttgcaaggcgaggaacgtctcctctggctttacgaagaagtggagaaaccattgagtcgcgtgctcgcgcatatggaagctaccggtgtcaaattagacgtggcgtatttggagaacctcagccttgaagttgctgccgaaatgcgccgcttggaggaagaagtattccgtttagcaggccactcctttaaccttaattctcgcgatcagttagaacgtgtgttgttcgataaccttggtctccctcctatcggcaagacagagaagaccggtaaacgtagcacttcagcggcggttttagaagctcttcgcgaagtccatcccattgtggacaagatcttgcagtaccgcgaactcgcgaaattgaaaggcacctatattgaccctcttccggcattagtccacccgaaaacgggacgcctccatacccgcttcaaccaaacagccacggcgaccggtcgtttgtcctcctctgatccaaaccttcagaatattccagtacgtaccccattgggccagaagatccgccgcgcgtttgtagctgaggagggttggcgtttagtggccctcgattatagccaaattgaattacgtgtccttgcccatctttctggcgatgagaacctcatccgcgtgtttcaggaaggcaaagacattcacactcaaacggcaagctggatgtttggattatcagcagaagcgatcgatcctttgatgcgtcgtgcagcgaagaccattaatttcggtgttctctacggtatgagtgcccatcgtttgtcgcaggaattaggcattccctatgaagaagctgtcgcgttcattcagaagtactttcaaagctatcccaaagttaaagcatggatcgagaagactctcgaagaaggccgcacacgtggttacgtagagaccttatttggacgtcgccgctatgttcccgatttaaacgctcgcgtgaaatctgtccgtgaagccgccgaacgcatggcgttcaacatgcctgtacagggcacggcagctgacctcatgaaacttgcaatggtgcgcctttttccacaattgcgtgaagttggtgcccgcatgctcttgcaggtccacgatgaactcttgttagaagcgccaaaagagcgtgcggaagaggtggcagccctcgcgaaagaggttatggaaggcgtgtggcccttagcggtgcctcttgaagtcgaagttggtattggcgaggattggttggctgccaaaggataatga

SEQ ID NO: 1322 - protein, 841 aa, synthetic construct
  REGION 1..841: note = Variant of DNA polymerase I from Thermus sp. strain 2.9
MHHHHHHGGSGMLPLFEPKGRVLLVDGHHLAYRNFFALKGLTTSRGEPVQGVYGFAKSLLKALKEDGDVVIVVFDAKAPSFRHEAYEAYKAGRAPTPEDFPRQLALMKELVDLLGLERLEVPGFEADDVLATLAKKAEREGYEVQILTADRDLFQLLSPRISVLHPEGHRITPEWLWEKYGLRPEQWVDFRALAGDPSDNIPGVKGIGEKTALKLLKEWGSLENLLKNLDQVKPESVREKILAHLEDLKLSLELSRVRTDLPLEVDFRGRREPDWEGLKAFLERLEFGSLLHEFGLLESPLPAEEAPWPPPEGAFLGYRLSRPEPMWAELSALAASAQGRVYRAEDPHGALRGLKEVRGLLAKDLAVVALREGLDLPPTDDPMLLAYLLDPSNTTPEGVARRYGGEWTEDAAERALLAERLHANLLGRLQGEERLLWLYEEVEKPLSRVLAHMEATGVKLDVAYLENLSLEVAAEMRRLEEEVFRLAGHSFNLNSRDQLERVLFDNLGLPPIGKTEKTGKRSTSAAVLEALREVHPIVDKILQYRELAKLKGTYIDPLPALVHPKTGRLHTRFNQTATATGRLSSSDPNLQNIPVRTPLGQKIRRAFVAEEGWRLVALDYSQIELRVLAHLSGDENLIRVFQEGKDIHTQTASWMFGLSAEAIDPLMRRAAKTINFGVLYGMSAHRLSQELGIPYEEAVAFIQKYFQSYPKVKAWIEKTLEEGRTRGYVETLFGRRRYVPDLNARVKSVREAAERMAFNMPVQGTAADLMKLAMVRLFPQLREVGARMLLQVHDELLLEAPKERAEEVAALAKEVMEGVWPLAVPLEVEVGIGEDWLAAKG

SEQ ID NO: 1323 - DNA, 2529 bp, synthetic construct
  misc_feature 1..2529: note = Variant of DNA polymerase I from Thermus sp. strain 2.9
  source 1..2529: mol_type = other DNA
atgcaccatcatcatcatcatggcggtagcggcatgttaccgttgttcgaacctaaaggtcgcgtgcttctggttgatggccatcatctcgcgtatcgtaacttctttgccctgaaaggattaaccaccagccgtggcgagccggtacagggtgtctacggctttgcaaagtcgctcctgaaagctctgaaagaagacggtgatgtggtgattgttgtctttgatgcgaaagcgccaagttttcgccacgaagcgtacgaagcttacaaagccgggcgtgctccaacgccggaagactttcctcgccaattggcgcttatgaaggaattagtggatttgcttggcctcgaacgcttggaagttcccggtttcgaggcagacgacgtattagcgactctcgcaaagaaagccgaacgtgagggctatgaagtccagatcttgacagcagatcgcgatcttttccagcttttatctccgcgcatctcggtgttacacccggaagggcatcgtatcaccccggaatggctctgggagaaatatggtttgcgtcccgaacaatgggtggattttcgcgccttagcaggcgatccgagcgacaatattccgggagttaaaggtatcggcgagaagacggcgctcaagctccttaaagaatgggggtcgttggagaacttgcttaagaatttagatcaggtcaaaccagagtcagtgcgtgagaagattcttgcacacctcgaagacctcaaattaagccgcgaattgtcccgtgtacgcaccgatttgccgctcgaagttgatttccgtcgtcgccgcgaacctgactgggagggtcttaaagcgtttttagagcgtcttgaatttggttcgctcttgcatgaattcggccttttagaaagcccgttaccagccgaagaagcaccttggccaccgcccgaaggcgcgtttttaggttaccgtttgagtcgcccggaaccgatgtgggccgaattatcggctcttgcagcgtctgcccaggggcgtgtgtatcgcgcggaagaccctcatggtgcgctcaagggcctcaaagaagtccgtggactccttgccaaagacttagctgttgttgcattgcgcgaaggtcttgatttacctccgactgatgatccaatgcttcttgcgtacctcttggacccgtcaaacacgacgcccgaaggcgtagcccgtcgttacggcggcgagtggaccgaagatgcaggcgagcgcgcgttattggccgaacgtttgcacgccaatttattaggacgtttgcaaggcgaggaacgtctcctctggctttacgaagaagtggagaaaccattgagtcgcgtgctcgcgcatatggaagctaccggtgtcaaattagacgtggcgtatttggagaacctcagccttgaagttgctgccgaaatgcgccgcttggaggaagaagtattccgtttagcaggccactcctttaaccttaattctcgcgatcagttagaacgtgtgttgttcgatgagcttggtctccctcctatcggcaagacagagaagaccggtaaacgtagcacttcagcggcggttttagaagctcttcgcgaagtccatcccattgtggacaagatcttgcagtaccgcgaactcgcgaaattgaaaggcacctatattgaccctcttccggcattagtccacccgaaaacgggacgcctccatacccgcttcaaccaaacagccacggcgaccggtcgtttgtcctcctctgatccaaaccttcagaatattccagtacgtaccccattgggccagaagatccgccgcgcgtttgtagctgaggagggttggcgtttagtggccctcgattatagccaaattgaattacgtgtccttgcccatctttctggcgatgagaacctcatccgcgtgtttcaggaaggcaaagacattcacactcaaacggcaagctggatgtttggattatcagcagaagcgatcgatcctttgatgcgtcgtgcagcgaagaccattaatttcggtgttctctacggtatgagtgcccatcgtttgtcgcaggaattaggcattccctatgaagaagctgtcgcgttcattcagcgctactttcaaagctatcccaaagttaaagcatggatcgagaagactctcgaagaaggccgcacacgtggttacgtagagaccttatttggacgtcgccgctatgttcccgatttaaacgctcgcgtgaaatctgtccgtgaagccgccgaacgcatggcgttcaacatgcctgtacagggcacggcagctgacctcatgaaacttgcaatggtgcgcctttttccacaattgcgtgaagttggtgcccgcatgctcttgcaggtccacgatgaactcttgttagaagcgccaaaagagcgtgcggaagaggtggcagccctcgcgaaagaggttatggaaggcgtgtggcccttagcggtgcctcttgaagtcgaagttggtattggcgaggattggttggctgccaaaggataatga

SEQ ID NO: 1324 - protein, 841 aa, synthetic construct
  REGION 1..841: note = Variant of DNA polymerase I from Thermus sp. strain 2.9
MHHHHHHGGSGMLPLFEPKGRVLLVDGHHLAYRNFFALKGLTTSRGEPVQGVYGFAKSLLKALKEDGDVVIVVFDAKAPSFRHEAYEAYKAGRAPTPEDFPRQLALMKELVDLLGLERLEVPGFEADDVLATLAKKAEREGYEVQILTADRDLFQLLSPRISVLHPEGHRITPEWLWEKYGLRPEQWVDFRALAGDPSDNIPGVKGIGEKTALKLLKEWGSLENLLKNLDQVKPESVREKILAHLEDLKLSRELSRVRTDLPLEVDFRRRREPDWEGLKAFLERLEFGSLLHEFGLLESPLPAEEAPWPPPEGAFLGYRLSRPEPMWAELSALAASAQGRVYRAEDPHGALKGLKEVRGLLAKDLAVVALREGLDLPPTDDPMLLAYLLDPSNTTPEGVARRYGGEWTEDAGERALLAERLHANLLGRLQGEERLLWLYEEVEKPLSRVLAHMEATGVKLDVAYLENLSLEVAAEMRRLEEEVFRLAGHSFNLNSRDQLERVLFDELGLPPIGKTEKTGKRSTSAAVLEALREVHPIVDKILQYRELAKLKGTYIDPLPALVHPKTGRLHTRFNQTATATGRLSSSDPNLQNIPVRTPLGQKIRRAFVAEEGWRLVALDYSQIELRVLAHLSGDENLIRVFQEGKDIHTQTASWMFGLSAEAIDPLMRRAAKTINFGVLYGMSAHRLSQELGIPYEEAVAFIQRYFQSYPKVKAWIEKTLEEGRTRGYVETLFGRRRYVPDLNARVKSVREAAERMAFNMPVQGTAADLMKLAMVRLFPQLREVGARMLLQVHDELLLEAPKERAEEVAALAKEVMEGVWPLAVPLEVEVGIGEDWLAAKG

SEQ ID NO: 1325 - DNA, 2529 bp, synthetic construct
  misc_feature 1..2529: note = Variant of DNA polymerase I from Thermus sp. strain 2.9
  source 1..2529: mol_type = other DNA
atgcaccatcatcatcatcatggcggtagcggcatgttaccgttgttcgaacctaaaggtcgcgtgcttctggttgatggccatcatctcgcgtatcgtaacttctttgccctgaaaggattaaccaccgctcgtggcgagccggtacagggtgtctacggctttgcaaagtcgctcctgaaagctctgaaagaagacggtgatgtggtgattgttgtctttgatgcgaaagcgccaagttttcgccacgaagcgtacgaagcttacaaagccgggcgtgctccaacgccggaagactttcctcgccaattggcgcttatgaaggaattagtggatttgcttggcctcgaacgcttggaagttcccggtttcgaggcagacgacgtattagcgactctcgcaaagaaagccgaacgtgagggctatgaagtccagatcttgacagcagatcgcgatcttttccagcttttatctccgcgcatctcggtgttacacccggaagggcatcgtatcaccccggaatggctctgggagaaatatggtttgcgtcccgaacaatgggtggattttcgcgccttagcaggcgatccgagcgacaatattccgggagttaaaggtatcggcgagaagacggcgctcaagctccttaaagaatgggggtcgttggagaacttgcttaagaatttagatcaggtcaaaccagagtcagtgcgtgagaagattcttgcacacctcgaagacctcaaattaagccgcgaattgtcccgtgtacgcaccgatttgccgctcgaagttgatttccgtggccgccgcgaacctgactgggagggtcttaaagcgtttttagagcgtcttgaatttggttcgctcttgcatgaattcggccttttagaaagcccgttaccagccgaagaagcaccttggccaccgcccgaaggcgcgtttttaggttaccgtttgagtcgcccggaaccgatgtgggccgaattattggctcttgcagcgtctgcccagggacgtgtgtatcgcgcggaagaccctcatggtgcgctccgcggcctcaaagaagtccgtggactccttgccaaagacttagctgttgttgcattgcgcgaaggtcttgatttacctccgactgatgatccaatgcttcttgcgtacctcttggacccgtcaaacacgacgcccgaaggcgtagcccgtcgttacggcggcgagtggaccgaagatgcaggcgagcgcgcgttattggccgaacgtttgcacgccaatttattaggacgtttgcaaggcgaggaacgtctcctctggctttacgaagaagtggagaaaccattgagtcgcgtgctcgcgcatatggaagctaccggtgtcaaattagacgtggcgtatttggaggcactcagccttgaagttgctgccgaaatgcgccgcttggaggaagaagtattccgtttagcaggccactcctttaaccttaattctcgcgatcagttagaacgtgtgttgttcgatgaacttggtctccctcctatcggcaagacagagaagaccggtaaacgtagcacttcagcggcggttttagaagctcttcgcgaagtccatcccattgtggacaagatcttgcagtaccgcgaactcgcgaaattgaaaggcacctatattgaccctcttccggcattagtccacccgaaaacgggacgcctccatacccgcttcaaccaaacagccacggcgaccggtcgtttgtcctcctctgatccaaaccttcagaatattccagtacgtaccccattgggccagaagatccgccgcgcgtttgtagctgaggagggttggcgtttagtggccctcgattatagccaaattgaattacgtgtccttgcccatctttctggcgatgagaacctcatccgcgtgtttcaggaaggcaaagacattcacactcaaacggcaagctggatgtttggattatcagctgaagcgatcgatcctttgatgcgtcgtgcagcgaagaccatcaatttcggtgttctctacggtatgagtgcccatcgtttgtcgcaggaattaggcattccctatgaagaagctgcggcgttcattcagcgctactttcaaagctatcccaaagttaaagcatggatcgagaagactctcgaagaaggccgcacacgtggttacgtagagaccttatttggacgtcgccgctatgttcccgatttaaacgctcgcgtgaaatctgtccgtgaagccgccgaacgcatggcgttcaacatgcctgtacagggcacggcagctgacctcatgaaacttgcaatggtgcgcctttttccacaattgcgtgaagttggtgcccgcatgctcttgcaggtccacgatgaactcttgttagaagcgccaaaagagcgtgcggaagaggtggcagccctcgcgaaagaggttatggaaggcgtgtggcccttagcggtgcctcttgaagtcgaagttggtattggcgaggattggttggctgccaaaggataatga

SEQ ID NO: 1326 - protein, 841 aa, synthetic construct
  REGION 1..841: note = Variant of DNA polymerase I from Thermus sp. strain 2.9
MHHHHHHGGSGMLPLFEPKGRVLLVDGHHLAYRNFFALKGLTTARGEPVQGVYGFAKSLLKALKEDGDVVIVVFDAKAPSFRHEAYEAYKAGRAPTPEDFPRQLALMKELVDLLGLERLEVPGFEADDVLATLAKKAEREGYEVQILTADRDLFQLLSPRISVLHPEGHRITPEWLWEKYGLRPEQWVDFRALAGDPSDNIPGVKGIGEKTALKLLKEWGSLENLLKNLDQVKPESVREKILAHLEDLKLSRELSRVRTDLPLEVDFRGRREPDWEGLKAFLERLEFGSLLHEFGLLESPLPAEEAPWPPPEGAFLGYRLSRPEPMWAELLALAASAQGRVYRAEDPHGALRGLKEVRGLLAKDLAVVALREGLDLPPTDDPMLLAYLLDPSNTTPEGVARRYGGEWTEDAGERALLAERLHANLLGRLQGEERLLWLYEEVEKPLSRVLAHMEATGVKLDVAYLEALSLEVAAEMRRLEEEVFRLAGHSFNLNSRDQLERVLFDELGLPPIGKTEKTGKRSTSAAVLEALREVHPIVDKILQYRELAKLKGTYIDPLPALVHPKTGRLHTRFNQTATATGRLSSSDPNLQNIPVRTPLGQKIRRAFVAEEGWRLVALDYSQIELRVLAHLSGDENLIRVFQEGKDIHTQTASWMFGLSAEAIDPLMRRAAKTINFGVLYGMSAHRLSQELGIPYEEAAAFIQRYFQSYPKVKAWIEKTLEEGRTRGYVETLFGRRRYVPDLNARVKSVREAAERMAFNMPVQGTAADLMKLAMVRLFPQLREVGARMLLQVHDELLLEAPKERAEEVAALAKEVMEGVWPLAVPLEVEVGIGEDWLAAKG

SEQ ID NO: 1327 - DNA, 2529 bp, synthetic construct
  misc_feature 1..2529: note = Variant of DNA polymerase I from Thermus sp. strain 2.9
  source 1..2529: mol_type = other DNA
atgcaccatcatcatcatcatggcggtagcggcatgttaccgttgttcgaacctaaaggtcgcgtgcttctggttgatggccatcatctcgcgtatcgtaacttctttgccctgaaaggattaaccaccagccgtggcgagccggtacagggtgtctacggctttgcaaagtcgctcctgaaagctctgaaagaagacggtgatgtggtgattgttgtctttgatgcgaaagcgccaagttttcgccacgaagcgtacgaagcttacaaagccgggcgtgctccaacgccggaagactttcctcgccaattggcgcttatgaaggaattagtggatttgcttggcctcgaacgcttggaagttcccggtttcgaggcagacgacgtattagcgactctcgcaaagaaagccgaacgtgagggctatgaagtccagatcttgacagcagatcgcgatcttttccagcttttatctccgcgcatctcggtgttacacccggaagggcatcgtatcaccccggaatggctctgggagaaatatggtttgcgtcccgaacaatgggtggattttcgcgccttagcaggcgatccgagcgacaatattccgggagttaaaggtatcggcgagaagacggcgctcaagctccttaaagaatgggggtcgttggagaacttgcttaagaatttagatcaggtcaaaccagagtcagtgcgtgagaagattcttgcacacctcgaagacctcaaattaagccgcgaattgtcccgtgtacgcaccgatttgccgctcgaagttgatttccgtggccgccgcgaacctgactgggagggtcttaaagcgtttttagagcgtcttgaatttggttcgctcttgcatgaattcggccttttagaaagcccgttaccagccgaagaagcaccttggccaccgcccgaaggcgcgtttttaggttaccgtttgagtcgcccggaaccgatgtgggccgaattatcggctcttgcagcgtctgcccagggacgtgtgtatcgcgcggaagaccctcatggtgcgctccgcggcctcaaagaagtccgtggactccttgccaaagacttagctgttgttgcattgcgcgaaggtcttgatttacctccgactgatgatccaatgcttcttgcgtacctcttggacccgtcaaacacgacgcccgaaggcgtagcccgtcgttacggcggcgagtggaccgaagatgcaggcgagcgcgcgttattggccgaacgtttgcacgccaatttattaggacgtttgcaaggcgaggaacgtctcctctggctttacgaagaagtggagaaaccattgagtcgcgtgctcgcgcatatggaagctaccggtgtcaaattagacgtggcgtatttggagaacctcagccttgaagttgctgccgaaatgcgccgcttggaggaagaagtattccgtttagcaggccactcctttaaccttaattctcgcgatcagttagaacgtgtgttgttcgatgagcttggtctccctcctatcggcaagacagagaagaccggtaaacgtagcacttcagcggcggttttagaagctcttcgcgaagtccatcccattgtggacaagatcttgcagtaccgcgaactcgcgaaattgaaaggcacctatattgaccctcttccggcattagtccacccgaaaacgggacgcctccatacccgcttcaaccaaacagccacggcgaccggtcgtttgtcctcctctgatccaaaccttcagaatattccagtacgtaccccattgggccagaagatccgccgcgcgtttgtagctgaggagggttggcgtttagtggccctcgattatagccaaattgaattacgtgtccttgcccatctttctggcgatgagaacctcatccgcgtgtttcaggaaggcaaagacattcacactcaaacggcaagctggatgtttggattatcagctgaagcgatcgatcctttgatgcgtcgtgcagcgaagaccgttaatttcggtgttctctacggtatgagtgcccatcgtttgtcgcaggaattaggcattccctatgaagaagctgtcgcgttcattcagcgctactttcaaagctatcccaaagttaaagcatggatcgagaagactctcgaagaaggccgcacacgtggttacgtagagaccttatttggacgtcgccgctatgttcccgatttaaacgctcgcgtgaaatctgtccgtgaagccgccgaacgcatggcgttcaacatgcctgtacagggcacggcagctgacctcatgaaacttgcaatggtgcgcctttttccacaattgcgtgaagttggtgcccgcatgctcttgcaggtccacgatgaactcttgttagaagcgccaaaagagcgtgcggaagaggtggcagccctcgcgaaagaggttatggaaggcgtgtggcccttagcggtgcctcttgaagtcgaagttggtattggcgaggattggttggctgccaaaggataatga

SEQ ID NO: 1328 - protein, 841 aa, synthetic construct
  REGION 1..841: note = Variant of DNA polymerase I from Thermus sp. strain 2.9
MHHHHHHGGSGMLPLFEPKGRVLLVDGHHLAYRNFFALKGLTTSRGEPVQGVYGFAKSLLKALKEDGDVVIVVFDAKAPSFRHEAYEAYKAGRAPTPEDFPRQLALMKELVDLLGLERLEVPGFEADDVLATLAKKAEREGYEVQILTADRDLFQLLSPRISVLHPEGHRITPEWLWEKYGLRPEQWVDFRALAGDPSDNIPGVKGIGEKTALKLLKEWGSLENLLKNLDQVKPESVREKILAHLEDLKLSRELSRVRTDLPLEVDFRGRREPDWEGLKAFLERLEFGSLLHEFGLLESPLPAEEAPWPPPEGAFLGYRLSRPEPMWAELSALAASAQGRVYRAEDPHGALRGLKEVRGLLAKDLAVVALREGLDLPPTDDPMLLAYLLDPSNTTPEGVARRYGGEWTEDAGERALLAERLHANLLGRLQGEERLLWLYEEVEKPLSRVLAHMEATGVKLDVAYLENLSLEVAAEMRRLEEEVFRLAGHSFNLNSRDQLERVLFDELGLPPIGKTEKTGKRSTSAAVLEALREVHPIVDKILQYRELAKLKGTYIDPLPALVHPKTGRLHTRFNQTATATGRLSSSDPNLQNIPVRTPLGQKIRRAFVAEEGWRLVALDYSQIELRVLAHLSGDENLIRVFQEGKDIHTQTASWMFGLSAEAIDPLMRRAAKTVNFGVLYGMSAHRLSQELGIPYEEAVAFIQRYFQSYPKVKAWIEKTLEEGRTRGYVETLFGRRRYVPDLNARVKSVREAAERMAFNMPVQGTAADLMKLAMVRLFPQLREVGARMLLQVHDELLLEAPKERAEEVAALAKEVMEGVWPLAVPLEVEVGIGEDWLAAKG

SEQ ID NO: 1329 - DNA, 2529 bp, synthetic construct
  misc_feature 1..2529: note = Variant of DNA polymerase I from Thermus sp. strain 2.9
  source 1..2529: mol_type = other DNA
atgcaccatcatcatcatcatggcggtagcggcatgttaccgttgttcgaacctaaaggtcgcgtgcttctggttgatggccatcatctcgcgtatcgtaacttctttgccctgaaaggattaaccaccagccgtggcgagccggtacagggtgtctacggctttgcaaagtcgctcctgaaagctctgaaagaagacggtgatgtggtgattgttgtctttgatgcgaaagcgccaagttttcgccacgaagcgtacgaagcttacaaagccgggcgtgctccaacgccggaagactttcctcgccaattggcgcttatgaaggaattagtggatttgcttggcctcgaacgcttggaagttcccggtttcgaggcagacgacgtattagcgactctcgcaaagaaagccgaacgtgagggctatgaagtccagatcttgacagcagatcgcgatcttttccagcttttatctccgcgcatctcggtgttacacccggaagggcatcgtatcaccccggaatggctctgggagaaatatggtttgcgtcccgaacaatgggtggattttcgcgccttagcaggcgatccgagcgacaatattccgggagttaaaggtatcggcgagaagacggcgctcaagctccttaaagaatgggggtcgttggagaacttgcttaagaatttagatcaggtcaaaccagagtcagtgcgtgagaagattcttgcacacctcgaagacctcaaattaagccgcgaattgtcccgtgtacgcaccgatttgccgctcgaagttgatttccgtggtcgccgcgaacctgactgggagggtcttaaagcgtttttagagcgtcttgaatttggttcgctcttgcatgaattcggccttttagaaagcccgttaccagccgaagaagcaccttggccaccgcccgaaggcgcgtttttaggttaccgtttgagtcgcccggaaccgatgtgggccgaattattggctcttgcagcgtctgcccagggacgtgtgtatcgcgcggaagaccctcatggtgcgctccgcggcctcaaagaagtccgtggactccttgccaaagacttagctgttgttgcattgcgcgaaggtcttgatttacctccgactgatgatccaatgcttcttgcgtacctcttggacccgtcaaacacgacgcccgaaggcgtagcccgtcgttacggcggcgagtggaccgaagatgcaggcgagcgcgcgttattggccgaacgtttgcacgccaatttattaggacgtttgcaaggcgaggaacgtctcctctggctttacgaagaagtggagaaaccattgagtcgcgtgctcgcgcatatggaagctaccggtgtcaaattagacgtggcgtatttggaggctctcagccttgaagttgctgccgaaatgcgccgcttggaggaagaagtattccgtttagcaggccactcctttaaccttaattctcgcgatcagttagaacgtgtgttgttcgataaccttggtctccctcctatcggcaagacagagaagaccggtaaacgtagcacttcagcggcggttttagaagctcttcgcgaagtccatcccattgtggacaagatcttgcagtaccgcgaactcgcgaaattgaaaggcacctatattgaccctcttccggcattagtccacccgaaaacgggacgcctccatacccgcttcaaccaaacagccacggcgaccggtcgtttgtcctcctctgatccaaaccttcagaatattccagtacgtaccccattgggccagaagatccgccgcgcgtttgtagctgaggagggttggcgtttagtggccctcgattatagccaaattgaattacgtgtccttgcccatctttctggcgatgagaacctcatccgcgtgtttcaggaaggcaaagacattcacactcaaacggcaagctggatgtttggattatcaccagaagcgatcgatcctttgatgcgtcgtgcagcgaagaccattaatttcggtgttctctacggtatgagtgcccatcgtttgtcgcaggaattaggcattccctatgaagaagctgcggcgttcattcagcgctactttcaaagctatcccaaagttaaagcatggatcgagaagactctcgaagaaggccgcacacgtggttacgtagagaccttatttggacgtcgccgctatgttcccgatttaaacgctcgcgtgaaatctgtccgtgaagccgccgaacgcatggcgttcaacatgcctgtacagggcacggcagctgacctcatgaaacttgcaatggtgcgcctttttccacaattgcgtgaagttggtgcccgcatgctcttgcaggtccacgatgaactcttgttagaagcgccaaaagagcgtgcggaagaggtggcagccctcgcgaaagaggttatggaaggcgtgtggcccttagcggtgcctcttgaagtcgaagttggtattggcgaggattggttggctgccaaaggataatga

SEQ ID NO: 1330 - protein, 841 aa, synthetic construct
  REGION 1..841: note = Variant of DNA polymerase I from Thermus sp. strain 2.9
MHHHHHHGGSGMLPLFEPKGRVLLVDGHHLAYRNFFALKGLTTSRGEPVQGVYGFAKSLLKALKEDGDVVIVVFDAKAPSFRHEAYEAYKAGRAPTPEDFPRQLALMKELVDLLGLERLEVPGFEADDVLATLAKKAEREGYEVQILTADRDLFQLLSPRISVLHPEGHRITPEWLWEKYGLRPEQWVDFRALAGDPSDNIPGVKGIGEKTALKLLKEWGSLENLLKNLDQVKPESVREKILAHLEDLKLSRELSRVRTDLPLEVDFRGRREPDWEGLKAFLERLEFGSLLHEFGLLESPLPAEEAPWPPPEGAFLGYRLSRPEPMWAELLALAASAQGRVYRAEDPHGALRGLKEVRGLLAKDLAVVALREGLDLPPTDDPMLLAYLLDPSNTTPEGVARRYGGEWTEDAGERALLAERLHANLLGRLQGEERLLWLYEEVEKPLSRVLAHMEATGVKLDVAYLEALSLEVAAEMRRLEEEVFRLAGHSFNLNSRDQLERVLFDNLGLPPIGKTEKTGKRSTSAAVLEALREVHPIVDKILQYRELAKLKGTYIDPLPALVHPKTGRLHTRFNQTATATGRLSSSDPNLQNIPVRTPLGQKIRRAFVAEEGWRLVALDYSQIELRVLAHLSGDENLIRVFQEGKDIHTQTASWMFGLSPEAIDPLMRRAAKTINFGVLYGMSAHRLSQELGIPYEEAAAFIQRYFQSYPKVKAWIEKTLEEGRTRGYVETLFGRRRYVPDLNARVKSVREAAERMAFNMPVQGTAADLMKLAMVRLFPQLREVGARMLLQVHDELLLEAPKERAEEVAALAKEVMEGVWPLAVPLEVEVGIGEDWLAAKG

SEQ ID NO: 1331 - DNA, 2529 bp, synthetic construct
  misc_feature 1..2529: note = Variant of DNA polymerase I from Thermus sp. strain 2.9
  source 1..2529: mol_type = other DNA
atgcaccatcatcatcatcatggcggtagcggcatgttaccgttgttcgaacctaaaggtcgcgtgcttctggttgatggccatcatctcgcgtatcgtaacttctttgccctgaaaggattaaccaccagccgtggcgagccggtacagggtgtctacggctttgcaaagtcgctcctgaaagctctgaaagaagacggtgatgtggtgattgttgtctttgatgcgaaagcgccaagttttcgccacgaagcgtacgaagcttacaaagccgggcgtgctccaacgccggaagactttcctcgccaattggcgcttatgaaggaattagtggatttgcttggcctcgaacgcttggaagttcccggtttcgaggcagacgacgtattagcgactctcgcaaagaaagccgaacgtgagggctatgaagtccagatcttgacagcagatcgcgatcttttccagcttttatctccgcgcatctcggtgttacacccggaagggcatcgtatcaccccggaatggctctgggagaaatatggtttgcgtcccgaacaatgggtggattttcgcgccttagcaggcgatccgagcgacaatattccgggagttaaaggtatcggcgagaagacggcgctcaagctccttaaagaatgggggtcgttggagaacttgcttaagaatttagatcaggtcaaaccagagtcagtgcgtgagaagattcttgcacacctcgaagacctcaaattaagccgcgaattgtcccgtgtacgcaccgatttgccgctcgaagttgatttccgtggccgccgcgaacctgactgggagggtcttaaagcgtttttagagcgtcttgaatttggttcgctcttgcatgaattcggccttttagaaagcccgttaccagccgaagaagcaccttggccaccgcccgaaggcgcgtttttaggttaccgtttgagtcgcccggaaccgatgtgggccgaattactggctcttgcagcgtctgcccagggacgtgtgtatcgcgcggaagaccctcatggtgcgctcaagggcctcaaagaagtccgtggactccttgccaaagacttagctgttgttgcattgcgcgaaggtcttgatttacctccgactgatgatccaatgcttcttgcgtacctcttggacccgtcaaacacgacgcccgaaggcgtagcccgtcgttacggcggcgagtggaccgaagatgcaggtaagcgcgcgttattggccgaacgtttgcacgccaatttattaggacgtttgcaaggcgaggaacgtctcctctggctttacgaagaagtggagaaaccattgagtcgcgtgctcgcgcatatggaagctaccggtgtcaaattagacgtggcgtatttggaggctctcagccttgaagttgctgccgaaatgcgccgcttggaggaagaagtattccgtttagcaggccactcctttaaccttaattctcgcgatcagttagaacgtgtgttgttcgatgagcttggtctccctcctatcggcaagacagagaagaccggtaaacgtagcacttcagcggcggttttagaagctcttcgcgaagtccatcccattgtggacaagatcttgcagtaccgcgaactcgcgaaattgaaaggcacctatattgaccctcttccggcattagtccacccgaaaacgggacgcctccatacccgcttcaaccaaacagccacggcgaccggtcgtttgtcctcctctgatccaaaccttcagaatattccagtacgtaccccattgggccagaagatccgccgcgcgtttgtagctgaggagggttggcgtttagtggccctcgattatagccaaattgaattacgtgtccttgcccatctttctggcgatgagaacctcatccgcgtgtttcaggaaggcaaagacattcacactcaaacggcaagctggatgtttggattatcagctgaagcgatcgatcctttgatgcgtcgtgcagcgaagaccgttaatttcggtgttctctacggtatgagtgcccatcgtttgtcgcaggaattaggcattccctatgaagaagctgccgcgttcattcagcgctactttcaaagctatcccaaagttaaagcatggatcgagaagactctcgaagaaggccgcacacgtggttacgtagagaccttatttggacgtcgccgctatgttcccgatttaaacgctcgcgtgaaatctgtccgtgaagccgccgaacgcatggcgttcaacatgcctgtacagggcacggcagctgacctcatgaaacttgcaatggtgcgcctttttccacaattgcgtgaagttggtgcccgcatgctcttgcaggtccacgatgaactcttgttagaagcgccaaaagagcgtgcggaagaggtggcagccctcgcgaaagaggttatggaaggcgtgtggcccttagcggtgcctcttgaagtcgaagttggtattggcgaggattggttggctgccaaaggataatga

SEQ ID NO: 1332 - protein, 841 aa, synthetic construct
  REGION 1..841: note = Variant of DNA polymerase I from Thermus sp. strain 2.9
MHHHHHHGGSGMLPLFEPKGRVLLVDGHHLAYRNFFALKGLTTSRGEPVQGVYGFAKSLLKALKEDGDVVIVVFDAKAPSFRHEAYEAYKAGRAPTPEDFPRQLALMKELVDLLGLERLEVPGFEADDVLATLAKKAEREGYEVQILTADRDLFQLLSPRISVLHPEGHRITPEWLWEKYGLRPEQWVDFRALAGDPSDNIPGVKGIGEKTALKLLKEWGSLENLLKNLDQVKPESVREKILAHLEDLKLSRELSRVRTDLPLEVDFRGRREPDWEGLKAFLERLEFGSLLHEFGLLESPLPAEEAPWPPPEGAFLGYRLSRPEPMWAELLALAASAQGRVYRAEDPHGALKGLKEVRGLLAKDLAVVALREGLDLPPTDDPMLLAYLLDPSNTTPEGVARRYGGEWTEDAGKRALLAERLHANLLGRLQGEERLLWLYEEVEKPLSRVLAHMEATGVKLDVAYLEALSLEVAAEMRRLEEEVFRLAGHSFNLNSRDQLERVLFDELGLPPIGKTEKTGKRSTSAAVLEALREVHPIVDKILQYRELAKLKGTYIDPLPALVHPKTGRLHTRFNQTATATGRLSSSDPNLQNIPVRTPLGQKIRRAFVAEEGWRLVALDYSQIELRVLAHLSGDENLIRVFQEGKDIHTQTASWMFGLSAEAIDPLMRRAAKTVNFGVLYGMSAHRLSQELGIPYEEAAAFIQRYFQSYPKVKAWIEKTLEEGRTRGYVETLFGRRRYVPDLNARVKSVREAAERMAFNMPVQGTAADLMKLAMVRLFPQLREVGARMLLQVHDELLLEAPKERAEEVAALAKEVMEGVWPLAVPLEVEVGIGEDWLAAKG

SEQ ID NO: 1333 - DNA, 2529 bp, synthetic construct
  misc_feature 1..2529: note = Variant of DNA polymerase I from Thermus sp. strain 2.9
  source 1..2529: mol_type = other DNA
atgcaccatcatcatcatcatggcggtagcggcatgttaccgttgttcgaacctaaaggtcgcgtgcttctggttgatggccatcatctcgcgtatcgtaacttctttgccctgaaaggattaaccaccagccgtggcgagccggtacagggtgtctacggctttgcaaagtcgctcctgaaagctctgaaagaagacggtgatgtggtgattgttgtctttgatgcgaaagcgccaagttttcgccacgaagcgtacgaagcttacaaagccgggcgtgctccaacgccggaagactttcctcgccaattggcgcttatgaaggaattagtggatttgcttggcctcgaacgcttggaagttcccggtttcgaggcagacgacgtattagcgactctcgcaaagaaagccgaacgtgagggctatgaagtccagatcttgacagcagatcgcgatcttttccagcttttatctccgcgcatctcggtgttacacccggaagggcatcgtatcaccccggaatggctctgggagaaatatggtttgcgtcccgaacaatgggtggattttcgcgccttagcaggcgatccgagcgacaatattccgggagttaaaggtatcggcaggaagacggcgctcaagctccttaaagaatgggggtcgttggagaacttgcttaagaatttagatcaggtcaaaccagagtcagtgcgtgagaagattcttgcacacctcgaagacctcaaattaagccgcgaattgtcccgtgtacgcaccgatttgccgctcgaagttgatttccgtggccgccgcgaacctgactgggagggtcttaaagcgtttttagagcgtcttgaatttggttcgctcttgcatgaattcggccttttagaaagcccgttaccagccgaagaagcaccttggccaccgcccgaaggcgcgtttttaggttaccgtttgagtcgcccggaaccgatgtgggccgaattattggctcttgcagcgtctgcccagggacgtgtgtatcgcgcggaagaccctcatggtgcgctccgcggcctcaaagaagtccgtggactccttgccaaagacttagctgttgttgcattgcgcgaaggtcttgatttacctccgactgatgatccaatgcttcttgcgtacctcttggacccgtcaaacacgacgcccgaaggcgtagcccgtcgttacggcggcgagtggaccgaagatgcaggcgagcgcgcgttattggccgaacgtttgcacgccaatttattaggacgtttgcaaggcgaggaacgtctcctctggctttacgaagaagtggagaaaccattgagtcgcgtgctcgcgcatatggaagctaccggtgtcaaattagacgtggcgtatttggaggcactcagccttgaagttgctgccgaaatgcgccgcttggaggaagaagtattccgtttagcaggccactcctttaaccttaattctcgcgatcagttagaacgtgtgttgttcgatgaacttggtctccctcctatcggcaagacagagaagaccggtaaacgtagcacttcagcggcggttttagaagctcttcgcgaagtccatcccattgtggacaagatcttgcagtaccgcgaactcgcgaaattgaaaggcacctatattgaccctcttccggcattagtccacccgaaaacgggacgcctccatacccgcttcaaccaaacagccacggcgaccggtcgtttgtcctcctctgatccaaaccttcagaatattccagtacgtaccccattgggccagaagatccgccgcgcgtttgtagctgaggagggttggcgtttagtggccctcgattatagccaaattgaattacgtgtccttgcccatctttctggcgatgagaacctcatccgcgtgtttcaggaaggcaaagacattcacactcaaacggcaagctggatgtttggattatcagctgaagcgatcgatcctttgatgcgtcgtgcagcgaagaccatcaatttcggtgttctctacggtatgagtgcccatcgtttgtcgcaggaattaggcattccctatgaagaagctgcggcgttcattcagcgctactttcaaagctatcccaaagttaaagcatggatcgagaagactctcgaagaaggccgcacacgtggttacgtagagaccttatttggacgtcgccgctatgttcccgatttaaacgctcgcgtgaaatctgtccgtgaagccgccgaacgcatggcgttcaacatgcctgtacagggcacggcagctgacctcatgaaacttgcaatggtgcgcctttttccacaattgcgtgaagttggtgcccgcatgctcttgcaggtccacgatgaactcttgttagaagcgccaaaagagcgtgcggaagaggtggcagccctcgcgaaagaggttatggaaggcgtgtggcccttagcggtgcctcttgaagtcgaagttggtattggcgaggattggttggctgccaaaggataatga

SEQ ID NO: 1334 - protein, 841 aa, synthetic construct
  REGION 1..841: note = Variant of DNA polymerase I from Thermus sp. strain 2.9
MHHHHHHGGSGMLPLFEPKGRVLLVDGHHLAYRNFFALKGLTTSRGEPVQGVYGFAKSLLKALKEDGDVVIVVFDAKAPSFRHEAYEAYKAGRAPTPEDFPRQLALMKELVDLLGLERLEVPGFEADDVLATLAKKAEREGYEVQILTADRDLFQLLSPRISVLHPEGHRITPEWLWEKYGLRPEQWVDFRALAGDPSDNIPGVKGIGRKTALKLLKEWGSLENLLKNLDQVKPESVREKILAHLEDLKLSRELSRVRTDLPLEVDFRGRREPDWEGLKAFLERLEFGSLLHEFGLLESPLPAEEAPWPPPEGAFLGYRLSRPEPMWAELLALAASAQGRVYRAEDPHGALRGLKEVRGLLAKDLAVVALREGLDLPPTDDPMLLAYLLDPSNTTPEGVARRYGGEWTEDAGERALLAERLHANLLGRLQGEERLLWLYEEVEKPLSRVLAHMEATGVKLDVAYLEALSLEVAAEMRRLEEEVFRLAGHSFNLNSRDQLERVLFDELGLPPIGKTEKTGKRSTSAAVLEALREVHPIVDKILQYRELAKLKGTYIDPLPALVHPKTGRLHTRFNQTATATGRLSSSDPNLQNIPVRTPLGQKIRRAFVAEEGWRLVALDYSQIELRVLAHLSGDENLIRVFQEGKDIHTQTASWMFGLSAEAIDPLMRRAAKTINFGVLYGMSAHRLSQELGIPYEEAAAFIQRYFQSYPKVKAWIEKTLEEGRTRGYVETLFGRRRYVPDLNARVKSVREAAERMAFNMPVQGTAADLMKLAMVRLFPQLREVGARMLLQVHDELLLEAPKERAEEVAALAKEVMEGVWPLAVPLEVEVGIGEDWLAAKG

SEQ ID NO: 1335 - DNA, 2529 bp, synthetic construct
  misc_feature 1..2529: note = Variant of DNA polymerase I from Thermus sp. strain 2.9
  source 1..2529: mol_type = other DNA
atgcaccatcatcatcatcatggcggtagcggcatgttaccgttgttcgaacctaaaggtcgcgtgcttctggttgatggccatcatctcgcgtatcgtaacttctttgccctgaaaggattaaccaccagccgtggcgagccggtacagggtgtctacggctttgcaaagtcgctcctgaaagctctgaaagaagacggtgatgtggtgattgttgtctttgatgcgaaagcgccaagttttcgccacgaagcgtacgaagcttacaaagccgggcgtgctccaacgccggaagactttcctcgccaattggcgcttatgaaggaattagtggatttgcttggcctcgaacgcttggaagttcccggtttcgaggcagacgacgtattagcgactctcgcaaagaaagccgaacgtgagggctatgaagtccagatcttgacagcagatcgcgatcttttccagcttttatctccgcgcatctcggtgttacacccggaagggcatcgtatcaccccggaatggctctgggagaaatatggtttgcgtcccgaacaatgggtggattttcgcgccttagcaggcgatccgagcgacaatattccgggagttaaaggtatcggcgagaagacggcgctcaagctccttaaagaatgggggtcgttggagaacttgcttaagaatttagatcaggtcaaaccagagtcagtgcgtgagaagattcttgcacacctcgaagacctcaaattaagccgcgaattgtcccgtgtacgcaccgatttgccgctcgaagttgatttccgtggccgccgcgaacctgactgggagggtcttaaagcgtttttagagcgtcttgaatttggttcgctcttgcatgaattcggccttttagaaagcccgttaccagccgaagaagcaccttggccaccgcccgaaggcgcgtttttaggttaccgtttgagtcgcccggaaccgatgtgggccgaattattggctcttgcagcgtctgcccagggacgtgtgtatcgcgcggaagaccctcatggtgcgctccgcggcctcaaagaagtccgtggactccttgccaaagacttagctgttgttgcattgcgcgaaggtcttgatttacctccgactgatgatccaatgcttcttgcgtacctcttggacccgtcaaacacgacgcccgaaggcgtagcccgtcgttacggcggcgagtggaccgaagatgcaggcgagcgcgcgttattggccgaacgtttgcacgccaatttattaggacgtttgcaaggcgaggaacgtctcctctggctttacgaagaagtggagaaaccattgagtcgcgtgctcgcgcatatggaagctaccggtgtcaaattagacgtggcgtatttggaggcactcagccttgaagttgctgccgaaatgcgccgcttggaggaagaagtattccgtttagcaggccactcctttaaccttaattctcgcgatcagttagaacgtgtgttgttcgatgaacttggtctccctcctatcggcaagacagagaagaccggtaaacgtagcacttcagcggcggttttagaagctcttcgcgaagtccatcccattgtggacaagatcttgcagtaccgcgaactcgcgaaattgaaaggcacctatattgaccctcttccggcattagtccacccgaaaacgggacgcctccatacccgcttcaaccaaacagccacggcgaccggtcgtttgtcctcctctgatccaaaccttcagaatattccagtacgtaccccattgggccagaagatccgccgcgcgtttgtagctgaggagggttggcgtttagtggccctcgattatagccaaattgaattacgtgtccttgcccatctttctggcgatgagaacctcatccgcgtgtttgaggaaggcaaagacattcacactcaaacggcaagctggatgtttggattatcagctgaagcgatcgatcctttgatgcgtcgtgcagcgaagaccatcaatttcggtgttctctacggtatgagtgcccatcgtttgtcgcaggaattaggcattccctatgaagaagctgcggcgttcattcagcgctactttcaaagctatcccaaagttaaagcatggatcgagaagactctcgaagaaggccgcacacgtggttacgtagagaccttatttggacgtcgccgctatgttcccgatttaaacgctcgcgtgaaatctgtccgtgaagccgccgaacgcatggcgttcaacatgcctgtacagggcacggcagctgacctcatgaaacttgcaatggtgcgcctttttccacaattgcgtgaagttggtgcccgcatgctcttgcaggtccacgatgaactcttgttagaagcgccaaaagagcgtgcggaagaggtggcagccctcgcgaaagaggttatggaaggcgtgtggcccttagcggtgcctcttgaagtcgaagttggtattggcgaggattggttggctgccaaaggataatga

SEQ ID NO: 1336 - protein, 841 aa, synthetic construct
  REGION 1..841: note = Variant of DNA polymerase I from Thermus sp. strain 2.9
MHHHHHHGGSGMLPLFEPKGRVLLVDGHHLAYRNFFALKGLTTSRGEPVQGVYGFAKSLLKALKEDGDVVIVVFDAKAPSFRHEAYEAYKAGRAPTPEDFPRQLALMKELVDLLGLERLEVPGFEADDVLATLAKKAEREGYEVQILTADRDLFQLLSPRISVLHPEGHRITPEWLWEKYGLRPEQWVDFRALAGDPSDNIPGVKGIGEKTALKLLKEWGSLENLLKNLDQVKPESVREKILAHLEDLKLSRELSRVRTDLPLEVDFRGRREPDWEGLKAFLERLEFGSLLHEFGLLESPLPAEEAPWPPPEGAFLGYRLSRPEPMWAELLALAASAQGRVYRAEDPHGALRGLKEVRGLLAKDLAVVALREGLDLPPTDDPMLLAYLLDPSNTTPEGVARRYGGEWTEDAGERALLAERLHANLLGRLQGEERLLWLYEEVEKPLSRVLAHMEATGVKLDVAYLEALSLEVAAEMRRLEEEVFRLAGHSFNLNSRDQLERVLFDELGLPPIGKTEKTGKRSTSAAVLEALREVHPIVDKILQYRELAKLKGTYIDPLPALVHPKTGRLHTRFNQTATATGRLSSSDPNLQNIPVRTPLGQKIRRAFVAEEGWRLVALDYSQIELRVLAHLSGDENLIRVFEEGKDIHTQTASWMFGLSAEAIDPLMRRAAKTINFGVLYGMSAHRLSQELGIPYEEAAAFIQRYFQSYPKVKAWIEKTLEEGRTRGYVETLFGRRRYVPDLNARVKSVREAAERMAFNMPVQGTAADLMKLAMVRLFPQLREVGARMLLQVHDELLLEAPKERAEEVAALAKEVMEGVWPLAVPLEVEVGIGEDWLAAKG

SEQ ID NO: 1337 - DNA, 2529 bp, synthetic construct
  misc_feature 1..2529: note = Variant of DNA polymerase I from Thermus sp. strain 2.9
  source 1..2529: mol_type = other DNA
atgcaccatcatcatcatcatggcggtagcggcatgttaccgttgttcgaacctaaaggtcgcgtgcttctggttgatggccatcatctcgcgtatcgtaacttctttgccctgaaaggattaaccaccagccgtggcgagccggtacagggtgtctacggctttgcaaagtcgctcctgaaagctctgaaagaagacggtgatgtggtgattgttgtctttgatgcgaaagcgccaagttttcgccacgaagcgtacgaagcttacaaagccgggcgtgctccaacgccggaagactttcctcgccaattggcgcttatgaaggaattagtggatttgcttggcctcgaacgcttggaagttcccggtttcgaggcagacgacgtattagcgactctcgcaaagaaagccgaacgtgagggctatgaagtccagatcttgacagcagatcgcgatcttttccagcttttatctccgcgcatctcggtgttacacccggaagggcatcgtatcaccccggaatggctctgggagaaatatggtttgcgtcccgaacaatgggtggattttcgcgccttagcaggcgatccgagcgacaatattccgggagttaaaggtatcggcgagaagacggcgctcaagctccttaaagaatgggggtcgttggagaacttgcttaagaatttagatcaggtcaaaccagagtcagtgcgtgagaagattcttgcacacctcgaagacctcaaattaagcctggaattgtcccgtgtacgcaccgatttgccgctcgaagttgatttccgtggtcgccgcgaacctgactgggagggtcttaaagcgtttttagagcgtcttgaatttggttcgctcttgcatgaattcggccttttagaaagcccgttaccagccgaagaagcaccttggccaccgcccgaaggcgcgtttttaggttaccgtttgagtcgcccggaaccgatgtgggccgaattactggctcttgcagcgtctgcccagggacgtgtgtatcgcgcggaagaccctcatggtgcgctccgtggcctcaaagaagtccgtggactccttgccaaagacttagctgttgttgcattgcgcgaaggtcttgatttacctccgactgatgatccaatgcttcttgcgtacctcttggacccgtcaaacacgacgcccgaaggcgtagcccgtcgttacggcggcgagtggaccgaagatgcagctgagcgcgcgttattggccgaacgtttgcacgccaatttattaggacgtttgcaaggcgaggaacgtctcctctggctttacgaagaagtggagaaaccattgagtcgcgtgctcgcgcatatggaagctaccggtgtcaaattagacgtggcgtatttggagaacctcagccttgaagttgctgccgaaatgcgccgcttggaggaagaagtattccgtttagcaggccactcctttaaccttaattctcgcgatcagttagaacgtgtgttgttcgatgaacttggtctccctcctatcggcaagacagagaagaccggtaaacgtagcacttcagcggcggttttagaagctcttcgcgaagtccatcccattgtggacaagatcttgcagtaccgcgaactcgcgaaattgaaaggcacctatattgaccctcttccggcattagtccacccgaaaacgggacgcctccatacccgcttcaaccaaacagccacggcgaccggtcgtttgtcctcctctgatccaaaccttcagaatattccagtacgtaccccattgggccagaagatccgccgcgcgtttgtagctgaggagggttggcgtttagtggccctcgattatagccaaattgaattacgtgtccttgcccatctttctggcgatgagaacctcatccgcgtgtttcaggaaggcaaagacattcacactcaaacggcaagctggatgtttggattatcagcagaagcgatcgatcctttgatgcgtcgtgcagcgaagaccattaatttcggtgttctctacggtatgagtgcccatcgtttgtcgcaggaattaggcattccctatgaagaagctgccgcgttcattcagcgctactttcaaagctatcccaaagttaaagcatggatcgagaagactctcgaagaaggccgcacacgtggttacgtagagaccttatttggacgtcgccgctatgttcccgatttaaacgctcgcgtgaaatctgtccgtgaagccgccgaacgcatggcgttcaacatgcctgtacagggcacggcagctgacctcatgaaacttgcaatggtgcgcctttttccacaattgcgtgaagttggtgcccgcatgctcttgcaggtccacgatgaactcttgttagaagcgccaaaagagcgtgcggaagaggtggcagccctcgcgaaagaggttatggaaggcgtgtggcccttagcggtgcctcttgaagtcgaagttggtattggcgaggattggttggctgccaaaggataatga

SEQ ID NO: 1338 - protein, 841 aa, synthetic construct
  REGION 1..841: note = Variant of DNA polymerase I from Thermus sp. strain 2.9
MHHHHHHGGSGMLPLFEPKGRVLLVDGHHLAYRNFFALKGLTTSRGEPVQGVYGFAKSLLKALKEDGDVVIVVFDAKAPSFRHEAYEAYKAGRAPTPEDFPRQLALMKELVDLLGLERLEVPGFEADDVLATLAKKAEREGYEVQILTADRDLFQLLSPRISVLHPEGHRITPEWLWEKYGLRPEQWVDFRALAGDPSDNIPGVKGIGEKTALKLLKEWGSLENLLKNLDQVKPESVREKILAHLEDLKLSLELSRVRTDLPLEVDFRGRREPDWEGLKAFLERLEFGSLLHEFGLLESPLPAEEAPWPPPEGAFLGYRLSRPEPMWAELLALAASAQGRVYRAEDPHGALRGLKEVRGLLAKDLAVVALREGLDLPPTDDPMLLAYLLDPSNTTPEGVARRYGGEWTEDAAERALLAERLHANLLGRLQGEERLLWLYEEVEKPLSRVLAHMEATGVKLDVAYLENLSLEVAAEMRRLEEEVFRLAGHSFNLNSRDQLERVLFDELGLPPIGKTEKTGKRSTSAAVLEALREVHPIVDKILQYRELAKLKGTYIDPLPALVHPKTGRLHTRFNQTATATGRLSSSDPNLQNIPVRTPLGQKIRRAFVAEEGWRLVALDYSQIELRVLAHLSGDENLIRVFQEGKDIHTQTASWMFGLSAEAIDPLMRRAAKTINFGVLYGMSAHRLSQELGIPYEEAAAFIQRYFQSYPKVKAWIEKTLEEGRTRGYVETLFGRRRYVPDLNARVKSVREAAERMAFNMPVQGTAADLMKLAMVRLFPQLREVGARMLLQVHDELLLEAPKERAEEVAALAKEVMEGVWPLAVPLEVEVGIGEDWLAAKG

SEQ ID NO: 1339 - DNA, 2529 bp, synthetic construct
  misc_feature 1..2529: note = Variant of DNA polymerase I from Thermus sp. strain 2.9
  source 1..2529: mol_type = other DNA
atgcaccatcatcatcatcatggcggtagcggcatgttaccgttgttcgaacctaaaggtcgcgtgcttctggttgatggccatcatctcgcgtatcgtaacttctttgccctgaaaggattaaccaccagccgtggcgagccggtacagggtgtctacggctttgcaaagtcgctcctgaaagctctgaaagaagacggtgatgtggtgattgttgtctttgatgcgaaagcgccaagttttcgccacgaagcgtacgaagcttacaaagccgggcgtgctccaacgccggaagactttcctcgccaattggcgcttatgaaggaattagtggatttgcttggcctcgaacgcttggaagttcccggtttcgaggcagacgacgtattagcgactctcgcaaagaaagccgaacgtgagggctatgaagtccagatcttgacagcagatcgcgatcttttccagcttttatctccgcgcatctcggtgttacacccggaagggcatcgtatcaccccggaatggctctgggagaaatatggtttgcgtcccgaacaatgggtggattttcgcgccttagcaggcgatccgagcgacaatattccgggagttaaaggtatcggcgagaagacggcgctcaagctccttaaagaatgggggtcgttggagaacttgcttaagaatttagatcaggtcaaaccagagtcagtgcgtgagaagattcttgcacacctcgaagacctcaaattaagcctggaattgtcccgtgtacgcaccgatttgccgctcgaagttgatttccgtggccgccgcgaacctgactgggagggtcttaaagcgtttttagagcgtcttgaatttggttcgctcttgcatgaattcggccttttagaaagcccgttaccagccgaagaagcaccttggccaccgcccgaaggcgcgtttttaggttaccgtttgagtcgcccggaaccgatgtgggccgaattattggctcttgcagcgtctgcccaggggcgtgtgtatcgcgcggaagaccctcatggtgcgctcaagggcctcaaagaagtccgtggactccttgccaaagacttagctgttgttgcattgcgcgaaggtcttgatttacctccgactgatgatccaatgcttcttgcgtacctcttggacccgtcaaacacgacgcccgaaggcgtagcccgtcgttacggcggcgagtggaccgaagatgcaggcgagcgcgcgttattggccgaacgtttgcacgccaatttattaggacgtttgcaaggcgaggaacgtctcctctggctttacgaagaagtggagaaaccattgagtcgcgtgctcgcgcatatggaagctaccggtgtcaaattagacgtggcgtatttggaggcactcagccttgaagttgctgccgaaatgcgccgcttggaggaagaagtattccgtttagcaggccactcctttaaccttaattctcgcgatcagttagaacgtgtgttgttcgataaccttggtctccctcctatcggcaagacagagaagaccggtaaacgtagcacttcagcggcggttttagaagctcttcgcgaagtccatcccattgtggacaagatcttgcagtaccgcgaactcgcgaaattgaaaggcacctatattgaccctcttccggcattagtccacccgaaaacgggacgcctccatacccgcttcaaccaaacagccacggcgaccggtcgtttgtcctcctctgatccaaaccttcagaatattccagtacgtaccccattgggccagaagatccgccgcgcgtttgtagctgaggagggttggcgtttagtggccctcgattatagccaaattgaattacgtgtccttgcccatctttctggcgatgagaacctcatccgcgtgtttcaggaaggcaaagacattcacactcaaacggcaagctggatgtttggattatcagctgaagcgatcgatcctttgatgcgtcgtgcagcgaagaccatcaatttcggtgttctctacggtatgagtgcccatcgtttgtcgcaggaattaggcattccctatgaagaagctgcggcgttcattcagcgctactttcaaagctatcccaaagttaaagcatggatcgagaagactctcgaagaaggccgcacacgtggttacgtagagaccttatttggacgtcgccgctatgttcccgatttaaacgctcgcgtgaaatctgtccgtgaagccgccgaacgcatggcgttcaacatgcctgtacagggcacggcagctgacctcatgaaacttgcaatggtgcgcctttttccacaattgcgtgaagttggtgcccgcatgctcttgcaggtccacgatgaactcttgttagaagcgccaaaagagcgtgcggaagaggtggcagccctcgcgaaagaggttatggaaggcgtgtggcccttagcggtgcctcttgaagtcgaagttggtattggcgaggattggttggctgccaaaggataatga

SEQ ID NO: 1340 - protein, 841 aa, synthetic construct
  REGION 1..841: note = Variant of DNA polymerase I from Thermus sp. strain 2.9
MHHHHHHGGSGMLPLFEPKGRVLLVDGHHLAYRNFFALKGLTTSRGEPVQGVYGFAKSLLKALKEDGDVVIVVFDAKAPSFRHEAYEAYKAGRAPTPEDFPRQLALMKELVDLLGLERLEVPGFEADDVLATLAKKAEREGYEVQILTADRDLFQLLSPRISVLHPEGHRITPEWLWEKYGLRPEQWVDFRALAGDPSDNIPGVKGIGEKTALKLLKEWGSLENLLKNLDQVKPESVREKILAHLEDLKLSLELSRVRTDLPLEVDFRGRREPDWEGLKAFLERLEFGSLLHEFGLLESPLPAEEAPWPPPEGAFLGYRLSRPEPMWAELLALAASAQGRVYRAEDPHGALKGLKEVRGLLAKDLAVVALREGLDLPPTDDPMLLAYLLDPSNTTPEGVARRYGGEWTEDAGERALLAERLHANLLGRLQGEERLLWLYEEVEKPLSRVLAHMEATGVKLDVAYLEALSLEVAAEMRRLEEEVFRLAGHSFNLNSRDQLERVLFDNLGLPPIGKTEKTGKRSTSAAVLEALREVHPIVDKILQYRELAKLKGTYIDPLPALVHPKTGRLHTRFNQTATATGRLSSSDPNLQNIPVRTPLGQKIRRAFVAEEGWRLVALDYSQIELRVLAHLSGDENLIRVFQEGKDIHTQTASWMFGLSAEAIDPLMRRAAKTINFGVLYGMSAHRLSQELGIPYEEAAAFIQRYFQSYPKVKAWIEKTLEEGRTRGYVETLFGRRRYVPDLNARVKSVREAAERMAFNMPVQGTAADLMKLAMVRLFPQLREVGARMLLQVHDELLLEAPKERAEEVAALAKEVMEGVWPLAVPLEVEVGIGEDWLAAKG

SEQ ID NO: 1341 - DNA, 2529 bp, synthetic construct
  misc_feature 1..2529: note = Variant of DNA polymerase I from Thermus sp. strain 2.9
  source 1..2529: mol_type = other DNA
atgcaccatcatcatcatcatggcggtagcggcatgttaccgttgttcgaacctaaaggtcgcgtgcttctggttgatggccatcatctcgcgtatcgtaacttctttgccctgaaaggattaaccaccagccgtggcgagccggtacagggtgtctacggctttgcaaagtcgctcctgaaagctctgaaagaagacggtgatgtggtgattgttgtctttgatgcgaaagcgccaagttttcgccacgaagcgtacgaagcttacaaagccgggcgtgctccaacgccggaagactttcctcgccaattggcgcttatgaaggaattagtggatttgcttggcctcgaacgcttggaagttcccggtttcgaggcagacgacgtattagcgactctcgcaaagaaagccgaacgtgagggctatgaagtccagatcttgacagcagatcgcgatcttttccagcttttatctccgcgcatctcggtgttacacccggaagggcatcgtatcaccccggaatggctctgggagaaatatggtttgcgtcccgaacaatgggtggattttcgcgccttagcaggcgatccgagcgacaatattccgggagttaaaggtatcggcgagaagacggcgctcaagctccttaaagaatgggggtcgttggagaacttgcttaagaatttagatcaggtcaaaccagagtcagtgcgtgagaagattcttgcacacctcgaagacctcaaattaagccgcgaattgtcccgtgtacgcaccgatttgccgctcgaagttgatttccgtggtcgccgcgaacctgactgggagggtcttaaagcgtttttagagcgtcttgaatttggttcgctcttgcatgaattcggccttttagaaagcccgttaccagccgaagaagcaccttggccaccgcccgaaggcgcgtttttaggttaccgtttgagtcgcccggaaccgatgtgggccgaattactggctcttgcagcgtctgcccaggagcgtgtgtatcgcgcggaagaccctcatggtgcgctccgtggcctcaaagaagtccgtggactccttgccaaagacttagctgttgttgcattgcgcgaaggtcttgatttacctccgactgatgatccaatgcttcttgcgtacctcttggacccgtcaaacacgacgcccgaaggcgtagcccgtcgttacggcggcgagtggaccgaagatgcaggtgagcgcgcgttattggccgaacgtttgcacgccaatttattaggacgtttgcaaggcgaggaacgtctcctctggctttacgaagaagtggagaaaccattgagtcgcgtgctcgcgcatatggaagctaccggtgtcaaattagacgtggcgtatttggaggctctcagccttgaagttgctgccgaaatgcgccgcttggaggaagaagtattccgtttagcaggccactcctttaaccttaattctcgcgatcagttagaacgtgtgttgttcgatgaacttggtctccctcctatcggcaagacagagaagaccggtaaacgtagcacttcagcggcggttttagaagctcttcgcgaagtccatcccattgtggacaagatcttgcagtaccgcgaactcgcgaaattgaaaggcacctatattgaccctcttccggcattagtccacccgaaaacgggacgcctccatacccgcttcaaccaaacagccacggcgaccggtcgtttgtcctcctctgatccaaaccttcagaatattccagtacgtaccccattgggccagaagatccgccgcgcgtttgtagctgaggagggttggcgtttagtggccctcgattatagccaaattgaattacgtgtccttgcccatctttctggcgatgagaacctcatccgcgtgtttcaggaaggcaaagacattcacactcaaacggcaagctggatgtttggattatcaccagaagcgatcgatcctttgatgcgtcgtgcagcgaagaccattaatttcggtgttctctacggtatgagtgcccatcgtttgtcgcaggaattaggcattccctatgaagaagctgcggcgttcattcagcgctactttcaaagctatcccaaagttaaagcatggatcgagaagactctcgaagaaggccgcacacgtggttacgtagagaccttatttggacgtcgccgctatgttcccgatttaaacgctcgcgtgaaatctgtccgtgaagccgccgaacgcatggcgttcaacatgcctgtacagggcacggcagctgacctcatgaaacttgcaatggtgcgcctttttccacaattgcgtgaagttggtgcccgcatgctcttgcaggtccacgatgaactcttgttagaagcgccaaaagagcgtgcggaagaggtggcagccctcgcgaaagaggttatggaaggcgtgtggcccttagcggtgcctcttgaagtcgaagttggtattggcgaggattggttggctgccaaaggataatga

SEQ ID NO: 1342 - protein, 841 aa, synthetic construct
  REGION 1..841: note = Variant of DNA polymerase I from Thermus sp. strain 2.9
MHHHHHHGGSGMLPLFEPKGRVLLVDGHHLAYRNFFALKGLTTSRGEPVQGVYGFAKSLLKALKEDGDVVIVVFDAKAPSFRHEAYEAYKAGRAPTPEDFPRQLALMKELVDLLGLERLEVPGFEADDVLATLAKKAEREGYEVQILTADRDLFQLLSPRISVLHPEGHRITPEWLWEKYGLRPEQWVDFRALAGDPSDNIPGVKGIGEKTALKLLKEWGSLENLLKNLDQVKPESVREKILAHLEDLKLSRELSRVRTDLPLEVDFRGRREPDWEGLKAFLERLEFGSLLHEFGLLESPLPAEEAPWPPPEGAFLGYRLSRPEPMWAELLALAASAQERVYRAEDPHGALRGLKEVRGLLAKDLAVVALREGLDLPPTDDPMLLAYLLDPSNTTPEGVARRYGGEWTEDAGERALLAERLHANLLGRLQGEERLLWLYEEVEKPLSRVLAHMEATGVKLDVAYLEALSLEVAAEMRRLEEEVFRLAGHSFNLNSRDQLERVLFDELGLPPIGKTEKTGKRSTSAAVLEALREVHPIVDKILQYRELAKLKGTYIDPLPALVHPKTGRLHTRFNQTATATGRLSSSDPNLQNIPVRTPLGQKIRRAFVAEEGWRLVALDYSQIELRVLAHLSGDENLIRVFQEGKDIHTQTASWMFGLSPEAIDPLMRRAAKTINFGVLYGMSAHRLSQELGIPYEEAAAFIQRYFQSYPKVKAWIEKTLEEGRTRGYVETLFGRRRYVPDLNARVKSVREAAERMAFNMPVQGTAADLMKLAMVRLFPQLREVGARMLLQVHDELLLEAPKERAEEVAALAKEVMEGVWPLAVPLEVEVGIGEDWLAAKG

SEQ ID NO: 1343 - DNA, 2529 bp, synthetic construct
  misc_feature 1..2529: note = Variant of DNA polymerase I from Thermus sp. strain 2.9
  source 1..2529: mol_type = other DNA
atgcaccatcatcatcatcatggcggtagcggcatgttaccgttgttcgaacctaaaggtcgcgtgcttctggttgatggccatcatctcgcgtatcgtaacttctttgccctggttggattaaccaccagccgtggcgagccggtacagggtgtctacggctttgcaaagtcgctcctgaaagctctgaaagaagacggtgatgtggtgattgttgtctttgatgcgaaagcgccaagttttcgccacgaagcgtacgaagcttacaaagccgggcgtgctccaacgccggaagactttcctcgccaattggcgcttatgaaggaattagtggatttgcttggcctcgaacgcttggaagttcccggtttcgaggcagacgacgtattagcgactctcgcaaagaaagccgaacgtgagggctatgaagtccagatcttgacagcagatcgcgatcttttccagcttttatctccgcgcatctcggtgttacacccggaagggcatcgtatcaccccggaatggctctgggagaaatatggtttgcgtcccgaacaatgggtggattttcgcgccttagcaggcgatccgagcgacaatattccgggagttaaaggtatcggcgagaagacggcgctcaagctccttaaagaatgggggtcgttggagaacttgcttaagaatttagatcaggtcaaaccagagtcagtgcgtgagaagattcttgcacacctcgaagacctcaaattaagccgcgaattgtcccgtgtacgcaccgatttgccgctcgaagttgatttccgtggccgccgcgaacctgactgggagggtcttaaagcgtttttagagcgtcttgaatttggttcgctcttgcatgaattcggccttttagaaagcccgttaccagccgaagaagcaccttggccaccgcccgaaggcgcgtttttaggttaccgtttgagtcgcccggaaccgatgtgggccgaattattggctcttgcagcgtctgcccagggacgtgtgtatcgcgcggaagaccctcatggtgcgctccgcggcctcaaagaagtccgtggactccttgccaaagacttagctgttgttgcattgcgcgaaggtcttgatttacctccgactgatgatccaatgcttcttgcgtacctcttggacccgtcaaacacgacgcccgaaggcgtagcccgtcgttacggcggcgagtggaccgaagatgcaggcgagcgcgcgttattggccgaacgtttgcacgccaatttattaggacgtttgcaaggcgaggaacgtctcctctggctttacgaagaagtggagaaaccattgagtcgcgtgctcgcgcatatggaagctaccggtgtcaaattagacgtggcgtatttggaggcactcagccttgaagttgctgccgaaatgcgccgcttggaggaagaagtattccgtttagcaggccactcctttaaccttaattctcgcgatcagttagaacgtgtgttgttcgatgaacttggtctccctcctatcggcaagacagagaagaccggtaaacgtagcacttcagcggcggttttagaagctcttcgcgaagtccatcccattgtggacaagatcttgcagtaccgcgaactcgcgaaattgaaaggcacctatattgaccctcttccggcattagtccacccgaaaacgggacgcctccatacccgcttcaaccaaacagccacggcgaccggtcgtttgtcctcctctgatccaaaccttcagaatattccagtacgtaccccattgggccagaagatccgccgcgcgtttgtagctgaggagggttggcgtttagtggccctcgattatagccaaattgaattacgtgtccttgcccatctttctggcgatgagaacctcatccgcgtgtttcaggaaggcaaagacattcacactcaaacggcaagctggatgtttggattatcagctgaagcgatcgatcctttgatgcgtcgtgcagcgaagaccatcaatttcggtgttctctacggtatgagtgcccatcgtttgtcgcaggaattaggcattccctatgaagaagctgcggcgttcattcagcgctactttcaaagctatcccaaagttaaagcatggatcgagaagactctcgaagaaggccgcacacgtggttacgtagagaccttatttggacgtcgccgctatgttcccgatttaaacgctcgcgtgaaatctgtccgtgaagccgccgaacgcatggcgttcaacatgcctgtacagggcacggcagctgacctcatgaaacttgcaatggtgcgcctttttccacaattgcgtgaagttggtgcccgcatgctcttgcaggtccacgatgaactcttgttagaagcgccaaaagagcgtgcggaagaggtggcagccctcgcgaaagaggttatggaaggcgtgtggcccttagcggtgcctcttgaagtcgaagttggtattggcgaggattggttggctgccaaaggataatga

SEQ ID NO: 1344 - protein, 841 aa, synthetic construct
  REGION 1..841: note = Variant of DNA polymerase I from Thermus sp. strain 2.9
MHHHHHHGGSGMLPLFEPKGRVLLVDGHHLAYRNFFALVGLTTSRGEPVQGVYGFAKSLLKALKEDGDVVIVVFDAKAPSFRHEAYEAYKAGRAPTPEDFPRQLALMKELVDLLGLERLEVPGFEADDVLATLAKKAEREGYEVQILTADRDLFQLLSPRISVLHPEGHRITPEWLWEKYGLRPEQWVDFRALAGDPSDNIPGVKGIGEKTALKLLKEWGSLENLLKNLDQVKPESVREKILAHLEDLKLSRELSRVRTDLPLEVDFRGRREPDWEGLKAFLERLEFGSLLHEFGLLESPLPAEEAPWPPPEGAFLGYRLSRPEPMWAELLALAASAQGRVYRAEDPHGALRGLKEVRGLLAKDLAVVALREGLDLPPTDDPMLLAYLLDPSNTTPEGVARRYGGEWTEDAGERALLAERLHANLLGRLQGEERLLWLYEEVEKPLSRVLAHMEATGVKLDVAYLEALSLEVAAEMRRLEEEVFRLAGHSFNLNSRDQLERVLFDELGLPPIGKTEKTGKRSTSAAVLEALREVHPIVDKILQYRELAKLKGTYIDPLPALVHPKTGRLHTRFNQTATATGRLSSSDPNLQNIPVRTPLGQKIRRAFVAEEGWRLVALDYSQIELRVLAHLSGDENLIRVFQEGKDIHTQTASWMFGLSAEAIDPLMRRAAKTINFGVLYGMSAHRLSQELGIPYEEAAAFIQRYFQSYPKVKAWIEKTLEEGRTRGYVETLFGRRRYVPDLNARVKSVREAAERMAFNMPVQGTAADLMKLAMVRLFPQLREVGARMLLQVHDELLLEAPKERAEEVAALAKEVMEGVWPLAVPLEVEVGIGEDWLAAKG

SEQ ID NO: 1345 - DNA, 2529 bp, synthetic construct
  misc_feature 1..2529: note = Variant of DNA polymerase I from Thermus sp. strain 2.9
  source 1..2529: mol_type = other DNA
atgcaccatcatcatcatcatggcggtagcggcatgttaccgttgttcgaacctaaaggtcgcgtgcttctggttgatggccatcatctcgcgtatcgtaacttctttgccctgaaaggattaaccaccagccgtggcgagccggtacagggtgtctacggctttgcaaagtcgctcctgaaagctctgaaagaagacggtgatgtggtgattgttgtctttgatgcgaaagcgccaagttttcgccacgaagcgtacgaagcttacaaagccgggcgtgctccaacgccggaagactttcctcgccaattggcgcttatgaaggaattagtggatttgcttggcctcgaacgcttggaagttcccggtttcgaggcagacgacgtattagcgactctcgcaaagaaagccgaacgtgagggctatgaagtccagatcttgacagcagatcgcgatcttttccagcttttatctccgcgcatctcggtgttacacccggaagggcatcgtatcaccccggaatggctctgggagaaatatggtttgcgtcccgaacaatgggtggattttcgcgccttagcaggcgatccgagcgacaatattccgggagttaaaggtatcggcgagaagacggcgctcaagctccttaaagaatgggggtcgttggagaacttgcttaagaatttagatcaggtcaaaccagagtcagtgcgtgagaagattcttgcacacctcgaagacctcaaattaagcctggaattgtcccgtgtacgcaccgatttgccgctcgaagttgatttccgtggtcgccgcgaacctgactgggagggtcttaaagcgtttttagagcgtcttgaatttggttcgctcttgcatgaattcggccttttagaaagcccgttaccagccgaagaagcaccttggccaccgcccgaaggcgcgtttttaggttaccgtttgagtcgcccggaaccgatgtgggccgaattactggctcttgcagcgtctgcccaggggcgtgcgtatcgcgcggaagaccctcatggtgcgctccgcggcctcaaagaagtccgtggactccttgccaaagacttagctgttgttgcattgcgcgaaggtcttgatttacctccgactgatgatccaatgcttcttgcgtacctcttggacccgtcaaacacgacgcccgaaggcgtagcccgtcgttacggcggcgagtggaccgaagatgcagctaagcgcgcgttattggccgaacgtttgcacgccaatttattaggacgtttgcaaggcgaggaacgtctcctctggctttacgaagaagtggagaaaccattgagtcgcgtgctcgcgcatatggaagctaccggtgtcaaattagacgtggcgtatttggaggcactcagccttgaagttgctgccgaaatgcgccgcttggaggaagaagtattccgtttagcaggccactcctttaaccttaattctcgcgatcagttagaacgtgtgttgttcgatgaacttggtctccctcctatcggcaagacagagaagaccggtaaacgtagcacttcagcggcggttttagaagctcttcgcgaagtccatcccattgtggacaagatcttgcagtaccgcgaactcgcgaaattgaaaggcacctatattgaccctcttccggcattagtccacccgaaaacgggacgcctccatacccgcttcaaccaaacagccacggcgaccggtcgtttgtcctcctctgatccaaaccttcagaatattccagtacgtaccccattgggccagaagatccgccgcgcgtttgtagctgaggagggttggcgtttagtggccctcgattatagccaaattgaattacgtgtccttgcccatctttctggcgatgagaacctcatccgcgtgtttcaggaaggcaaagacattcacactcaaacggcaagctggatgtttggattatcagctgaagcgatcgatcctttgatgcgtcgtgcagcgaagaccattaatttcggtgttctctacggtatgagtgcccatcgtttgtcgcaggaattaggcattccctatgaagaagctgcggcgttcattcagcgctactttcaaagctatcccaaagttaaagcatggatcgagaagactctcgaagaaggccgcacacgtggttacgtagagaccttatttggacgtcgccgctatgttcccgatttaaacgctcgcgtgaaatctgtccgtgaagccgccgaacgcatggcgttcaacatgcctgtacagggcacggcagctgacctcatgaaacttgcaatggtgcgcctttttccacaattgcgtgaagttggtgcccgcatgctcttgcaggtccacgatgaactcttgttagaagcgccaaaagagcgtgcggaagaggtggcagccctcgcgaaagaggttatggaaggcgtgtggcccttagcggtgcctcttgaagtcgaagttggtattggcgaggattggttggctgccaaaggataatga

SEQ ID NO: 1346 - protein, 841 aa, synthetic construct
  REGION 1..841: note = Variant of DNA polymerase I from Thermus sp. strain 2.9
MHHHHHHGGSGMLPLFEPKGRVLLVDGHHLAYRNFFALKGLTTSRGEPVQGVYGFAKSLLKALKEDGDVVIVVFDAKAPSFRHEAYEAYKAGRAPTPEDFPRQLALMKELVDLLGLERLEVPGFEADDVLATLAKKAEREGYEVQILTADRDLFQLLSPRISVLHPEGHRITPEWLWEKYGLRPEQWVDFRALAGDPSDNIPGVKGIGEKTALKLLKEWGSLENLLKNLDQVKPESVREKILAHLEDLKLSLELSRVRTDLPLEVDFRGRREPDWEGLKAFLERLEFGSLLHEFGLLESPLPAEEAPWPPPEGAFLGYRLSRPEPMWAELLALAASAQGRAYRAEDPHGALRGLKEVRGLLAKDLAVVALREGLDLPPTDDPMLLAYLLDPSNTTPEGVARRYGGEWTEDAAKRALLAERLHANLLGRLQGEERLLWLYEEVEKPLSRVLAHMEATGVKLDVAYLEALSLEVAAEMRRLEEEVFRLAGHSFNLNSRDQLERVLFDELGLPPIGKTEKTGKRSTSAAVLEALREVHPIVDKILQYRELAKLKGTYIDPLPALVHPKTGRLHTRFNQTATATGRLSSSDPNLQNIPVRTPLGQKIRRAFVAEEGWRLVALDYSQIELRVLAHLSGDENLIRVFQEGKDIHTQTASWMFGLSAEAIDPLMRRAAKTINFGVLYGMSAHRLSQELGIPYEEAAAFIQRYFQSYPKVKAWIEKTLEEGRTRGYVETLFGRRRYVPDLNARVKSVREAAERMAFNMPVQGTAADLMKLAMVRLFPQLREVGARMLLQVHDELLLEAPKERAEEVAALAKEVMEGVWPLAVPLEVEVGIGEDWLAAKG

SEQ ID NO: 1347 - DNA, 2529 bp, synthetic construct
  misc_feature 1..2529: note = Variant of DNA polymerase I from Thermus sp. strain 2.9
  source 1..2529: mol_type = other DNA
atgcaccatcatcatcatcatggcggtagcggcatgttaccgttgttcgaacctaaaggtcgcgtgcttctggttgatggccatcatctcgcgtatcgtaacttctttgccctgaaaggattaaccaccagccgtggcgagccggtacagggtgtctacggctttgcaaagtcgctcctgaaagctctgaaagaagacggtgatgtggtgattgttgtctttgatgcgaaagcgccaagttttcgccacgaagcgtacgctgcttacaaagccgggcgtgctccaacgccggaagactttcctcgccaattggcgcttatgaaggaattagtggatttgcttggcctcgaacgcttggaagttcccggtttcgaggcagacgacgtattagcgactctcgcaaagaaagccgaacgtgagggctatgaagtccagatcttgacagcagatcgcgatcttttccagcttttatctccgcgcatctcggtgttacacccggaagggcatcgtatcaccccggaatggctctgggagaaatatggtttgcgtcccgaacaatgggtggattttcgcgccttagcaggcgatccgagcgacaatattccgggagttaaaggtatcggcgagaagacggcgctcaagctccttaaagaatgggggtcgttggagaacttgcttaagaatttagatcaggtcaaaccagagtcagtgcgtgagaagattcttgcacacctcgaagacctcaaattaagccgcgaattgtcccgtgtacgcaccgatttgccgctcgaagttgatttccgtggccgccgcgaacctgactgggagggtcttaaagcgtttttagagcgtcttgaatttggttcgctcttgcatgaattcggccttttagaaagcccgttaccagccgaagaagcaccttggccaccgcccgaaggcgcgtttttaggttaccgtttgagtcgcccggaaccgatgtgggccgaattattggctcttgcagcgtctgcccagggacgtgtgtatcgcgcggaagaccctcatggtgcgctccgcggcctcaaagaagtccgtggactccttgccaaagacttagctgttgttgcattgcgcgaaggtcttgatttacctccgactgatgatccaatgcttcttgcgtacctcttggacccgtcaaacacgacgcccgaaggcgtagcccgtcgttacggcggcgagtggaccgaagatgcaggcgagcgcgcgttattggccgaacgtttgcacgccaatttattaggacgtttgcaaggcgaggaacgtctcctctggctttacgaagaagtggagaaaccattgagtcgcgtgctcgcgcatatggaagctaccggtgtcaaattagacgtggcgtatttggaggcactcagccttgaagttgctgccgaaatgcgccgcttggaggaagaagtattccgtttagcaggccactcctttaaccttaattctcgcgatcagttagaacgtgtgttgttcgatgaacttggtctccctcctatcggcaagacagagaagaccggtaaacgtagcacttcagcggcggttttagaagctcttcgcgaagtccatcccattgtggacaagatcttgcagtaccgcgaactcgcgaaattgaaaggcacctatattgaccctcttccggcattagtccacccgaaaacgggacgcctccatacccgcttcaaccaaacagccacggcgaccggtcgtttgtcctcctctgatccaaaccttcagaatattccagtacgtaccccattgggccagaagatccgccgcgcgtttgtagctgaggagggttggcgtttagtggccctcgattatagccaaattgaattacgtgtccttgcccatctttctggcgatgagaacctcatccgcgtgtttcaggaaggcaaagacattcacactcaaacggcaagctggatgtttggattatcagctgaagcgatcgatcctttgatgcgtcgtgcagcgaagaccatcaatttcggtgttctctacggtatgagtgcccatcgtttgtcgcaggaattaggcattccctatgaagaagctgcggcgttcattcagcgctactttcaaagctatcccaaagttaaagcatggatcgagaagactctcgaagaaggccgcacacgtggttacgtagagaccttatttggacgtcgccgctatgttcccgatttaaacgctcgcgtgaaatctgtccgtgaagccgccgaacgcatggcgttcaacatgcctgtacagggcacggcagctgacctcatgaaacttgcaatggtgcgcctttttccacaattgcgtgaagttggtgcccgcatgctcttgcaggtccacgatgaactcttgttagaagcgccaaaagagcgtgcggaagaggtggcagccctcgcgaaagaggttatggaaggcgtgtggcccttagcggtgcctcttgaagtcgaagttggtattggcgaggattggttggctgccaaaggataatga

SEQ ID NO: 1348 - protein, 841 aa, synthetic construct
  REGION 1..841: note = Variant of DNA polymerase I from Thermus sp. strain 2.9
MHHHHHHGGSGMLPLFEPKGRVLLVDGHHLAYRNFFALKGLTTSRGEPVQGVYGFAKSLLKALKEDGDVVIVVFDAKAPSFRHEAYAAYKAGRAPTPEDFPRQLALMKELVDLLGLERLEVPGFEADDVLATLAKKAEREGYEVQILTADRDLFQLLSPRISVLHPEGHRITPEWLWEKYGLRPEQWVDFRALAGDPSDNIPGVKGIGEKTALKLLKEWGSLENLLKNLDQVKPESVREKILAHLEDLKLSRELSRVRTDLPLEVDFRGRREPDWEGLKAFLERLEFGSLLHEFGLLESPLPAEEAPWPPPEGAFLGYRLSRPEPMWAELLALAASAQGRVYRAEDPHGALRGLKEVRGLLAKDLAVVALREGLDLPPTDDPMLLAYLLDPSNTTPEGVARRYGGEWTEDAGERALLAERLHANLLGRLQGEERLLWLYEEVEKPLSRVLAHMEATGVKLDVAYLEALSLEVAAEMRRLEEEVFRLAGHSFNLNSRDQLERVLFDELGLPPIGKTEKTGKRSTSAAVLEALREVHPIVDKILQYRELAKLKGTYIDPLPALVHPKTGRLHTRFNQTATATGRLSSSDPNLQNIPVRTPLGQKIRRAFVAEEGWRLVALDYSQIELRVLAHLSGDENLIRVFQEGKDIHTQTASWMFGLSAEAIDPLMRRAAKTINFGVLYGMSAHRLSQELGIPYEEAAAFIQRYFQSYPKVKAWIEKTLEEGRTRGYVETLFGRRRYVPDLNARVKSVREAAERMAFNMPVQGTAADLMKLAMVRLFPQLREVGARMLLQVHDELLLEAPKERAEEVAALAKEVMEGVWPLAVPLEVEVGIGEDWLAAKG

SEQ ID NO: 1349 - DNA, 2529 bp, synthetic construct
  misc_feature 1..2529: note = Variant of DNA polymerase I from Thermus sp. strain 2.9
  source 1..2529: mol_type = other DNA
atgcaccatcatcatcatcatggcggtagcggcatgttaccgttgttcgaacctaaaggtcgcgtgcttctggttgatggccatcatctcgcgtatcgtaacttctttgccctgaaaggattaaccaccagccgtggcgagccggtacagggtgtctacggctttgcaaagtcgctcctgaaagctctgaaagaagacggtgatgtggtgattgttgtctttgatgcgaaagcgccaagttttcgccacgaagcgtacgaagcttacaaagccgggcgtgctccaacgccggaagactttcctcgccaattggcgcttatgaaggaattagtggatttgcttggcctcgaacgcttggaagttcccggtttcgaggcagacgacgtattagcgactctcgcaaagaaagccgaacgtgagggctatgaagtccagatcttgacagcagatcgcgatcttttccagcttttatctccgcgcatctcggtgttacacccggaagggcatcgtatcaccccggaatggctctgggagaaatatggtttgcgtcccgaacaatgggtggattttcgcgccttagcaggcgatccgagcgacaatattccgggagttaaaggtatcggcgagaagacggcgctcaagctccttaaagaatgggggtcgttggagaacttgcttaagaatttagatcaggtcaaaccagagtcagtgcgtgagaagattcttgcacacctcgaagacctcaaattaagccgcgaattgtcccgtgtacgcaccgatttgccgctcgaagttgatttccgtggtcgccgcgaacctgactgggagggtcttaaagcgtttttagagcgtcttgaatttggttcgctcttgcatgaattcggccttttagaaagcccgttaccagccgaagaagcaccttggccaccgcccgaaggcgcgtttttaggttaccgtttgagtcgcccggaaccgatgtgggccgaattactggctcttgcagcgtctgcccaggggcgtgtgtatcgcgcggaagaccctcatggtgcgctccgtggcctcaaagaagtcaacggactccttgccaaagacttagctgttgttgcattgcgcgaaggtcttgatttacctccgactgatgatccaatgcttcttgcgtacctcttggacccgtcaaacacgacgcccgaaggcgtagcccgtcgttacggcggcgagtggaccgaagatgcagctgagcgcgcgttattggccgaacgtttgcacgccaatttattaggacgtttgcaaggcgaggaacgtctcctctggctttacgaagaagtggagaaaccattgagtcgcgtgctcgcgcatatggaagctaccggtgtcaaattagacgtggcgtatttggaggctctcagccttgaagttgctgccgaaatgcgccgcttggaggaagaagtattccgtttagcaggccactcctttaaccttaattctcgcgatcagttagaacgtgtgttgttcgatgagcttggtctccctcctatcggcaagacagagaagaccggtaaacgtagcacttcagcggcggttttagaagctcttcgcgaagtccatcccattgtggacaagatcttgcagtaccgcgaactcgcgaaattgaaaggcacctatattgaccctcttccggcattagtccacccgaaaacgggacgcctccatacccgcttcaaccaaacagccacggcgaccggtcgtttgtcctcctctgatccaaaccttcagaatattccagtacgtaccccattgggccagaagatccgccgcgcgtttgtagctgaggagggttggcgtttagtggccctcgattatagccaaattgaattacgtgtccttgcccatctttctggcgatgagaacctcatccgcgtgtttcaggaaggcaaagacattcacactcaaacggcaagctggatgtttggattatcagcagaagcgatcgatcctttgatgcgtcgtgcagcgaagaccattaatttcggtgttctctacggtatgagtgcccatcgtttgtcgcaggaattaggcattccctatgaagaagctgcggcgttcattcagcgctactttcaaagctatcccaaagttaaagcatggatcgagaagactctcgaagaaggccgcacacgtggttacgtagagaccttatttggacgtcgccgctatgttcccgatttaaacgctcgcgtgaaatctgtccgtgaagccgccgaacgcatggcgttcaacatgcctgtacagggcacggcagctgacctcatgaaacttgcaatggtgcgcctttttccacaattgcgtgaagttggtgcccgcatgctcttgcaggtccacgatgaactcttgttagaagcgccaaaagagcgtgcggaagaggtggcagccctcgcgaaagaggttatggaaggcgtgtggcccttagcggtgcctcttgaagtcgaagttggtattggcgaggattggttggctgccaaaggataatga

SEQ ID NO: 1350 - protein, 841 aa, synthetic construct
  REGION 1..841: note = Variant of DNA polymerase I from Thermus sp. strain 2.9
MHHHHHHGGSGMLPLFEPKGRVLLVDGHHLAYRNFFALKGLTTSRGEPVQGVYGFAKSLLKALKEDGDVVIVVFDAKAPSFRHEAYEAYKAGRAPTPEDFPRQLALMKELVDLLGLERLEVPGFEADDVLATLAKKAEREGYEVQILTADRDLFQLLSPRISVLHPEGHRITPEWLWEKYGLRPEQWVDFRALAGDPSDNIPGVKGIGEKTALKLLKEWGSLENLLKNLDQVKPESVREKILAHLEDLKLSRELSRVRTDLPLEVDFRGRREPDWEGLKAFLERLEFGSLLHEFGLLESPLPAEEAPWPPPEGAFLGYRLSRPEPMWAELLALAASAQGRVYRAEDPHGALRGLKEVNGLLAKDLAVVALREGLDLPPTDDPMLLAYLLDPSNTTPEGVARRYGGEWTEDAAERALLAERLHANLLGRLQGEERLLWLYEEVEKPLSRVLAHMEATGVKLDVAYLEALSLEVAAEMRRLEEEVFRLAGHSFNLNSRDQLERVLFDELGLPPIGKTEKTGKRSTSAAVLEALREVHPIVDKILQYRELAKLKGTYIDPLPALVHPKTGRLHTRFNQTATATGRLSSSDPNLQNIPVRTPLGQKIRRAFVAEEGWRLVALDYSQIELRVLAHLSGDENLIRVFQEGKDIHTQTASWMFGLSAEAIDPLMRRAAKTINFGVLYGMSAHRLSQELGIPYEEAAAFIQRYFQSYPKVKAWIEKTLEEGRTRGYVETLFGRRRYVPDLNARVKSVREAAERMAFNMPVQGTAADLMKLAMVRLFPQLREVGARMLLQVHDELLLEAPKERAEEVAALAKEVMEGVWPLAVPLEVEVGIGEDWLAAKG

SEQ ID NO: 1351 - DNA, 2529 bp, synthetic construct
  misc_feature 1..2529: note = Variant of DNA polymerase I from Thermus sp. strain 2.9
  source 1..2529: mol_type = other DNA
atgcaccatcatcatcatcatggcggtagcggcatgttaccgttgttcgaacctaaaggtcgcgtgcttctggttgatggccatcatctcgcgtatcgtaacttctttgccctgaaaggattaaccaccagccgtggcgagccggtacagggtgtctacggctttgcaaagtcgctcctgaaagctctgaaagaagacggtgatgtggtgattgttgtctttgatgcgaaagcgccaagttttcgccacgaagcgtacgaagcttacaaagccgggcgtgctccaacgccggaagactttcctcgccaattggcgcttatgaaggaattagtggatttgcttggcctcgaacgcttggaagttcccggtttcgaggcagacgacgtattagcgactctcgcaaagaaagccgaacgtgagggctatgaagtccagatcttgacagcagatcgcgatcttttccagcttttatctccgcgcatctcggtgttacacccggaagggcatcgtatcaccccggaatggctctgggagaaatatggtttgcgtcccgaacaatgggtggattttcgcgccttagcaggcgatccgagcgacaatattccgggagttaaaggtatcggcgagaagacggcgctcaagctccttaaagaatgggggtcgttggagaacttgcttaagaatttagatcaggtcaaaccagagtcagtgcgtgagaagattcttgcacacctcgaagacctcaaattaagccgcgaattgtcccgtgtacgcaccgatttgccgctcgaagttgatttccgtggtcgccgcgaacctgactgggagggtcttaaagcgtttttagagcgtcttgaatttggttcgctcttgcatgaattcggccttttagaaagcccgttaccagccgaagaagcaccttggccaccgcccgaaggcgcgtttttaggttaccgtttgagtcgcccggaaccgatgtgggccgaattatcggctcttgcagcgtctgcccagggacgtgtgtatcgcgcggaagaccctcatggtgcgctccgcggcctcaaagaagtccgtggactccttgccaaagacttagctgttgttgcattgcgcgaaggtcttgatttacctccgactgatgatccaatgcttcttgcgtacctcttggacccgtcaaacacgacgcccgaaggcgtagcccgtcgttacggcggcgagtggaccgaagatgcaggtgagcgcgcgttattggccgaacgtttgcacgccaatttattaggacgtttgcaaggcgaggaacgtctcctctggctttacgaagaagtggagaaaccattgagtcgcgtgctcgcgcatatggaagctaccggtgtcaaattagacgtggcgtatttggaggctctcagccttgaagttgctgccgaaatgcgccgcttggaggaagaagtattccgtttagcaggccactcctttaaccttaattctcgcgatcagttagaacgtgtgttgttcgatgagcttggtctccctcctatcggcaagacagagaagaccggtaaacgtagcacttcagcggcggttttagaagctcttcgcgaagtccatcccattgtggacaagatcttgcagtaccgcgaactcgcgaaattgaaaggcacctatattgaccctcttccggcattagtccacccgaaaacgggacgcctccatacccgcttcaaccaaacagccacggcgaccggtcgtttgtcctcctctgatccaaaccttcagaatattccagtacgtaccccattgggccagaagatccgccgcgcgtttgtagctgaggagggttggcgtttagtggccctcgattatagccaaattgaattacgtgtccttgcccatctttctggcgatgagaacctcatccgcgtgtttcaggaaggcaaagacattcacactcaaacggcaagctggatgtttggattatcagcagaagcgatcgatcctttgatgcgtcgtgcagcgaagaccgttaatttcggtgttctctacggtatgagtgcccatcgtttgtcgcaggaattaggcattccctatgaagaagctgtcgcgttcattcagcgctactttcaaagctatcccaaagttaaagcatggatcgagaagactctcgaagaaggccgcacacgtggttacgtagagaccttatttggacgtcgccgctatgttcccgatttaaacgctcgcgtgaaatctgtccgtgaagccgccgaacgcatggcgttcaacatgcctgtacagggcacggcagctgacctcatgaaacttgcaatggtgcgcctttttccacaattgcgtgaagttggtgcccgcatgctcttgcaggtccacgatgaactcttgttagaagcgccaaaagagcgtgcggaagaggtggcagccctcgcgaaagaggttatggaaggcgtgtggcccttagcggtgcctcttgaagtcgaagttggtattggcgaggattggttggctgccaaaggataatga

SEQ ID NO: 1352 - protein, 841 aa, synthetic construct
  REGION 1..841: note = Variant of DNA polymerase I from Thermus sp. strain 2.9
MHHHHHHGGSGMLPLFEPKGRVLLVDGHHLAYRNFFALKGLTTSRGEPVQGVYGFAKSLLKALKEDGDVVIVVFDAKAPSFRHEAYEAYKAGRAPTPEDFPRQLALMKELVDLLGLERLEVPGFEADDVLATLAKKAEREGYEVQILTADRDLFQLLSPRISVLHPEGHRITPEWLWEKYGLRPEQWVDFRALAGDPSDNIPGVKGIGEKTALKLLKEWGSLENLLKNLDQVKPESVREKILAHLEDLKLSRELSRVRTDLPLEVDFRGRREPDWEGLKAFLERLEFGSLLHEFGLLESPLPAEEAPWPPPEGAFLGYRLSRPEPMWAELSALAASAQGRVYRAEDPHGALRGLKEVRGLLAKDLAVVALREGLDLPPTDDPMLLAYLLDPSNTTPEGVARRYGGEWTEDAGERALLAERLHANLLGRLQGEERLLWLYEEVEKPLSRVLAHMEATGVKLDVAYLEALSLEVAAEMRRLEEEVFRLAGHSFNLNSRDQLERVLFDELGLPPIGKTEKTGKRSTSAAVLEALREVHPIVDKILQYRELAKLKGTYIDPLPALVHPKTGRLHTRFNQTATATGRLSSSDPNLQNIPVRTPLGQKIRRAFVAEEGWRLVALDYSQIELRVLAHLSGDENLIRVFQEGKDIHTQTASWMFGLSAEAIDPLMRRAAKTVNFGVLYGMSAHRLSQELGIPYEEAVAFIQRYFQSYPKVKAWIEKTLEEGRTRGYVETLFGRRRYVPDLNARVKSVREAAERMAFNMPVQGTAADLMKLAMVRLFPQLREVGARMLLQVHDELLLEAPKERAEEVAALAKEVMEGVWPLAVPLEVEVGIGEDWLAAKG

SEQ ID NO: 1353 - DNA, 2529 bp, synthetic construct
  misc_feature 1..2529: note = Variant of DNA polymerase I from Thermus sp. strain 2.9
  source 1..2529: mol_type = other DNA
atgcaccatcatcatcatcatggcggtagcggcatgttaccgttgttcgaacctaaaggtcgcgtgcttctggttgatggccatcatctcgcgtatcgtaacttctttgccctgaaaggattaaccaccagccgtggcgagccggtacagggtgtctacggctttgcaaagtcgctcctgaaagctctgaaagaagacggtgatgtggtgattgttgtctttgatgcgaaagcgccaagttttcgccacgaagcgtacgaagcttacaaagccgggcgtgctccaacgccggaagactttcctcgccaattggcgcttatgaaggaattagtggatttgcttggcctcgaacgcttggaagttcccggtttcgaggcagacgacgtattagcgactctcgcaaagaaagccgaacgtgagggctatgaagtccagatcttgacagcagatcgcgatcttttccagcttttatctccgcgcatctcggtgttacacccggaagggcatcgtatcaccccggaatggctctgggagaaatatggtttgcgtcccgaacaatgggtggattttcgcgccttagcaggcgatccgagcgacaatattccgggagttaaaggtatcggcgagaagacggcgctcaagctccttaaagaatgggggtcgttggagaacttgcttaagaatttagatcaggtcaaaccagagtcagtgcgtgagaagattcttgcacacctcgaagacctcaaattaagccgcgaattgtcccgtgtacgcaccgatttgccgctcgaagttgatttccgtggccgccgcgaacctgactgggagggtcttaaagcgtttttagagcgtcttgaatttggttcgctcttgcatgaattcggccttttagaaagcccgttaccagccgaagaagcaccttggccaccgcccgaaggcgcgtttttaggttaccgtttgagtcgcccggaaccgatgtgggccgaattattggctcttgcagcgtctgcccagggacgtgtgtatcgcgcggaagaccctcatggtgcgctccgcggcctcaaagaagtccgtggactccttgccaaagacttagctgttgttgcattgcgcgaaggtcttgatttacctccgactgatgatccaatgcttcttgcgtacctcttggacccgtcaaacacgacgcccgaaggcgtagcccgtcgttacggcggcgagtggaccgaagatgcaggcgagcgcgcgttattggccgaacgtttgcacgccaatttattaggacgtttgcaaggcgaggaacgtctcctctggctttacgaagaagtggagaaaccattgagtcgcgtgctcgcgcatatggaagctaccggtgtcaaattagacgtggcgtatttggaggcactcagccttgaagttgctgccgaaatgcgccgcttggaggaagaagtattccgtttagcaggccactcctttaaccttaattctcgcgatcagttagaacgtgtgttgttcgatgaacttggtctccctcctatcggcaagacagagaagaccggtaaacgtagcacttcagcggcggttttagaagctcttcgcgaagtccatcccattgtggacaagatcttgcagtaccgcgaactcgcgaaattgaaaggcacctatattgaccctcttccggcattagtccacccgaaaacgggacgcctccatacccgcttcaaccaaacagccacggcgaccggtcgtttgtcctcctctgatccaaaccttcagaatattccagtacgtaccaggttgggccagaagatccgccgcgcgtttgtagctgaggagggttggcgtttagtggccctcgattatagccaaattgaattacgtgtccttgcccatctttctggcgatgagaacctcatccgcgtgtttcaggaaggcaaagacattcacactcaaacggcaagctggatgtttggattatcagctgaagcgatcgatcctttgatgcgtcgtgcagcgaagaccatcaatttcggtgttctctacggtatgagtgcccatcgtttgtcgcaggaattaggcattccctatgaagaagctgcggcgttcattcagcgctactttcaaagctatcccaaagttaaagcatggatcgagaagactctcgaagaaggccgcacacgtggttacgtagagaccttatttggacgtcgccgctatgttcccgatttaaacgctcgcgtgaaatctgtccgtgaagccgccgaacgcatggcgttcaacatgcctgtacagggcacggcagctgacctcatgaaacttgcaatggtgcgcctttttccacaattgcgtgaagttggtgcccgcatgctcttgcaggtccacgatgaactcttgttagaagcgccaaaagagcgtgcggaagaggtggcagccctcgcgaaagaggttatggaaggcgtgtggcccttagcggtgcctcttgaagtcgaagttggtattggcgaggattggttggctgccaaaggataatga

SEQ ID NO: 1354 - protein, 841 aa, synthetic construct
  REGION 1..841: note = Variant of DNA polymerase I from Thermus sp. strain 2.9
MHHHHHHGGSGMLPLFEPKGRVLLVDGHHLAYRNFFALKGLTTSRGEPVQGVYGFAKSLLKALKEDGDVVIVVFDAKAPSFRHEAYEAYKAGRAPTPEDFPRQLALMKELVDLLGLERLEVPGFEADDVLATLAKKAEREGYEVQILTADRDLFQLLSPRISVLHPEGHRITPEWLWEKYGLRPEQWVDFRALAGDPSDNIPGVKGIGEKTALKLLKEWGSLENLLKNLDQVKPESVREKILAHLEDLKLSRELSRVRTDLPLEVDFRGRREPDWEGLKAFLERLEFGSLLHEFGLLESPLPAEEAPWPPPEGAFLGYRLSRPEPMWAELLALAASAQGRVYRAEDPHGALRGLKEVRGLLAKDLAVVALREGLDLPPTDDPMLLAYLLDPSNTTPEGVARRYGGEWTEDAGERALLAERLHANLLGRLQGEERLLWLYEEVEKPLSRVLAHMEATGVKLDVAYLEALSLEVAAEMRRLEEEVFRLAGHSFNLNSRDQLERVLFDELGLPPIGKTEKTGKRSTSAAVLEALREVHPIVDKILQYRELAKLKGTYIDPLPALVHPKTGRLHTRFNQTATATGRLSSSDPNLQNIPVRTRLGQKIRRAFVAEEGWRLVALDYSQIELRVLAHLSGDENLIRVFQEGKDIHTQTASWMFGLSAEAIDPLMRRAAKTINFGVLYGMSAHRLSQELGIPYEEAAAFIQRYFQSYPKVKAWIEKTLEEGRTRGYVETLFGRRRYVPDLNARVKSVREAAERMAFNMPVQGTAADLMKLAMVRLFPQLREVGARMLLQVHDELLLEAPKERAEEVAALAKEVMEGVWPLAVPLEVEVGIGEDWLAAKG

SEQ ID NO: 1355 - DNA, 2529 bp, synthetic construct
  misc_feature 1..2529: note = Variant of DNA polymerase I from Thermus sp. strain 2.9
  source 1..2529: mol_type = other DNA
atgcaccatcatcatcatcatggcggtagcggcatgttaccgttgttcgaacctaaaggtcgcgtgcttctggttgatggccatcatctcgcgtatcgtaacttctttgccctgaaaggattaaccaccagccgtggcgagccggtacagggtgtctacggctttgcaaagtcgctcctgaaagctctgaaagaagacggtgatgtggtgattgttgtctttgatgcgaaagcgccaagttttcgccacgaagcgtacgaagcttacaaagccgggcgtgctccaacgccggaagactttcctcgccaattggcgcttatgaaggaattagtggatttgcttggcctcgaacgcttggaagttcccggtttcgaggcagacgacgtattagcgactctcgcaaagaaagccgaacgtgagggctatgaagtccagatcttgacagcagatcgcgatcttttccagcttttatctccgcgcatctcggtgttacacccggaagggcatcgtatcaccccggaatggctctgggagaaatatggtttgcgtcccgaacaatgggtggattttcgcgccttagcaggcgatccggtggacaatattccgggagttaaaggtatcggcgagaagacggcgctcaagctccttaaagaatgggggtcgttggagaacttgcttaagaatttagatcaggtcaaaccagagtcagtgcgtgagaagattcttgcacacctcgaagacctcaaattaagccgcgaattgtcccgtgtacgcaccgatttgccgctcgaagttgatttccgtggccgccgcgaacctgactgggagggtcttaaagcgtttttagagcgtcttgaatttggttcgctcttgcatgaattcggccttttagaaagcccgttaccagccgaagaagcaccttggccaccgcccgaaggcgcgtttttaggttaccgtttgagtcgcccggaaccgatgtgggccgaattattggctcttgcagcgtctgcccagggacgtgtgtatcgcgcggaagaccctcatggtgcgctccgcggcctcaaagaagtccgtggactccttgccaaagacttagctgttgttgcattgcgcgaaggtcttgatttacctccgactgatgatccaatgcttcttgcgtacctcttggacccgtcaaacacgacgcccgaaggcgtagcccgtcgttacggcggcgagtggaccgaagatgcaggcgagcgcgcgttattggccgaacgtttgcacgccaatttattaggacgtttgcaaggcgaggaacgtctcctctggctttacgaagaagtggagaaaccattgagtcgcgtgctcgcgcatatggaagctaccggtgtcaaattagacgtggcgtatttggaggcactcagccttgaagttgctgccgaaatgcgccgcttggaggaagaagtattccgtttagcaggccactcctttaaccttaattctcgcgatcagttagaacgtgtgttgttcgatgaacttggtctccctcctatcggcaagacagagaagaccggtaaacgtagcacttcagcggcggttttagaagctcttcgcgaagtccatcccattgtggacaagatcttgcagtaccgcgaactcgcgaaattgaaaggcacctatattgaccctcttccggcattagtccacccgaaaacgggacgcctccatacccgcttcaaccaaacagccacggcgaccggtcgtttgtcctcctctgatccaaaccttcagaatattccagtacgtaccccattgggccagaagatccgccgcgcgtttgtagctgaggagggttggcgtttagtggccctcgattatagccaaattgaattacgtgtccttgcccatctttctggcgatgagaacctcatccgcgtgtttcaggaaggcaaagacattcacactcaaacggcaagctggatgtttggattatcagctgaagcgatcgatcctttgatgcgtcgtgcagcgaagaccatcaatttcggtgttctctacggtatgagtgcccatcgtttgtcgcaggaattaggcattccctatgaagaagctgcggcgttcattcagcgctactttcaaagctatcccaaagttaaagcatggatcgagaagactctcgaagaaggccgcacacgtggttacgtagagaccttatttggacgtcgccgctatgttcccgatttaaacgctcgcgtgaaatctgtccgtgaagccgccgaacgcatggcgttcaacatgcctgtacagggcacggcagctgacctcatgaaacttgcaatggtgcgcctttttccacaattgcgtgaagttggtgcccgcatgctcttgcaggtccacgatgaactcttgttagaagcgccaaaagagcgtgcggaagaggtggcagccctcgcgaaagaggttatggaaggcgtgtggcccttagcggtgcctcttgaagtcgaagttggtattggcgaggattggttggctgccaaaggataatga

SEQ ID NO: 1356 - protein, 841 aa, synthetic construct
  REGION 1..841: note = Variant of DNA polymerase I from Thermus sp. strain 2.9
MHHHHHHGGSGMLPLFEPKGRVLLVDGHHLAYRNFFALKGLTTSRGEPVQGVYGFAKSLLKALKEDGDVVIVVFDAKAPSFRHEAYEAYKAGRAPTPEDFPRQLALMKELVDLLGLERLEVPGFEADDVLATLAKKAEREGYEVQILTADRDLFQLLSPRISVLHPEGHRITPEWLWEKYGLRPEQWVDFRALAGDPVDNIPGVKGIGEKTALKLLKEWGSLENLLKNLDQVKPESVREKILAHLEDLKLSRELSRVRTDLPLEVDFRGRREPDWEGLKAFLERLEFGSLLHEFGLLESPLPAEEAPWPPPEGAFLGYRLSRPEPMWAELLALAASAQGRVYRAEDPHGALRGLKEVRGLLAKDLAVVALREGLDLPPTDDPMLLAYLLDPSNTTPEGVARRYGGEWTEDAGERALLAERLHANLLGRLQGEERLLWLYEEVEKPLSRVLAHMEATGVKLDVAYLEALSLEVAAEMRRLEEEVFRLAGHSFNLNSRDQLERVLFDELGLPPIGKTEKTGKRSTSAAVLEALREVHPIVDKILQYRELAKLKGTYIDPLPALVHPKTGRLHTRFNQTATATGRLSSSDPNLQNIPVRTPLGQKIRRAFVAEEGWRLVALDYSQIELRVLAHLSGDENLIRVFQEGKDIHTQTASWMFGLSAEAIDPLMRRAAKTINFGVLYGMSAHRLSQELGIPYEEAAAFIQRYFQSYPKVKAWIEKTLEEGRTRGYVETLFGRRRYVPDLNARVKSVREAAERMAFNMPVQGTAADLMKLAMVRLFPQLREVGARMLLQVHDELLLEAPKERAEEVAALAKEVMEGVWPLAVPLEVEVGIGEDWLAAKG

SEQ ID NO: 1357 - DNA, 2529 bp, synthetic construct
  misc_feature 1..2529: note = Variant of DNA polymerase I from Thermus sp. strain 2.9
  source 1..2529: mol_type = other DNA
atgcaccatcatcatcatcatggcggtagcggcatgttaccgttgttcgaacctaaaggtcgcgtgcttctggttgatggccatcatctcgcgtatcgtaacttctttgccctgaaaggattaaccaccagccgtggcgagccggtacagggtgtctacggctttgcaaagtcgctcctgaaagctctgaaagaagacggtgatgtggtgattgttgtctttgatgcgaaagcgccaagttttcgccacgaagcgtacgaagcttacaaagccgggcgtgctccaacgccggaagactttcctcgccaattggcgcttatgaaggaattagtggatttgcttggcctcgaacgcttggaagttcccggtttcgaggcagacgacgtattagcgactctcgcaaagaaagccgaacgtgagggctatgaagtccagatcttgacagcagatcgcgatcttttccagcttttatctccgcgcatctcggtgttacacccggaagggcatcgtatcaccccggaatggctctgggagaaatatggtttgcgtcccgaacaatgggtggattttcgcgccttagcaggcgatccgagcgacaatattccgggagttaaaggtatcggcgagaagacggcgctcaagctccttaaagaatgggggtcgttggagaacttgcttaagaatttagatcaggtcaaaccagagtcagtgcgtgagaagattcttgcacacctcgaagacctcaaattaagccgcgaattgtcccgtgtacgcaccgatttgccgctcgaagttgatttccgtggccgccgcgaacctgactgggagggtcttaaagcgtttttagagcgtcttgaatttggttcgctcttgcatgaattcggccttttagaaagcccgttaccagccgaagaagcaccttggccaccgcccgaaggcgcgtttttaggttaccgtttgagtcgcccggaaccgatgtgggccgaattattggctcttgcagcgtctgcccagggacgtgtgtatcgcgcggaagaccctcatggtgcgctccgcggcctcaaagaagtccgtggactccttgccaaagacttagctgttgttgcattgcgcgaaggtcttgatttacctccgactgatgatccaatgcttcttgcgtacctcttggacccgtcaaacacgacgcccgaaggcgtagcccgtcgttacggcggcgagtggaccgaagatgcaggcgagcgcgcgttattggccgaacgtttgcacgccaatttattaggagggttgcaaggcgaggaacgtctcctctggctttacgaagaagtggagaaaccattgagtcgcgtgctcgcgcatatggaagctaccggtgtcaaattagacgtggcgtatttggaggcactcagccttgaagttgctgccgaaatgcgccgcttggaggaagaagtattccgtttagcaggccactcctttaaccttaattctcgcgatcagttagaacgtgtgttgttcgatgaacttggtctccctcctatcggcaagacagagaagaccggtaaacgtagcacttcagcggcggttttagaagctcttcgcgaagtccatcccattgtggacaagatcttgcagtaccgcgaactcgcgaaattgaaaggcacctatattgaccctcttccggcattagtccacccgaaaacgggacgcctccatacccgcttcaaccaaacagccacggcgaccggtcgtttgtcctcctctgatccaaaccttcagaatattccagtacgtaccccattgggccagaagatccgccgcgcgtttgtagctgaggagggttggcgtttagtggccctcgattatagccaaattgaattacgtgtccttgcccatctttctggcgatgagaacctcatccgcgtgtttcaggaaggcaaagacattcacactcaaacggcaagctggatgtttggattatcagctgaagcgatcgatcctttgatgcgtcgtgcagcgaagaccatcaatttcggtgttctctacggtatgagtgcccatcgtttgtcgcaggaattaggcattccctatgaagaagctgcggcgttcattcagcgctactttcaaagctatcccaaagttaaagcatggatcgagaagactctcgaagaaggccgcacacgtggttacgtagagaccttatttggacgtcgccgctatgttcccgatttaaacgctcgcgtgaaatctgtccgtgaagccgccgaacgcatggcgttcaacatgcctgtacagggcacggcagctgacctcatgaaacttgcaatggtgcgcctttttccacaattgcgtgaagttggtgcccgcatgctcttgcaggtccacgatgaactcttgttagaagcgccaaaagagcgtgcggaagaggtggcagccctcgcgaaagaggttatggaaggcgtgtggcccttagcggtgcctcttgaagtcgaagttggtattggcgaggattggttggctgccaaaggataatga

SEQ ID NO: 1358 - protein, 841 aa, synthetic construct
  REGION 1..841: note = Variant of DNA polymerase I from Thermus sp. strain 2.9
MHHHHHHGGSGMLPLFEPKGRVLLVDGHHLAYRNFFALKGLTTSRGEPVQGVYGFAKSLLKALKEDGDVVIVVFDAKAPSFRHEAYEAYKAGRAPTPEDFPRQLALMKELVDLLGLERLEVPGFEADDVLATLAKKAEREGYEVQILTADRDLFQLLSPRISVLHPEGHRITPEWLWEKYGLRPEQWVDFRALAGDPSDNIPGVKGIGEKTALKLLKEWGSLENLLKNLDQVKPESVREKILAHLEDLKLSRELSRVRTDLPLEVDFRGRREPDWEGLKAFLERLEFGSLLHEFGLLESPLPAEEAPWPPPEGAFLGYRLSRPEPMWAELLALAASAQGRVYRAEDPHGALRGLKEVRGLLAKDLAVVALREGLDLPPTDDPMLLAYLLDPSNTTPEGVARRYGGEWTEDAGERALLAERLHANLLGGLQGEERLLWLYEEVEKPLSRVLAHMEATGVKLDVAYLEALSLEVAAEMRRLEEEVFRLAGHSFNLNSRDQLERVLFDELGLPPIGKTEKTGKRSTSAAVLEALREVHPIVDKILQYRELAKLKGTYIDPLPALVHPKTGRLHTRFNQTATATGRLSSSDPNLQNIPVRTPLGQKIRRAFVAEEGWRLVALDYSQIELRVLAHLSGDENLIRVFQEGKDIHTQTASWMFGLSAEAIDPLMRRAAKTINFGVLYGMSAHRLSQELGIPYEEAAAFIQRYFQSYPKVKAWIEKTLEEGRTRGYVETLFGRRRYVPDLNARVKSVREAAERMAFNMPVQGTAADLMKLAMVRLFPQLREVGARMLLQVHDELLLEAPKERAEEVAALAKEVMEGVWPLAVPLEVEVGIGEDWLAAKG

SEQ ID NO: 1359 - DNA, 2529 bp, synthetic construct
  misc_feature 1..2529: note = Variant of DNA polymerase I from Thermus sp. strain 2.9
  source 1..2529: mol_type = other DNA
atgcaccatcatcatcatcatggcggtagcggcatgttaccgttgttcgaacctaaaggtcgcgtgcttctggttgatggccatcatctcgcgtatcgtaacttctttgccctgaaaggattaaccaccagccgtggcgagccggtacagggtgtctacggctttgcaaagtcgctcctgaaagctctgaaagaagacggtgatgtggtgattgttgtctttgatgcgaaagcgccaagttttcgccacgaagcgtacgaagcttacaaagccgggcgtgctccaacgccggaagactttcctcgccaattggcgcttatgaaggaattagtggatttgcttggcctcgaacgcttggaagttcccggtttcgaggcagacgacgtattagcgactctcgcaaagaaagccgaacgtgagggctatgaagtccagatcttgacagcagatcgcgatcttttccagcttttatctccgcgcatctcggtgttacacccggaagggcatcgtatcaccccggaatggctctgggagaaatatggtttgcgtcccgaacaatgggtggattttcgcgccttagcaggcgatccgagcgacaatattccgggagttaaaggtatcggcgagaagacggcgctcaagctccttaaagaatgggggtcgttggagaacttgcttaagaatttagatcaggtcaaaccagagtcagtgcgtgagaagattcttgcacacctcgaagacctcaaattaagcctggaattgtcccgtgtacgcaccgatttgccgctcgaagttgatttccgtggccgccgcgaacctgactgggagggtcttaaagcgtttttagagcgtcttgaatttggttcgctcttgcatgaattcggccttttagaaagcccgttaccagccgaagaagcaccttggccaccgcccgaaggcgcgtttttaggttaccgtttgagtcgcccggaaccgatgtgggccgaattattggctcttgcagcgtctgcccagggacgtgtgtatcgcgcggaagaccctcatggtgcgctccgcggcctcaaagaagtccgtggactccttgccaaagacttagctgttgttgcattgcgcgaaggtcttgatttacctccgactgatgatccaatgcttcttgcgtacctcttggacccgtcaaacacgacgcccgaaggcgtagcccgtcgttacggcggcgagtggaccgaagatgcaggcgagcgcgcgttattggccgaacgtttgcacgccaatttattaggacgtttgcaaggcgaggaacgtctcctctggctttacgaagaagtggagaaaccattgagtcgcgtgctcgcgcatatggaagctaccggtgtcaaattagacgtggcgtatttggagaacctcagccttgaagttgctgccgaaatgcgccgcttggaggaagaagtattccgtttagcaggccactcctttaaccttaattctcgcgatcagttagaacgtgtgttgttcgatgaacttggtctccctcctatcggcaagacagagaagaccggtaaacgtagcacttcagcggcggttttagaagctcttcgcgaagtccatcccattgtggacaagatcttgcagtaccgcgaactcgcgaaattgaaaggcacctatattgaccctcttccggcattagtccacccgaaaacgggacgcctccatacccgcttcaaccaaacagccacggcgaccggtcgtttgtcctcctctgatccaaaccttcagaatattccagtacgtaccccattgggccagaagatccgccgcgcgtttgtagctgaggagggttggcgtttagtggccctcgattatagccaaattgaattacgtgtccttgcccatctttctggcgatgagaacctcatccgcgtgtttcaggaaggcaaagacattcacactcaaacggcaagctggatgtttggattatcagcagaagcgatcgatcctttgatgcgtcgtgcagcgaagaccattaatttcggtgttctctacggtatgagtgcccatcgtttgtcgcaggaattaggcattccctatgaagaagctgcggcgttcattcagcgctactttcaaagctatcccaaagttaaagcatggatcgagaagactctcgaagaaggccgcacacgtggttacgtagagaccttatttggacgtcgccgctatgttcccgatttaaacgctcgcgtgaaatctgtccgtgaagccgccgaacgcatggcgttcaacatgcctgtacagggcacggcagctgacctcatgaaacttgcaatggtgcgcctttttccacaattgcgtgaagttggtgcccgcatgctcttgcaggtccacgatgaactcttgttagaagcgccaaaagagcgtgcggaagaggtggcagccctcgcgaaagaggttatggaaggcgtgtggcccttagcggtgcctcttgaagtcgaagttggtattggcgaggattggttggctgccaaaggataatga

SEQ ID NO: 1360 - protein, 841 aa, synthetic construct
  REGION 1..841: note = Variant of DNA polymerase I from Thermus sp. strain 2.9
MHHHHHHGGSGMLPLFEPKGRVLLVDGHHLAYRNFFALKGLTTSRGEPVQGVYGFAKSLLKALKEDGDVVIVVFDAKAPSFRHEAYEAYKAGRAPTPEDFPRQLALMKELVDLLGLERLEVPGFEADDVLATLAKKAEREGYEVQILTADRDLFQLLSPRISVLHPEGHRITPEWLWEKYGLRPEQWVDFRALAGDPSDNIPGVKGIGEKTALKLLKEWGSLENLLKNLDQVKPESVREKILAHLEDLKLSLELSRVRTDLPLEVDFRGRREPDWEGLKAFLERLEFGSLLHEFGLLESPLPAEEAPWPPPEGAFLGYRLSRPEPMWAELLALAASAQGRVYRAEDPHGALRGLKEVRGLLAKDLAVVALREGLDLPPTDDPMLLAYLLDPSNTTPEGVARRYGGEWTEDAGERALLAERLHANLLGRLQGEERLLWLYEEVEKPLSRVLAHMEATGVKLDVAYLENLSLEVAAEMRRLEEEVFRLAGHSFNLNSRDQLERVLFDELGLPPIGKTEKTGKRSTSAAVLEALREVHPIVDKILQYRELAKLKGTYIDPLPALVHPKTGRLHTRFNQTATATGRLSSSDPNLQNIPVRTPLGQKIRRAFVAEEGWRLVALDYSQIELRVLAHLSGDENLIRVFQEGKDIHTQTASWMFGLSAEAIDPLMRRAAKTINFGVLYGMSAHRLSQELGIPYEEAAAFIQRYFQSYPKVKAWIEKTLEEGRTRGYVETLFGRRRYVPDLNARVKSVREAAERMAFNMPVQGTAADLMKLAMVRLFPQLREVGARMLLQVHDELLLEAPKERAEEVAALAKEVMEGVWPLAVPLEVEVGIGEDWLAAKG

SEQ ID NO: 1361 - DNA, 2529 bp, synthetic construct
  misc_feature 1..2529: note = Variant of DNA polymerase I from Thermus sp. strain 2.9
  source 1..2529: mol_type = other DNA
atgcaccatcatcatcatcatggcggtagcggcatgttaccgttgttcgaacctaaaggtcgcgtgcttctggttgatggccatcatctcgcgtatcgtaacttctttgccctgaaaggattaaccaccagccgtggcgagccggtacagggtgtctacggctttgcaaagtcgctcctgaaagctctgaaagaagacggtgatgtggtgattgttgtctttgatgcgaaagcgccaagttttcgccacgaagcgtacgaagcttacaaagccgggcgtgctccaacgccggaagactttcctcgccaattggcgcttatgaaggaattagtggatttgcttggcctcgaacgcttggaagttcccggtttcgaggcagacgacgtattagcgactctcgcaaagaaagccgaacgtgagggctatgaagtccagatcttgacagcagatcgcgatcttttccagcttttatctccgcgcatctcggtgttacacccggaagggcatcgtatcaccccggaatggctctgggagaaatatggtttgcgtcccgaacaatgggtggattttcgcgccttagcaggcgatccgagcgacaatattccgggagttaaaggtatcggcgagaagacggcgctcaagctccttaaagaatgggggtcgttggagaacttgcttaagaatttagatcaggtcaaaccagagtcagtgcgtgagaagattcttgcacacctcgaagacctcaaattaagcctggaattgtcccgtgtacgcaccgatttgccgctcgaagttgatttccgtcgtcgccgcgaacctgactgggagggtcttaaagcgtttttagagcgtcttgaatttggttcgctcttgcatgaattcggccttttagaaagcccgttaccagccgaagaagcaccttggccaccgcccgaaggcgcgtttttaggttaccgtttgagtcgcccggaaccgatgtgggccgaattactggctcttgcagcgtctgcccagggacgtgtgtatcgcgcggaagaccctcatggtgcgctccgcggcctcaaagaagtccgtggactccttgccaaagacttagctgttgttgcattgcgcgaaggtcttgatttacctccgactgatgatccaatgcttcttgcgtacctcttggacccgtcaaacacgacgcccgaaggcgtagcccgtcgttacggcggcgagtggaccgaagatgcaggcgagcgcgcgttattggccgaacgtttgcacgccaatttattaggacgtttgcaaggcgaggaacgtctcctctggctttacgaagaagtggagaaaccattgagtcgcgtgctcgcgcatatggaagctaccggtgtcaaattagacgtggcgtatttggagaacctcagccttgaagttgctgccgaaatgcgccgcttggaggaagaagtattccgtttagcaggccactcctttaaccttaattctcgcgatcagttagaacgtgtgttgttcgataaccttggtctccctcctatcggcaagacagagaagaccggtaaacgtagcacttcagcggcggttttagaagctcttcgcgaagtccatcccattgtggacaagatcttgcagtaccgcgaactcgcgaaattgaaaggcacctatattgaccctcttccggcattagtccacccgaaaacgggacgcctccatacccgcttcaaccaaacagccacggcgaccggtcgtttgtcctcctctgatccaaaccttcagaatattccagtacgtaccccattgggccagaagatccgccgcgcgtttgtagctgaggagggttggcgtttagtggccctcgattatagccaaattgaattacgtgtccttgcccatctttctggcgatgagaacctcatccgcgtgtttcaggaaggcaaagacattcacactcaaacggcaagctggatgtttggattatcagctgaagcgatcgatcctttgatgcgtcgtgcagcgaagaccatcaatttcggtgttctctacggtatgagtgcccatcgtttgtcgcaggaattaggcattccctatgaagaagctgcggcgttcattcagcgctactttcaaagctatcccaaagttaaagcatggatcgagaagactctcgaagaaggccgcacacgtggttacgtagagaccttatttggacgtcgccgctatgttcccgatttaaacgctcgcgtgaaatctgtccgtgaagccgccgaacgcatggcgttcaacatgcctgtacagggcacggcagctgacctcatgaaacttgcaatggtgcgcctttttccacaattgcgtgaagttggtgcccgcatgctcttgcaggtccacgatgaactcttgttagaagcgccaaaagagcgtgcggaagaggtggcagccctcgcgaaagaggttatggaaggcgtgtggcccttagcggtgcctcttgaagtcgaagttggtattggcgaggattggttggctgccaaaggataatga

SEQ ID NO: 1362 - protein, 841 aa, synthetic construct
  REGION 1..841: note = Variant of DNA polymerase I from Thermus sp. strain 2.9
MHHHHHHGGSGMLPLFEPKGRVLLVDGHHLAYRNFFALKGLTTSRGEPVQGVYGFAKSLLKALKEDGDVVIVVFDAKAPSFRHEAYEAYKAGRAPTPEDFPRQLALMKELVDLLGLERLEVPGFEADDVLATLAKKAEREGYEVQILTADRDLFQLLSPRISVLHPEGHRITPEWLWEKYGLRPEQWVDFRALAGDPSDNIPGVKGIGEKTALKLLKEWGSLENLLKNLDQVKPESVREKILAHLEDLKLSLELSRVRTDLPLEVDFRRRREPDWEGLKAFLERLEFGSLLHEFGLLESPLPAEEAPWPPPEGAFLGYRLSRPEPMWAELLALAASAQGRVYRAEDPHGALRGLKEVRGLLAKDLAVVALREGLDLPPTDDPMLLAYLLDPSNTTPEGVARRYGGEWTEDAGERALLAERLHANLLGRLQGEERLLWLYEEVEKPLSRVLAHMEATGVKLDVAYLENLSLEVAAEMRRLEEEVFRLAGHSFNLNSRDQLERVLFDNLGLPPIGKTEKTGKRSTSAAVLEALREVHPIVDKILQYRELAKLKGTYIDPLPALVHPKTGRLHTRFNQTATATGRLSSSDPNLQNIPVRTPLGQKIRRAFVAEEGWRLVALDYSQIELRVLAHLSGDENLIRVFQEGKDIHTQTASWMFGLSAEAIDPLMRRAAKTINFGVLYGMSAHRLSQELGIPYEEAAAFIQRYFQSYPKVKAWIEKTLEEGRTRGYVETLFGRRRYVPDLNARVKSVREAAERMAFNMPVQGTAADLMKLAMVRLFPQLREVGARMLLQVHDELLLEAPKERAEEVAALAKEVMEGVWPLAVPLEVEVGIGEDWLAAKG

SEQ ID NO: 1363 - DNA, 2529 bp, synthetic construct
  misc_feature 1..2529: note = Variant of DNA polymerase I from Thermus sp. strain 2.9
  source 1..2529: mol_type = other DNA
atgcaccatcatcatcatcatggcggtagcggcatgttaccgttgttcgaacctaaaggtcgcgtgcttctggttgatggccatcatctcgcgtatcgtaacttctttgccctgaaaggattaaccaccagccgtggcgagccggtacagggtgtctacggctttgcaaagtcgctcctgaaagctctgaaagaagacggtgatgtggtgattgttgtctttgatgcgaaagcgccaagttttcgccacgaagcgtacgaagcttacaaagccgggcgtgctccaacgccggaagactttcctcgccaattggcgcttatgaaggaattagtggatttgcttggcctcgaacgcttggaagttcccggtttcgaggcagacgacgtattagcgactctcgcaaagaaagccgaacgtgagggctatgaagtccagatcttgacagcagatcgcgatcttttccagcttttatctccgcgcatctcggtgttacacccggaagggcatcgtatcaccccggaatggctctgggagaaatatggtttgcgtcccgaacaatgggtggattttcgcgccttagcaggcgatccgagcgacaatattccgggagttaaaggtatcggcgagaagacggcgctcaagctccttaaagaatgggggtcgttggagaacttgcttaagaatttagatcaggtcaaaccagagtcagtgcgtgagaagattcttgcacacctcgaagacctcaaattaagccgcgaattgtcccgtgtacgcaccgatttgccgctcgaagttgatttccgtggccgccgcgaacctgactgggagggtcttaaagcgtttttagagcgtcttgaatttggttcgctcttgcatgaattcggccttttagaaagcccgttaccagccgaagaagcaccttggccaccgcccgaaggcgcgtttttaggttaccgtttgagtcgcccggaaccgatgtgggccgaattattggctcttgcagcgtctgcccagggacgtgtgtatcgcgcggaagaccctcatggtgcgctccgcggcctcaaagaagtccgtggactccttgccaaagacttagctgttgttgcattgcgcgaaggtcttgatttacctccgactgatgatccaatgcttcttgcgtacctcttggacccgtcaaacacgacgcccgaaggcgtagcccgtcgttacggcggcgagtggaccgaagatgcaggcgagcgcgcgttattggccgaacgtttgcacgccaatttattaggacgtttgcaaggcgaggggcgtctcctctggctttacgaagaagtggagaaaccattgagtcgcgtgctcgcgcatatggaagctaccggtgtcaaattagacgtggcgtatttggaggcactcagccttgaagttgctgccgaaatgcgccgcttggaggaagaagtattccgtttagcaggccactcctttaaccttaattctcgcgatcagttagaacgtgtgttgttcgatgaacttggtctccctcctatcggcaagacagagaagaccggtaaacgtagcacttcagcggcggttttagaagctcttcgcgaagtccatcccattgtggacaagatcttgcagtaccgcgaactcgcgaaattgaaaggcacctatattgaccctcttccggcattagtccacccgaaaacgggacgcctccatacccgcttcaaccaaacagccacggcgaccggtcgtttgtcctcctctgatccaaaccttcagaatattccagtacgtaccccattgggccagaagatccgccgcgcgtttgtagctgaggagggttggcgtttagtggccctcgattatagccaaattgaattacgtgtccttgcccatctttctggcgatgagaacctcatccgcgtgtttcaggaaggcaaagacattcacactcaaacggcaagctggatgtttggattatcagctgaagcgatcgatcctttgatgcgtcgtgcagcgaagaccatcaatttcggtgttctctacggtatgagtgcccatcgtttgtcgcaggaattaggcattccctatgaagaagctgcggcgttcattcagcgctactttcaaagctatcccaaagttaaagcatggatcgagaagactctcgaagaaggccgcacacgtggttacgtagagaccttatttggacgtcgccgctatgttcccgatttaaacgctcgcgtgaaatctgtccgtgaagccgccgaacgcatggcgttcaacatgcctgtacagggcacggcagctgacctcatgaaacttgcaatggtgcgcctttttccacaattgcgtgaagttggtgcccgcatgctcttgcaggtccacgatgaactcttgttagaagcgccaaaagagcgtgcggaagaggtggcagccctcgcgaaagaggttatggaaggcgtgtggcccttagcggtgcctcttgaagtcgaagttggtattggcgaggattggttggctgccaaaggataatga

SEQ ID NO: 1364 - protein, 841 aa, synthetic construct
  REGION 1..841: note = Variant of DNA polymerase I from Thermus sp. strain 2.9
MHHHHHHGGSGMLPLFEPKGRVLLVDGHHLAYRNFFALKGLTTSRGEPVQGVYGFAKSLLKALKEDGDVVIVVFDAKAPSFRHEAYEAYKAGRAPTPEDFPRQLALMKELVDLLGLERLEVPGFEADDVLATLAKKAEREGYEVQILTADRDLFQLLSPRISVLHPEGHRITPEWLWEKYGLRPEQWVDFRALAGDPSDNIPGVKGIGEKTALKLLKEWGSLENLLKNLDQVKPESVREKILAHLEDLKLSRELSRVRTDLPLEVDFRGRREPDWEGLKAFLERLEFGSLLHEFGLLESPLPAEEAPWPPPEGAFLGYRLSRPEPMWAELLALAASAQGRVYRAEDPHGALRGLKEVRGLLAKDLAVVALREGLDLPPTDDPMLLAYLLDPSNTTPEGVARRYGGEWTEDAGERALLAERLHANLLGRLQGEGRLLWLYEEVEKPLSRVLAHMEATGVKLDVAYLEALSLEVAAEMRRLEEEVFRLAGHSFNLNSRDQLERVLFDELGLPPIGKTEKTGKRSTSAAVLEALREVHPIVDKILQYRELAKLKGTYIDPLPALVHPKTGRLHTRFNQTATATGRLSSSDPNLQNIPVRTPLGQKIRRAFVAEEGWRLVALDYSQIELRVLAHLSGDENLIRVFQEGKDIHTQTASWMFGLSAEAIDPLMRRAAKTINFGVLYGMSAHRLSQELGIPYEEAAAFIQRYFQSYPKVKAWIEKTLEEGRTRGYVETLFGRRRYVPDLNARVKSVREAAERMAFNMPVQGTAADLMKLAMVRLFPQLREVGARMLLQVHDELLLEAPKERAEEVAALAKEVMEGVWPLAVPLEVEVGIGEDWLAAKG

SEQ ID NO: 1365 - DNA, 2529 bp, synthetic construct
  misc_feature 1..2529: note = Variant of DNA polymerase I from Thermus sp. strain 2.9
  source 1..2529: mol_type = other DNA
atgcaccatcatcatcatcatggcggtagcggcatgttaccgttgttcgaacctaaaggtcgcgtgcttctggttgatggccatcatctcgcgtatcgtaacttctttgccctgaaaggattaaccaccagccgtggcgagccggtacagggtgtctacggctttgcaaagtcgctcctgaaagctctgaaagaagacggtgatgtggtgattgttgtctttgatgcgaaagcgccaagttttcgccacgaagcgtacgaagcttacaaagccgggcgtgctccaacgccggaagactttcctcgccaattggcgcttatgaaggaattagtggatttgcttggcctcgaacgcttggaagttcccggtttcgaggcagacgacgtattagcgactctcgcaaagaaagccgaacgtgagggctatgaagtccagatcttgacagcagatcgcgatcttttccagcttttatctccgcgcatctcggtgttacacccggaagggcatcgtatcaccccggaatggctctgggagaaatatggtttgcgtcccgaacaatgggtggattttcgcgccttagcaggcgatccgagcgacaatattccgggagttaaaggtatcggcgagaagacggcgctcaagctccttaaagaatgggggtcgttggagaacttgcttaagaatttagatcaggtcaaaccagagtcagtgcgtgagaagattcttgcacacctcgaagacctcaaattaagccgcgaattgtcccgtgtacgcaccgatttgccgctcgaagttgatttccgtggccgccgcgaacctgactgggagggtcttaaagcgtttttagagcgtcttgaatttggttcgctcttgcatgaattcggccttttagaaagcccgttaccagccgaagaagcaccttggccaccgcccgaaggcgcgtttttaggttaccgtttgagtcgcccggaaccgatgtgggccgaattattggctcttgcagcgtctgcccagggacgtgtgtatcgcgcggaagaccctcatggtgcgctccgcggcctcaaagaagtccgtggactccttgccaaagacttagctgttgttgcattgcgcgaaggtcttgatttacctccgactgatgatccaatgcttcttgcgtacctcttggacccgtcaaacacgacgcccgaaggcgtagcccgtcgttacggcggcgagtggaccgaagatgcaggcgagcgcgcgttattggccgaacgtttgcacgccaatttattaggacgtttgcaaggcgaggaacgtctcctctggctttacgaagaagtggagaaaccattgagtcgcgtgctcgcgcatatggaagctaccggtgtcaaattagacgtggcgtatttggaggcactcagccttgaagttgctgccgaaatgcgcattttggaggaagaagtattccgtttagcaggccactcctttaaccttaattctcgcgatcagttagaacgtgtgttgttcgatgaacttggtctccctcctatcggcaagacagagaagaccggtaaacgtagcacttcagcggcggttttagaagctcttcgcgaagtccatcccattgtggacaagatcttgcagtaccgcgaactcgcgaaattgaaaggcacctatattgaccctcttccggcattagtccacccgaaaacgggacgcctccatacccgcttcaaccaaacagccacggcgaccggtcgtttgtcctcctctgatccaaaccttcagaatattccagtacgtaccccattgggccagaagatccgccgcgcgtttgtagctgaggagggttggcgtttagtggccctcgattatagccaaattgaattacgtgtccttgcccatctttctggcgatgagaacctcatccgcgtgtttcaggaaggcaaagacattcacactcaaacggcaagctggatgtttggattatcagctgaagcgatcgatcctttgatgcgtcgtgcagcgaagaccatcaatttcggtgttctctacggtatgagtgcccatcgtttgtcgcaggaattaggcattccctatgaagaagctgcggcgttcattcagcgctactttcaaagctatcccaaagttaaagcatggatcgagaagactctcgaagaaggccgcacacgtggttacgtagagaccttatttggacgtcgccgctatgttcccgatttaaacgctcgcgtgaaatctgtccgtgaagccgccgaacgcatggcgttcaacatgcctgtacagggcacggcagctgacctcatgaaacttgcaatggtgcgcctttttccacaattgcgtgaagttggtgcccgcatgctcttgcaggtccacgatgaactcttgttagaagcgccaaaagagcgtgcggaagaggtggcagccctcgcgaaagaggttatggaaggcgtgtggcccttagcggtgcctcttgaagtcgaagttggtattggcgaggattggttggctgccaaaggataatga

SEQ ID NO: 1366 - protein, 841 aa, synthetic construct
  REGION 1..841: note = Variant of DNA polymerase I from Thermus sp. strain 2.9
MHHHHHHGGSGMLPLFEPKGRVLLVDGHHLAYRNFFALKGLTTSRGEPVQGVYGFAKSLLKALKEDGDVVIVVFDAKAPSFRHEAYEAYKAGRAPTPEDFPRQLALMKELVDLLGLERLEVPGFEADDVLATLAKKAEREGYEVQILTADRDLFQLLSPRISVLHPEGHRITPEWLWEKYGLRPEQWVDFRALAGDPSDNIPGVKGIGEKTALKLLKEWGSLENLLKNLDQVKPESVREKILAHLEDLKLSRELSRVRTDLPLEVDFRGRREPDWEGLKAFLERLEFGSLLHEFGLLESPLPAEEAPWPPPEGAFLGYRLSRPEPMWAELLALAASAQGRVYRAEDPHGALRGLKEVRGLLAKDLAVVALREGLDLPPTDDPMLLAYLLDPSNTTPEGVARRYGGEWTEDAGERALLAERLHANLLGRLQGEERLLWLYEEVEKPLSRVLAHMEATGVKLDVAYLEALSLEVAAEMRILEEEVFRLAGHSFNLNSRDQLERVLFDELGLPPIGKTEKTGKRSTSAAVLEALREVHPIVDKILQYRELAKLKGTYIDPLPALVHPKTGRLHTRFNQTATATGRLSSSDPNLQNIPVRTPLGQKIRRAFVAEEGWRLVALDYSQIELRVLAHLSGDENLIRVFQEGKDIHTQTASWMFGLSAEAIDPLMRRAAKTINFGVLYGMSAHRLSQELGIPYEEAAAFIQRYFQSYPKVKAWIEKTLEEGRTRGYVETLFGRRRYVPDLNARVKSVREAAERMAFNMPVQGTAADLMKLAMVRLFPQLREVGARMLLQVHDELLLEAPKERAEEVAALAKEVMEGVWPLAVPLEVEVGIGEDWLAAKG

SEQ ID NO: 1367 - DNA, 2529 bp, synthetic construct
  misc_feature 1..2529: note = Variant of DNA polymerase I from Thermus sp. strain 2.9
  source 1..2529: mol_type = other DNA
atgcaccatcatcatcatcatggcggtagcggcatgttaccgttgttcgaacctaaaggtcgcgtgcttctggttgatggccatcatctcgcgtatcgtaacttctttgccctgaaaggattaaccaccagccgtggcgagccggtacagggtgtctacggctttgcaaagtcgctcctgaaagctctgaaagaagacggtgatgtggtgattgttgtctttgatgcgaaagcgccaagttttcgccacgaagcgtacgaagcttacaaagccgggcgtgctccaacgccggaagactttcctcgccaattggcgcttatgaaggaattagtggatttgcttggcctcgaacgcttggaagttcccggtttcgaggcagacgacgtattagcgactctcgcaaagaaagccgaacgtgagggctatgaagtccagatcttgacagcagatcgcgatcttttccagcttttatctccgcgcatctcggtgttacacccggaagggcatcgtatcaccccggaatggctctgggagaaatatggtttgcgtcccgaacaatgggtggattttcgcgccttagcaggcgatccgagcgacaatattccgggagttaaaggtatcggcgagaagacggcgctcaagctccttaaagaatgggggtcgttggagaacttgcttaagaatttagatcaggtcaaaccagagtcagtgcgtgagaagattcttgcacacctcgaagacctcaaattaagccgcgaattgtcccgtgtacgcaccgatttgccgctcgaagttgatttccgtggtcgccgcgaacctgactgggagggtcttaaagcgtttttagagcgtcttgaatttggttcgctcttgcatgaattcggccttttagaaagcccgttaccagccgaagaagcaccttggccaccgcccgaaggcgcgtttttaggttaccgtttgagtcgcccggaaccgatgtgggccgaattattggctcttgcagcgtctgcccaggagcgtgtgtatcgcgcggaagaccctcatggtgcgctcaagggcctcaaagaagtccgtggactccttgccaaagacttagctgttgttgcattgcgcgaaggtcttgatttacctccgactgatgatccaatgcttcttgcgtacctcttggacccgtcaaacacgacgcccgaaggcgtagcccgtcgttacggcggcgagtggaccgaagatgcagctgagcgcgcgttattggccgaacgtttgcacgccaatttattaggacgtttgcaaggcgaggaacgtctcctctggctttacgaagaagtggagaaaccattgagtcgcgtgctcgcgcatatggaagctaccggtgtcaaattagacgtggcgtatttggagaacctcagccttgaagttgctgccgaaatgcgccgcttggaggaagaagtattccgtttagcaggccactcctttaaccttaattctcgcgatcagttagaacgtgtgttgttcgatgagcttggtctccctcctatcggcaagacagagaagaccggtaaacgtagcacttcagcggcggttttagaagctcttcgcgaagtccatcccattgtggacaagatcttgcagtaccgcgaactcgcgaaattgaaaggcacctatattgaccctcttccggcattagtccacccgaaaacgggacgcctccatacccgcttcaaccaaacagccacggcgaccggtcgtttgtcctcctctgatccaaaccttcagaatattccagtacgtaccccattgggccagaagatccgccgcgcgtttgtagctgaggagggttggcgtttagtggccctcgattatagccaaattgaattacgtgtccttgcccatctttctggcgatgagaacctcatccgcgtgtttcaggaaggcaaagacattcacactcaaacggcaagctggatgtttggattatcaccagaagcgatcgatcctttgatgcgtcgtgcagcgaagaccatcaatttcggtgttctctacggtatgagtgcccatcgtttgtcgcaggaattaggcattccctatgaagaagctgcggcgttcattcagcgctactttcaaagctatcccaaagttaaagcatggatcgagaagactctcgaagaaggccgcacacgtggttacgtagagaccttatttggacgtcgccgctatgttcccgatttaaacgctcgcgtgaaatctgtccgtgaagccgccgaacgcatggcgttcaacatgcctgtacagggcacggcagctgacctcatgaaacttgcaatggtgcgcctttttccacaattgcgtgaagttggtgcccgcatgctcttgcaggtccacgatgaactcttgttagaagcgccaaaagagcgtgcggaagaggtggcagccctcgcgaaagaggttatggaaggcgtgtggcccttagcggtgcctcttgaagtcgaagttggtattggcgaggattggttggctgccaaaggataatga

SEQ ID NO: 1368 - protein, 841 aa, synthetic construct
  REGION 1..841: note = Variant of DNA polymerase I from Thermus sp. strain 2.9
MHHHHHHGGSGMLPLFEPKGRVLLVDGHHLAYRNFFALKGLTTSRGEPVQGVYGFAKSLLKALKEDGDVVIVVFDAKAPSFRHEAYEAYKAGRAPTPEDFPRQLALMKELVDLLGLERLEVPGFEADDVLATLAKKAEREGYEVQILTADRDLFQLLSPRISVLHPEGHRITPEWLWEKYGLRPEQWVDFRALAGDPSDNIPGVKGIGEKTALKLLKEWGSLENLLKNLDQVKPESVREKILAHLEDLKLSRELSRVRTDLPLEVDFRGRREPDWEGLKAFLERLEFGSLLHEFGLLESPLPAEEAPWPPPEGAFLGYRLSRPEPMWAELLALAASAQERVYRAEDPHGALKGLKEVRGLLAKDLAVVALREGLDLPPTDDPMLLAYLLDPSNTTPEGVARRYGGEWTEDAAERALLAERLHANLLGRLQGEERLLWLYEEVEKPLSRVLAHMEATGVKLDVAYLENLSLEVAAEMRRLEEEVFRLAGHSFNLNSRDQLERVLFDELGLPPIGKTEKTGKRSTSAAVLEALREVHPIVDKILQYRELAKLKGTYIDPLPALVHPKTGRLHTRFNQTATATGRLSSSDPNLQNIPVRTPLGQKIRRAFVAEEGWRLVALDYSQIELRVLAHLSGDENLIRVFQEGKDIHTQTASWMFGLSPEAIDPLMRRAAKTINFGVLYGMSAHRLSQELGIPYEEAAAFIQRYFQSYPKVKAWIEKTLEEGRTRGYVETLFGRRRYVPDLNARVKSVREAAERMAFNMPVQGTAADLMKLAMVRLFPQLREVGARMLLQVHDELLLEAPKERAEEVAALAKEVMEGVWPLAVPLEVEVGIGEDWLAAKG

SEQ ID NO: 1369 - DNA, 2529 bp, synthetic construct
  misc_feature 1..2529: note = Variant of DNA polymerase I from Thermus sp. strain 2.9
  source 1..2529: mol_type = other DNA
atgcaccatcatcatcatcatggcggtagcggcatgttaccgttgttcgaacctaaaggtcgcgtgcttctggttgatggccatcatctcgcgtatcgtaacttctttgccctgaaaggattaaccaccagccgtggcgagccggtacagggtgtctacggctttgcaaagtcgctcctgaaagctctgaaagaagacggtgatgtggtgattgttgtctttgatgcgaaagcgccaagttttcgccacgaagcgtacgaagcttacaaagccgggcgtgctccaacgccggaagactttcctcgccaattggcgcttatgaaggaattagtggatttgcttggcctcgaacgcttggaagttcccggtttcgaggcagacgacgtattagcgactctcgcaaagaaagccgaacgtgagggctatgaagtccagatcttgacagcagatcgcgatcttttccagcttttatctccgcgcatctcggtgttacacccggaagggcatcgtatcaccccggaatggctctgggagaaatatggtttgcgtcccgaacaatgggtggattttcgcgccttagcaggcgatccgagcgacaatattccgggagttaaaggtatcggcgagaagacggcgctcaagctccttaaagaatgggggtcgttggagaacttgcttaagaatttagatcaggtcaaaccagagtcagtgcgtgagaagattcttgcacacctcgaagacctcaaattaagccgcgaattgtcccgtgtacgcaccgatttgccgctcgaagttgatttccgtggccgccgcgaacctgactgggagggtcttaaagcgtttttagagcgtcttgaatttggttcgctcttgcatgaattcggccttttagaaagcccgttaccagccgaagaagcaccttggccaccgcccgaaggcgcgtttttaggttaccgtttgagtcgcccggaaccgatgtgggccgaattattggctcttgcagcgtctgcccagggacgtgtgtatcgcgcggaagaccctcatggtgcgctccgcggcctcaaagaagtccgtggactccttgccaaagacttagctgttgttgcattgcgcgaaggtcttgatttacctccgactgatgatccaatgcttcttgcgtacctcttggacccgtcaaacacgacgcccgaaggcgtagcccgtcgttacggcggcgagtggaccgaagatgcaggcgagcgcgcgttattggccgaacgtttgcacgccaatttattaggatgtttgcaaggcgaggaacgtctcctctggctttacgaagaagtggagaaaccattgagtcgcgtgctcgcgcatatggaagctaccggtgtcaaattagacgtggcgtatttggaggcactcagccttgaagttgctgccgaaatgcgccgcttggaggaagaagtattccgtttagcaggccactcctttaaccttaattctcgcgatcagttagaacgtgtgttgttcgatgaacttggtctccctcctatcggcaagacagagaagaccggtaaacgtagcacttcagcggcggttttagaagctcttcgcgaagtccatcccattgtggacaagatcttgcagtaccgcgaactcgcgaaattgaaaggcacctatattgaccctcttccggcattagtccacccgaaaacgggacgcctccatacccgcttcaaccaaacagccacggcgaccggtcgtttgtcctcctctgatccaaaccttcagaatattccagtacgtaccccattgggccagaagatccgccgcgcgtttgtagctgaggagggttggcgtttagtggccctcgattatagccaaattgaattacgtgtccttgcccatctttctggcgatgagaacctcatccgcgtgtttcaggaaggcaaagacattcacactcaaacggcaagctggatgtttggattatcagctgaagcgatcgatcctttgatgcgtcgtgcagcgaagaccatcaatttcggtgttctctacggtatgagtgcccatcgtttgtcgcaggaattaggcattccctatgaagaagctgcggcgttcattcagcgctactttcaaagctatcccaaagttaaagcatggatcgagaagactctcgaagaaggccgcacacgtggttacgtagagaccttatttggacgtcgccgctatgttcccgatttaaacgctcgcgtgaaatctgtccgtgaagccgccgaacgcatggcgttcaacatgcctgtacagggcacggcagctgacctcatgaaacttgcaatggtgcgcctttttccacaattgcgtgaagttggtgcccgcatgctcttgcaggtccacgatgaactcttgttagaagcgccaaaagagcgtgcggaagaggtggcagccctcgcgaaagaggttatggaaggcgtgtggcccttagcggtgcctcttgaagtcgaagttggtattggcgaggattggttggctgccaaaggataatga

SEQ ID NO: 1370 - protein, 841 aa, synthetic construct
  REGION 1..841: note = Variant of DNA polymerase I from Thermus sp. strain 2.9
MHHHHHHGGSGMLPLFEPKGRVLLVDGHHLAYRNFFALKGLTTSRGEPVQGVYGFAKSLLKALKEDGDVVIVVFDAKAPSFRHEAYEAYKAGRAPTPEDFPRQLALMKELVDLLGLERLEVPGFEADDVLATLAKKAEREGYEVQILTADRDLFQLLSPRISVLHPEGHRITPEWLWEKYGLRPEQWVDFRALAGDPSDNIPGVKGIGEKTALKLLKEWGSLENLLKNLDQVKPESVREKILAHLEDLKLSRELSRVRTDLPLEVDFRGRREPDWEGLKAFLERLEFGSLLHEFGLLESPLPAEEAPWPPPEGAFLGYRLSRPEPMWAELLALAASAQGRVYRAEDPHGALRGLKEVRGLLAKDLAVVALREGLDLPPTDDPMLLAYLLDPSNTTPEGVARRYGGEWTEDAGERALLAERLHANLLGCLQGEERLLWLYEEVEKPLSRVLAHMEATGVKLDVAYLEALSLEVAAEMRRLEEEVFRLAGHSFNLNSRDQLERVLFDELGLPPIGKTEKTGKRSTSAAVLEALREVHPIVDKILQYRELAKLKGTYIDPLPALVHPKTGRLHTRFNQTATATGRLSSSDPNLQNIPVRTPLGQKIRRAFVAEEGWRLVALDYSQIELRVLAHLSGDENLIRVFQEGKDIHTQTASWMFGLSAEAIDPLMRRAAKTINFGVLYGMSAHRLSQELGIPYEEAAAFIQRYFQSYPKVKAWIEKTLEEGRTRGYVETLFGRRRYVPDLNARVKSVREAAERMAFNMPVQGTAADLMKLAMVRLFPQLREVGARMLLQVHDELLLEAPKERAEEVAALAKEVMEGVWPLAVPLEVEVGIGEDWLAAKG

SEQ ID NO: 1371 - DNA, 2529 bp, synthetic construct
  misc_feature 1..2529: note = Variant of DNA polymerase I from Thermus sp. strain 2.9
  source 1..2529: mol_type = other DNA
atgcaccatcatcatcatcatggcggtagcggcatgttaccgttgttcgaacctaaaggtcgcgtgcttctggttgatggccatcatctcgcgtatcgtaacttctttgccctgaaaggattaaccaccagccgtggcgagccggtacagggtgtctacggctttgcaaagtcgctcctgaaagctctgaaagaagacggtgatgtggtgattgttgtctttgatgcgaaagcgccaagttttaagcacgaagcgtacgaagcttacaaagccgggcgtgctccaacgccggaagactttcctcgccaattggcgcttatgaaggaattagtggatttgcttggcctcgaacgcttggaagttcccggtttcgaggcagacgacgtattagcgactctcgcaaagaaagccgaacgtgagggctatgaagtccagatcttgacagcagatcgcgatcttttccagcttttatctccgcgcatctcggtgttacacccggaagggcatcgtatcaccccggaatggctctgggagaaatatggtttgcgtcccgaacaatgggtggattttcgcgccttagcaggcgatccgagcgacaatattccgggagttaaaggtatcggcgagaagacggcgctcaagctccttaaagaatgggggtcgttggagaacttgcttaagaatttagatcaggtcaaaccagagtcagtgcgtgagaagattcttgcacacctcgaagacctcaaattaagccgcgaattgtcccgtgtacgcaccgatttgccgctcgaagttgatttccgtggccgccgcgaacctgactgggagggtcttaaagcgtttttagagcgtcttgaatttggttcgctcttgcatgaattcggccttttagaaagcccgttaccagccgaagaagcaccttggccaccgcccgaaggcgcgtttttaggttaccgtttgagtcgcccggaaccgatgtgggccgaattattggctcttgcagcgtctgcccagggacgtgtgtatcgcgcggaagaccctcatggtgcgctccgcggcctcaaagaagtccgtggactccttgccaaagacttagctgttgttgcattgcgcgaaggtcttgatttacctccgactgatgatccaatgcttcttgcgtacctcttggacccgtcaaacacgacgcccgaaggcgtagcccgtcgttacggcggcgagtggaccgaagatgcaggcgagcgcgcgttattggccgaacgtttgcacgccaatttattaggacgtttgcaaggcgaggaacgtctcctctggctttacgaagaagtggagaaaccattgagtcgcgtgctcgcgcatatggaagctaccggtgtcaaattagacgtggcgtatttggaggcactcagccttgaagttgctgccgaaatgcgccgcttggaggaagaagtattccgtttagcaggccactcctttaaccttaattctcgcgatcagttagaacgtgtgttgttcgatgaacttggtctccctcctatcggcaagacagagaagaccggtaaacgtagcacttcagcggcggttttagaagctcttcgcgaagtccatcccattgtggacaagatcttgcagtaccgcgaactcgcgaaattgaaaggcacctatattgaccctcttccggcattagtccacccgaaaacgggacgcctccatacccgcttcaaccaaacagccacggcgaccggtcgtttgtcctcctctgatccaaaccttcagaatattccagtacgtaccccattgggccagaagatccgccgcgcgtttgtagctgaggagggttggcgtttagtggccctcgattatagccaaattgaattacgtgtccttgcccatctttctggcgatgagaacctcatccgcgtgtttcaggaaggcaaagacattcacactcaaacggcaagctggatgtttggattatcagctgaagcgatcgatcctttgatgcgtcgtgcagcgaagaccatcaatttcggtgttctctacggtatgagtgcccatcgtttgtcgcaggaattaggcattccctatgaagaagctgcggcgttcattcagcgctactttcaaagctatcccaaagttaaagcatggatcgagaagactctcgaagaaggccgcacacgtggttacgtagagaccttatttggacgtcgccgctatgttcccgatttaaacgctcgcgtgaaatctgtccgtgaagccgccgaacgcatggcgttcaacatgcctgtacagggcacggcagctgacctcatgaaacttgcaatggtgcgcctttttccacaattgcgtgaagttggtgcccgcatgctcttgcaggtccacgatgaactcttgttagaagcgccaaaagagcgtgcggaagaggtggcagccctcgcgaaagaggttatggaaggcgtgtggcccttagcggtgcctcttgaagtcgaagttggtattggcgaggattggttggctgccaaaggataatga

SEQ ID NO: 1372 - protein, 841 aa, synthetic construct
  REGION 1..841: note = Variant of DNA polymerase I from Thermus sp. strain 2.9
MHHHHHHGGSGMLPLFEPKGRVLLVDGHHLAYRNFFALKGLTTSRGEPVQGVYGFAKSLLKALKEDGDVVIVVFDAKAPSFKHEAYEAYKAGRAPTPEDFPRQLALMKELVDLLGLERLEVPGFEADDVLATLAKKAEREGYEVQILTADRDLFQLLSPRISVLHPEGHRITPEWLWEKYGLRPEQWVDFRALAGDPSDNIPGVKGIGEKTALKLLKEWGSLENLLKNLDQVKPESVREKILAHLEDLKLSRELSRVRTDLPLEVDFRGRREPDWEGLKAFLERLEFGSLLHEFGLLESPLPAEEAPWPPPEGAFLGYRLSRPEPMWAELLALAASAQGRVYRAEDPHGALRGLKEVRGLLAKDLAVVALREGLDLPPTDDPMLLAYLLDPSNTTPEGVARRYGGEWTEDAGERALLAERLHANLLGRLQGEERLLWLYEEVEKPLSRVLAHMEATGVKLDVAYLEALSLEVAAEMRRLEEEVFRLAGHSFNLNSRDQLERVLFDELGLPPIGKTEKTGKRSTSAAVLEALREVHPIVDKILQYRELAKLKGTYIDPLPALVHPKTGRLHTRFNQTATATGRLSSSDPNLQNIPVRTPLGQKIRRAFVAEEGWRLVALDYSQIELRVLAHLSGDENLIRVFQEGKDIHTQTASWMFGLSAEAIDPLMRRAAKTINFGVLYGMSAHRLSQELGIPYEEAAAFIQRYFQSYPKVKAWIEKTLEEGRTRGYVETLFGRRRYVPDLNARVKSVREAAERMAFNMPVQGTAADLMKLAMVRLFPQLREVGARMLLQVHDELLLEAPKERAEEVAALAKEVMEGVWPLAVPLEVEVGIGEDWLAAKG

SEQ ID NO: 1373 - DNA, 2529 bp, synthetic construct
  misc_feature 1..2529: note = Variant of DNA polymerase I from Thermus sp. strain 2.9
  source 1..2529: mol_type = other DNA
atgcaccatcatcatcatcatggcggtagcggcatgttaccgttgttcgaacctaaaggtcgcgtgcttctggttgatggccatcatctcgcgtatcgtaacttctttgccctgaaaggattaaccaccagccgtggcgagccggtacagggtgtctacggctttgcaaagtcgctcctgaaagctctgaaagaagacggtgatgtggtgattgttgtctttgatgcgaaagcgccaagttttcgccacgaagcgtacgaagcttacaaagccgggcgtgctccaacgccggaagactttcctcgccaattggcgcttatgaaggaattagtggatttgcttggcctcgaacgcttggaagttcccggtttcgaggcagacgacgtattagcgactctcgcaaagaaagccgaacgtgagggctatgaagtccagatcttgacagcagatcgcgatcttttccagcttttatctccgcgcatctcggtgttacacccggaagggcatcgtatcaccccggaatggctctgggagaaatatggtttgcgtcccgaacaatgggtggattttcgcgccttagcaggcgatccgagcgacaatattccgggagttaaaggtatcggcgagaagacggcgctcaagctccttaaagaatgggggtcgttggagaacttgcttaagaatttagatcaggtcaaaccagagtcagtgcgtgagaagattcttgcacacctcgaagacctcaaattaagccgcgaattgtcccgtgtacgcaccgatttgccgctcgaagttgatttccgtcgtcgccgcgaacctgactgggagggtcttaaagcgtttttagagcgtcttgaatttggttcgctcttgcatgaattcggccttttagaaagcccgttaccagccgaagaagcaccttggccaccgcccgaaggcgcgtttttaggttaccgtttgagtcgcccggaaccgatgtgggccgaattactggctcttgcagcgtctgcccaggggcgtgtgtatcgcgcggaagaccctcatggtgcgctccgcggcctcaaagaagtcaacggactccttgccaaagacttagctgttgttgcattgcgcgaaggtcttgatttacctccgactgatgatccaatgcttcttgcgtacctcttggacccgtcaaacacgacgcccgaaggcgtagcccgtcgttacggcggcgagtggaccgaagatgcaggcgagcgcgcgttattggccgaacgtttgcacgccaatttattaggacgtttgcaaggcgaggaacgtctcctctggctttacgaagaagtggagaaaccattgagtcgcgtgctcgcgcatatggaagctaccggtgtcaaattagacgtggcgtatttggagaacctcagccttgaagttgctgccgaaatgcgccgcttggaggaagaagtattccgtttagcaggccactcctttaaccttaattctcgcgatcagttagaacgtgtgttgttcgataaccttggtctccctcctatcggcaagacagagaagaccggtaaacgtagcacttcagcggcggttttagaagctcttcgcgaagtccatcccattgtggacaagatcttgcagtaccgcgaactcgcgaaattgaaaggcacctatattgaccctcttccggcattagtccacccgaaaacgggacgcctccatacccgcttcaaccaaacagccacggcgaccggtcgtttgtcctcctctgatccaaaccttcagaatattccagtacgtaccccattgggccagaagatccgccgcgcgtttgtagctgaggagggttggcgtttagtggccctcgattatagccaaattgaattacgtgtccttgcccatctttctggcgatgagaacctcatccgcgtgtttcaggaaggcaaagacattcacactcaaacggcaagctggatgtttggattatcaccagaagcgatcgatcctttgatgcgtcgtgcagcgaagaccatcaatttcggtgttctctacggtatgagtgcccatcgtttgtcgcaggaattaggcattccctatgaagaagctgtcgcgttcattcagcgctactttcaaagctatcccaaagttaaagcatggatcgagaagactctcgaagaaggccgcacacgtggttacgtagagaccttatttggacgtcgccgctatgttcccgatttaaacgctcgcgtgaaatctgtccgtgaagccgccgaacgcatggcgttcaacatgcctgtacagggcacggcagctgacctcatgaaacttgcaatggtgcgcctttttccacaattgcgtgaagttggtgcccgcatgctcttgcaggtccacgatgaactcttgttagaagcgccaaaagagcgtgcggaagaggtggcagccctcgcgaaagaggttatggaaggcgtgtggcccttagcggtgcctcttgaagtcgaagttggtattggcgaggattggttggctgccaaaggataatga

SEQ ID NO: 1374 - protein, 841 aa, synthetic construct
  REGION 1..841: note = Variant of DNA polymerase I from Thermus sp. strain 2.9
MHHHHHHGGSGMLPLFEPKGRVLLVDGHHLAYRNFFALKGLTTSRGEPVQGVYGFAKSLLKALKEDGDVVIVVFDAKAPSFRHEAYEAYKAGRAPTPEDFPRQLALMKELVDLLGLERLEVPGFEADDVLATLAKKAEREGYEVQILTADRDLFQLLSPRISVLHPEGHRITPEWLWEKYGLRPEQWVDFRALAGDPSDNIPGVKGIGEKTALKLLKEWGSLENLLKNLDQVKPESVREKILAHLEDLKLSRELSRVRTDLPLEVDFRRRREPDWEGLKAFLERLEFGSLLHEFGLLESPLPAEEAPWPPPEGAFLGYRLSRPEPMWAELLALAASAQGRVYRAEDPHGALRGLKEVNGLLAKDLAVVALREGLDLPPTDDPMLLAYLLDPSNTTPEGVARRYGGEWTEDAGERALLAERLHANLLGRLQGEERLLWLYEEVEKPLSRVLAHMEATGVKLDVAYLENLSLEVAAEMRRLEEEVFRLAGHSFNLNSRDQLERVLFDNLGLPPIGKTEKTGKRSTSAAVLEALREVHPIVDKILQYRELAKLKGTYIDPLPALVHPKTGRLHTRFNQTATATGRLSSSDPNLQNIPVRTPLGQKIRRAFVAEEGWRLVALDYSQIELRVLAHLSGDENLIRVFQEGKDIHTQTASWMFGLSPEAIDPLMRRAAKTINFGVLYGMSAHRLSQELGIPYEEAVAFIQRYFQSYPKVKAWIEKTLEEGRTRGYVETLFGRRRYVPDLNARVKSVREAAERMAFNMPVQGTAADLMKLAMVRLFPQLREVGARMLLQVHDELLLEAPKERAEEVAALAKEVMEGVWPLAVPLEVEVGIGEDWLAAKG

SEQ ID NO: 1375 - DNA, 2529 bp, synthetic construct
  misc_feature 1..2529: note = Variant of DNA polymerase I from Thermus sp. strain 2.9
  source 1..2529: mol_type = other DNA
atgcaccatcatcatcatcatggcggtagcggcctgttaccgttgttcgaacctaaaggtcgcgtgcttctggttgatggccatcatctcgcgtatcgtaacttctttgccctgaaaggattaaccaccagccgtggcgagccggtacagggtgtctacggctttgcaaagtcgctcctgaaagctctgaaagaagacggtgatgtggtgattgttgtctttgatgcgaaagcgccaagttttcgccacgaagcgtacgaagcttacaaagccgggcgtgctccaacgccggaagactttcctcgccaattggcgcttatgaaggaattagtggatttgcttggcctcgaacgcttggaagttcccggtttcgaggcagacgacgtattagcgactctcgcaaagaaagccgaacgtgagggctatgaagtccagatcttgacagcagatcgcgatcttttccagcttttatctccgcgcatctcggtgttacacccggaagggcatcgtatcaccccggaatggctctgggagaaatatggtttgcgtcccgaacaatgggtggattttcgcgccttagcaggcgatccgagcgacaatattccgggagttaaaggtatcggcgagaagacggcgctcaagctccttaaagaatgggggtcgttggagaacttgcttaagaatttagatcaggtcaaaccagagtcagtgcgtgagaagattcttgcacacctcgaagacctcaaattaagccgcgaattgtcccgtgtacgcaccgatttgccgctcgaagttgatttccgtggccgccgcgaacctgactgggagggtcttaaagcgtttttagagcgtcttgaatttggttcgctcttgcatgaattcggccttttagaaagcccgttaccagccgaagaagcaccttggccaccgcccgaaggcgcgtttttaggttaccgtttgagtcgcccggaaccgatgtgggccgaattattggctcttgcagcgtctgcccagggacgtgtgtatcgcgcggaagaccctcatggtgcgctccgcggcctcaaagaagtccgtggactccttgccaaagacttagctgttgttgcattgcgcgaaggtcttgatttacctccgactgatgatccaatgcttcttgcgtacctcttggacccgtcaaacacgacgcccgaaggcgtagcccgtcgttacggcggcgagtggaccgaagatgcaggcgagcgcgcgttattggccgaacgtttgcacgccaatttattaggacgtttgcaaggcgaggaacgtctcctctggctttacgaagaagtggagaaaccattgagtcgcgtgctcgcgcatatggaagctaccggtgtcaaattagacgtggcgtatttggaggcactcagccttgaagttgctgccgaaatgcgccgcttggaggaagaagtattccgtttagcaggccactcctttaaccttaattctcgcgatcagttagaacgtgtgttgttcgatgaacttggtctccctcctatcggcaagacagagaagaccggtaaacgtagcacttcagcggcggttttagaagctcttcgcgaagtccatcccattgtggacaagatcttgcagtaccgcgaactcgcgaaattgaaaggcacctatattgaccctcttccggcattagtccacccgaaaacgggacgcctccatacccgcttcaaccaaacagccacggcgaccggtcgtttgtcctcctctgatccaaaccttcagaatattccagtacgtaccccattgggccagaagatccgccgcgcgtttgtagctgaggagggttggcgtttagtggccctcgattatagccaaattgaattacgtgtccttgcccatctttctggcgatgagaacctcatccgcgtgtttcaggaaggcaaagacattcacactcaaacggcaagctggatgtttggattatcagctgaagcgatcgatcctttgatgcgtcgtgcagcgaagaccatcaatttcggtgttctctacggtatgagtgcccatcgtttgtcgcaggaattaggcattccctatgaagaagctgcggcgttcattcagcgctactttcaaagctatcccaaagttaaagcatggatcgagaagactctcgaagaaggccgcacacgtggttacgtagagaccttatttggacgtcgccgctatgttcccgatttaaacgctcgcgtgaaatctgtccgtgaagccgccgaacgcatggcgttcaacatgcctgtacagggcacggcagctgacctcatgaaacttgcaatggtgcgcctttttccacaattgcgtgaagttggtgcccgcatgctcttgcaggtccacgatgaactcttgttagaagcgccaaaagagcgtgcggaagaggtggcagccctcgcgaaagaggttatggaaggcgtgtggcccttagcggtgcctcttgaagtcgaagttggtattggcgaggattggttggctgccaaaggataatga

SEQ ID NO: 1376 - protein, 841 aa, synthetic construct
  REGION 1..841: note = Variant of DNA polymerase I from Thermus sp. strain 2.9
MHHHHHHGGSGLLPLFEPKGRVLLVDGHHLAYRNFFALKGLTTSRGEPVQGVYGFAKSLLKALKEDGDVVIVVFDAKAPSFRHEAYEAYKAGRAPTPEDFPRQLALMKELVDLLGLERLEVPGFEADDVLATLAKKAEREGYEVQILTADRDLFQLLSPRISVLHPEGHRITPEWLWEKYGLRPEQWVDFRALAGDPSDNIPGVKGIGEKTALKLLKEWGSLENLLKNLDQVKPESVREKILAHLEDLKLSRELSRVRTDLPLEVDFRGRREPDWEGLKAFLERLEFGSLLHEFGLLESPLPAEEAPWPPPEGAFLGYRLSRPEPMWAELLALAASAQGRVYRAEDPHGALRGLKEVRGLLAKDLAVVALREGLDLPPTDDPMLLAYLLDPSNTTPEGVARRYGGEWTEDAGERALLAERLHANLLGRLQGEERLLWLYEEVEKPLSRVLAHMEATGVKLDVAYLEALSLEVAAEMRRLEEEVFRLAGHSFNLNSRDQLERVLFDELGLPPIGKTEKTGKRSTSAAVLEALREVHPIVDKILQYRELAKLKGTYIDPLPALVHPKTGRLHTRFNQTATATGRLSSSDPNLQNIPVRTPLGQKIRRAFVAEEGWRLVALDYSQIELRVLAHLSGDENLIRVFQEGKDIHTQTASWMFGLSAEAIDPLMRRAAKTINFGVLYGMSAHRLSQELGIPYEEAAAFIQRYFQSYPKVKAWIEKTLEEGRTRGYVETLFGRRRYVPDLNARVKSVREAAERMAFNMPVQGTAADLMKLAMVRLFPQLREVGARMLLQVHDELLLEAPKERAEEVAALAKEVMEGVWPLAVPLEVEVGIGEDWLAAKG

SEQ ID NO: 1377 - DNA, 2529 bp, synthetic construct
  misc_feature 1..2529: note = Variant of DNA polymerase I from Thermus sp. strain 2.9
  source 1..2529: mol_type = other DNA
atgcaccatcatcatcatcatggcggtagcggcatgttaccgttgttcgaacctaaaggtcgcgtgcttctggttgatggccatcatctcgcgtatcgtaacttctttgccctgaaaggattaaccaccagccgtggcgagccggtacagggtgtctacggctttgcaaagtcgctcctgaaagctctgaaagaagacggtgatgtggtgattgttgtctttgatgcgaaagcgccaagttttcgccacgaagcgtacgaagcttacaaagccgggcgtgctccaacgccggaagactttcctcgccaattggcgcttatgaaggaattagtggatttgcttggcctcgaacgcttggaagttcccggtttcgaggcagacgacgtattagcgactctcgcaaagaaagccgaacgtgagggctatgaagtccagatcttgacagcagatcgcgatcttttccagcttttatctccgcgcatctcggtgttacacccggaagggcatcgtatcaccccggaatggctctgggagaaatatggtttgcgtcccgaacaatgggtggattttcgcgccttagcaggcgatccgagcgacaatattccgggagttaaaggtatcggcgagaagacggcgctcgatctccttaaagaatgggggtcgttggagaacttgcttaagaatttagatcaggtcaaaccagagtcagtgcgtgagaagattcttgcacacctcgaagacctcaaattaagccgcgaattgtcccgtgtacgcaccgatttgccgctcgaagttgatttccgtggccgccgcgaacctgactgggagggtcttaaagcgtttttagagcgtcttgaatttggttcgctcttgcatgaattcggccttttagaaagcccgttaccagccgaagaagcaccttggccaccgcccgaaggcgcgtttttaggttaccgtttgagtcgcccggaaccgatgtgggccgaattattggctcttgcagcgtctgcccagggacgtgtgtatcgcgcggaagaccctcatggtgcgctccgcggcctcaaagaagtccgtggactccttgccaaagacttagctgttgttgcattgcgcgaaggtcttgatttacctccgactgatgatccaatgcttcttgcgtacctcttggacccgtcaaacacgacgcccgaaggcgtagcccgtcgttacggcggcgagtggaccgaagatgcaggcgagcgcgcgttattggccgaacgtttgcacgccaatttattaggacgtttgcaaggcgaggaacgtctcctctggctttacgaagaagtggagaaaccattgagtcgcgtgctcgcgcatatggaagctaccggtgtcaaattagacgtggcgtatttggaggcactcagccttgaagttgctgccgaaatgcgccgcttggaggaagaagtattccgtttagcaggccactcctttaaccttaattctcgcgatcagttagaacgtgtgttgttcgatgaacttggtctccctcctatcggcaagacagagaagaccggtaaacgtagcacttcagcggcggttttagaagctcttcgcgaagtccatcccattgtggacaagatcttgcagtaccgcgaactcgcgaaattgaaaggcacctatattgaccctcttccggcattagtccacccgaaaacgggacgcctccatacccgcttcaaccaaacagccacggcgaccggtcgtttgtcctcctctgatccaaaccttcagaatattccagtacgtaccccattgggccagaagatccgccgcgcgtttgtagctgaggagggttggcgtttagtggccctcgattatagccaaattgaattacgtgtccttgcccatctttctggcgatgagaacctcatccgcgtgtttcaggaaggcaaagacattcacactcaaacggcaagctggatgtttggattatcagctgaagcgatcgatcctttgatgcgtcgtgcagcgaagaccatcaatttcggtgttctctacggtatgagtgcccatcgtttgtcgcaggaattaggcattccctatgaagaagctgcggcgttcattcagcgctactttcaaagctatcccaaagttaaagcatggatcgagaagactctcgaagaaggccgcacacgtggttacgtagagaccttatttggacgtcgccgctatgttcccgatttaaacgctcgcgtgaaatctgtccgtgaagccgccgaacgcatggcgttcaacatgcctgtacagggcacggcagctgacctcatgaaacttgcaatggtgcgcctttttccacaattgcgtgaagttggtgcccgcatgctcttgcaggtccacgatgaactcttgttagaagcgccaaaagagcgtgcggaagaggtggcagccctcgcgaaagaggttatggaaggcgtgtggcccttagcggtgcctcttgaagtcgaagttggtattggcgaggattggttggctgccaaaggataatga

SEQ ID NO: 1378 - protein, 841 aa, synthetic construct
  REGION 1..841: note = Variant of DNA polymerase I from Thermus sp. strain 2.9
MHHHHHHGGSGMLPLFEPKGRVLLVDGHHLAYRNFFALKGLTTSRGEPVQGVYGFAKSLLKALKEDGDVVIVVFDAKAPSFRHEAYEAYKAGRAPTPEDFPRQLALMKELVDLLGLERLEVPGFEADDVLATLAKKAEREGYEVQILTADRDLFQLLSPRISVLHPEGHRITPEWLWEKYGLRPEQWVDFRALAGDPSDNIPGVKGIGEKTALDLLKEWGSLENLLKNLDQVKPESVREKILAHLEDLKLSRELSRVRTDLPLEVDFRGRREPDWEGLKAFLERLEFGSLLHEFGLLESPLPAEEAPWPPPEGAFLGYRLSRPEPMWAELLALAASAQGRVYRAEDPHGALRGLKEVRGLLAKDLAVVALREGLDLPPTDDPMLLAYLLDPSNTTPEGVARRYGGEWTEDAGERALLAERLHANLLGRLQGEERLLWLYEEVEKPLSRVLAHMEATGVKLDVAYLEALSLEVAAEMRRLEEEVFRLAGHSFNLNSRDQLERVLFDELGLPPIGKTEKTGKRSTSAAVLEALREVHPIVDKILQYRELAKLKGTYIDPLPALVHPKTGRLHTRFNQTATATGRLSSSDPNLQNIPVRTPLGQKIRRAFVAEEGWRLVALDYSQIELRVLAHLSGDENLIRVFQEGKDIHTQTASWMFGLSAEAIDPLMRRAAKTINFGVLYGMSAHRLSQELGIPYEEAAAFIQRYFQSYPKVKAWIEKTLEEGRTRGYVETLFGRRRYVPDLNARVKSVREAAERMAFNMPVQGTAADLMKLAMVRLFPQLREVGARMLLQVHDELLLEAPKERAEEVAALAKEVMEGVWPLAVPLEVEVGIGEDWLAAKG

SEQ ID NO: 1379 - DNA, 2529 bp, synthetic construct
  misc_feature 1..2529: note = Variant of DNA polymerase I from Thermus sp. strain 2.9
  source 1..2529: mol_type = other DNA
atgcaccatcatcatcatcatggcggtagcggcatgttaccgttgttcgaacctaaaggtcgcgtgcttctggttgatggccatcatctcgcgtatcgtaacttctttgccctgaaaggattaaccaccagccgtggcgagccggtacagggtgtctacggctttgcaaagtcgctcctgaaagctctgaaagaagacggtgatgtggtgattgttgtctttgatgcgaaagcgccaagttttcgccacgaagcgtacgaagcttacaaagccgggcgtgctccaacgccggaagactttcctcgccaattggcgcttatgaaggaattagtggatttgcttggcctcgaacgcttggaagttcccggtttcgaggcagacgacgtattagcgactctcgcaaagaaagccgaacgtgagggctatgaagtccagatcttgacagcagatcgcgatcttttccagcttttatctccgcgcatctcggtgttacacccggaagggcatcgtatcaccccggaatggctctgggagaaatatggtttgcgtcccgaacaatgggtggattttcgcgccttagcaggcgatccgagcgacaatattccgggagttaaaggtatcggcgagaagacggcgctcaagctccttaaagaatgggggtcgttggagaacttgcttaagaatttagatcaggtcaaaccagagtcagtgcgtgagaagattcttgcacacctcgaagacctcaaattaagcctggaattgtcccgtgtacacaccgatttgccgctcgaagttgatttccgtggtcgccgcgaacctgactgggagggtcttaaagcgtttttagagcgtcttgaatttggttcgctcttgcatgaattcggccttttagaaagcccgttaccagccgaagaagcaccttggccaccgcccgaaggcgcgtttttaggttaccgtttgagtcgcccggaaccgatgtgggccgaattatcggctcttgcagcgtctgcccaggggcgtgtgtatcgcgcggaagaccctcatggtgcgctccgcggcctcaaagaagtccgtggactccttgccaaagacttagctgttgttgcattgcgcgaaggtcttgatttacctccgactgatgatccaatgcttcttgcgtacctcttggacccgtcaaacacgacgcccgaaggcgtagcccgtcgttacggcggcgagtggaccgaagatgcaggtgagcgcgcgttattggccgaacgtttgcacgccaatttattaggacgtttgcaaggcgaggaacgtctcctctggctttacgaagaagtggagaaaccattgagtcgcgtgctcgcgcatatggaagctaccggtgtcaaattagacgtggcgtatttggaggctctcagccttgaagttgctgccgaaatgcgccgcttggaggaagaagtattccgtttagcaggccactcctttaaccttaattctcgcgatcagttagaacgtgtgttgttcgatgagcttggtctccctcctatcggcaagacagagaagaccggtaaacgtagcacttcagcggcggttttagaagctcttcgcgaagtccatcccattgtggacaagatcttgcagtaccgcgaactcgcgaaattgaaaggcacctatattgaccctcttccggcattagtccacccgaaaacgggacgcctccatacccgcttcaaccaaacagccacggcgaccggtcgtttgtcctcctctgatccaaaccttcagaatattccagtacgtaccccattgggccagaagatccgccgcgcgtttgtagctgaggagggttggcgtttagtggccctcgattatagccaaattgaattacgtgtccttgcccatctttctggcgatgagaacctcatccgcgtgtttcaggaaggcaaagacattcacactcaaacggcaagctggatgtttggattatcagcagaagcgatcgatcctttgatgcgtcgtgcagcgaagaccattaatttcggtgttctctacggtatgagtgcccatcgtttgtcgcaggaattaggcattccctatgaagaagctgccgcgttcattcagcgctactttcaaagctatcccaaagttaaagcatggatcgagaagactctcgaagaaggccgcacacgtggttacgtagagaccttatttggacgtcgccgctatgttcccgatttaaacgctcgcgtgaaatctgtccgtgaagccgccgaacgcatggcgttcaacatgcctgtacagggcacggcagctgacctcatgaaacttgcaatggtgcgcctttttccacaattgcgtgaagttggtgcccgcatgctcttgcaggtccacgatgaactcttgttagaagcgccaaaagagcgtgcggaagaggtggcagccctcgcgaaagaggttatggaaggcgtgtggcccttagcggtgcctcttgaagtcgaagttggtattggcgaggattggttggctgccaaaggataatga

SEQ ID NO: 1380 - protein, 841 aa, synthetic construct
  REGION 1..841: note = Variant of DNA polymerase I from Thermus sp. strain 2.9
MHHHHHHGGSGMLPLFEPKGRVLLVDGHHLAYRNFFALKGLTTSRGEPVQGVYGFAKSLLKALKEDGDVVIVVFDAKAPSFRHEAYEAYKAGRAPTPEDFPRQLALMKELVDLLGLERLEVPGFEADDVLATLAKKAEREGYEVQILTADRDLFQLLSPRISVLHPEGHRITPEWLWEKYGLRPEQWVDFRALAGDPSDNIPGVKGIGEKTALKLLKEWGSLENLLKNLDQVKPESVREKILAHLEDLKLSLELSRVHTDLPLEVDFRGRREPDWEGLKAFLERLEFGSLLHEFGLLESPLPAEEAPWPPPEGAFLGYRLSRPEPMWAELSALAASAQGRVYRAEDPHGALRGLKEVRGLLAKDLAVVALREGLDLPPTDDPMLLAYLLDPSNTTPEGVARRYGGEWTEDAGERALLAERLHANLLGRLQGEERLLWLYEEVEKPLSRVLAHMEATGVKLDVAYLEALSLEVAAEMRRLEEEVFRLAGHSFNLNSRDQLERVLFDELGLPPIGKTEKTGKRSTSAAVLEALREVHPIVDKILQYRELAKLKGTYIDPLPALVHPKTGRLHTRFNQTATATGRLSSSDPNLQNIPVRTPLGQKIRRAFVAEEGWRLVALDYSQIELRVLAHLSGDENLIRVFQEGKDIHTQTASWMFGLSAEAIDPLMRRAAKTINFGVLYGMSAHRLSQELGIPYEEAAAFIQRYFQSYPKVKAWIEKTLEEGRTRGYVETLFGRRRYVPDLNARVKSVREAAERMAFNMPVQGTAADLMKLAMVRLFPQLREVGARMLLQVHDELLLEAPKERAEEVAALAKEVMEGVWPLAVPLEVEVGIGEDWLAAKG

SEQ ID NO: 1381 - DNA, 2529 bp, synthetic construct
  misc_feature 1..2529: note = Variant of DNA polymerase I from Thermus sp. strain 2.9
  source 1..2529: mol_type = other DNA
atgcaccatcatcatcatcatggcggtagcggcatgttaccgttgttcgaacctaaaggtcgcgtgcttctggttgatggccatcatctcgcgtatcgtaacttctttgccctgaaaggattaaccaccagccgtggcgagccggtacagggtgtctacggctttgcaaagtcgctcctgaaagctctgaaagaagacggtgatgtggtgattgttgtctttgatgcgaaagcgccaagttttcgccacgaagcgtacgaagcttacaaagccgggcgtgctccaacgccggaagactttcctcgccaattggcgcttatgaaggaattagtggatttgcttggcctcgaacgcttggaagttcccggtttcgaggcagacgacgtattagcgactctcgcaaagaaagccgaacgtgagggctatgaagtccagatcttgacagcagatcgcgatcttttccagcttttatctccgcgcatctcggtgttacacccggaagggcatcgtatcaccccggaatggctctgggagaaatatggtttgcgtcccgaacaatgggtggattttcgcgccttagcaggcgatccgagcgacaatattccgggagttaaaggtatcggcgagaagacggcgctcaagctccttaaagaatgggggtcgttggagaacttgcttaagaatttagatcaggtcaaaccagagtcagtgcgtgagaagattcttgcacacctcgaagacctcaaattaagccgcgaattgtcccgtgtacgcaccgatttgccgctcgaagttgatttccgtggtcgccgcgaacctgactgggagggtcttaaagcgtttttagagcgtcttgaatttggttcgctcttgcatgaattcggccttttagaaagcccgttaccagccgaagaagcaccttggccaccgcccgaaggcgcgtttttaggttaccgtttgagtcgcccggaaccgatgtgggccgaattatcggctcttgcagcgtctgcccaggggcgtgtgtatcgcgcggaagaccctcatggtgcgctccgcggcctcaaagaagtccgtggactccttgccaaagacttagctgttgttgcattgcgcgaaggtcttgatttacctccgactgatgatccaatgcttcttgcgtacctcttggacccgtcaaacacgacgcccgaaggcgtagcccgtcgttacggcggcgagtggaccgaagatgcagctaagcgcgcgttattggccgaacgtttgcacgccaatttattaggacgtttgcaaggcgaggaacgtctcctctggctttacgaagaagtggagaaaccattgagtcgcgtgctcgcgcatatggaagctaccggtgtcaaattagacgtggcgtatttggagaacctcagccttgaagttgctgccgaaatgcgccgcttggaggaagaagtattccgtttagcaggccactcctttaaccttaattctcgcgatcagttagaacgtgtgttgttcgatgaacttggtctccctcctatcggcaagacagagaagaccggtaaacgtagcacttcagcggcggttttagaagctcttcgcgaagtccatcccattgtggacaagatcttgcagtaccgcgaactcgcgaaattgaaaggcacctatattgaccctcttccggcattagtccacccgaaaacgggacgcctccatacccgcttcaaccaaacagccacggcgaccggtcgtttgtcctcctctgatccaaaccttcagaatattccagtacgtaccccattgggccagaagatccgccgcgcgtttgtagctgaggagggttggcgtttagtggccctcgattatagccaaattgaattacgtgtccttgcccatctttctggcgatgagaacctcatccgcgtgtttcaggaaggcaaagacattcacactcaaacggcaagctggatgtttggattatcagcagaagcgatcgatcctttgatgcgtcgtgcagcgaagaccattaatttcggtgttctctacggtatgagtgcccatcgtttgtcgcaggaattaggcattccctatgaagaagctgtcgcgttcattcagaagtactttcaaagctatcccaaagttaaagcatggatcgagaagactctcgaagaaggccgcacacgtggttacgtagagaccttatttggacgtcgccgctatgttcccgatttaaacgctcgcgtgaaatctgtccgtgaagccgccgaacgcatggcgttcaacatgcctgtacagggcacggcagctgacctcatgaaacttgcaatggtgcgcctttttccacaattgcgtgaagttggtgcccgcatgctcttgcaggtccacgatgaactcttgttagaagcgccaaaagagcgtgcggaagaggtggcagccctcgcgaaagaggttatggaaggcgtgtggcccttagcggtgcctcttgaagtcgaagttggtattggcgaggattggttggctgccaaaggataatga

SEQ ID NO: 1382 - protein, 841 aa, synthetic construct
  REGION 1..841: note = Variant of DNA polymerase I from Thermus sp. strain 2.9
MHHHHHHGGSGMLPLFEPKGRVLLVDGHHLAYRNFFALKGLTTSRGEPVQGVYGFAKSLLKALKEDGDVVIVVFDAKAPSFRHEAYEAYKAGRAPTPEDFPRQLALMKELVDLLGLERLEVPGFEADDVLATLAKKAEREGYEVQILTADRDLFQLLSPRISVLHPEGHRITPEWLWEKYGLRPEQWVDFRALAGDPSDNIPGVKGIGEKTALKLLKEWGSLENLLKNLDQVKPESVREKILAHLEDLKLSRELSRVRTDLPLEVDFRGRREPDWEGLKAFLERLEFGSLLHEFGLLESPLPAEEAPWPPPEGAFLGYRLSRPEPMWAELSALAASAQGRVYRAEDPHGALRGLKEVRGLLAKDLAVVALREGLDLPPTDDPMLLAYLLDPSNTTPEGVARRYGGEWTEDAAKRALLAERLHANLLGRLQGEERLLWLYEEVEKPLSRVLAHMEATGVKLDVAYLENLSLEVAAEMRRLEEEVFRLAGHSFNLNSRDQLERVLFDELGLPPIGKTEKTGKRSTSAAVLEALREVHPIVDKILQYRELAKLKGTYIDPLPALVHPKTGRLHTRFNQTATATGRLSSSDPNLQNIPVRTPLGQKIRRAFVAEEGWRLVALDYSQIELRVLAHLSGDENLIRVFQEGKDIHTQTASWMFGLSAEAIDPLMRRAAKTINFGVLYGMSAHRLSQELGIPYEEAVAFIQKYFQSYPKVKAWIEKTLEEGRTRGYVETLFGRRRYVPDLNARVKSVREAAERMAFNMPVQGTAADLMKLAMVRLFPQLREVGARMLLQVHDELLLEAPKERAEEVAALAKEVMEGVWPLAVPLEVEVGIGEDWLAAKG

SEQ ID NO: 1383 - DNA, 2529 bp, synthetic construct
  misc_feature 1..2529: note = Variant of DNA polymerase I from Thermus sp. strain 2.9
  source 1..2529: mol_type = other DNA
atgcaccatcatcatcatcatggcggtagcggcatgttaccgttgttcgaacctaaaggtcgcgtgcttctggttgatggccatcatctcgcgtatcgtaacttctttgccctgaaaggattaaccaccagccgtggcgagccggtacagggtgtctacggctttgcaaagtcgctcctgaaagctctgaaagaagacggtgatgtggtgattgttgtctttgatgcgaaagcgccaagttttcgccacgaagcgtacgaagcttacaaagccgggcgtgctccaacgccggaagactttcctcgccaattggcgcttatgaaggaattagtggatttgcttggcctcgaacgcttggaagttcccggtttcgaggcagacgacgtattagcgactctcgcaaagaaagccgaacgtgagggctatgaagtccagatcttgacagcagatcgcgatcttttccagcttttatctccgcgcatctcggtgttacacccggaagggcatcgtatcaccccggaatggctctgggagaaatatggtttgcgtcccgaacaatgggtggattttcgcgccttagcaggcgatccgagcgacaatattccgggagttaaaggtatcggcgagaagacggcgctcaagctccttaaagaatgggggtcgttggagaacttgcttaagaatttagatcaggtcaaaccagagtcagtgcgtgagaagattcttgcacacctcgaagacctcaaattaagccgcgaattgtcccgtgtacgcaccgatttgccgctcgaagttgatttccgtggccgccgcgaacctgactgggagggtcttaaagcgtttttagagcgtcttgaatttggttcgctcttgcatgaattcggccttttagaaagcccgttaccagccgaagaagcaccttggccaccgcccgaaggcgcgtttttaggttaccgtttgagtcgcccggaaccgatgtgggccgaattattggctcttgcagcgtctgcccagggacgtgtgtatcgcgcggaagaccctcatggtgcgctccgcggcctcaaagaagtccgtggactccttgccaaagacttagctgttgttgcattgcgcgaaggtcttgatttacctccgactgatgatccaatgcttcttgcgtacctcttggacccgtcaaacacgacgcccgaaggcgtagcccgtcgttacggcggcgagtggaccgaagatgcaggcgagcgcgcgttattggccgaacgtttgcacgccaatttattaggacgtttgcaaggcgaggaacgtctcctctggctttacgaagaagtggagaaaccattgagtcgcgtgctcgcgcatatggaagctaccggtgtcaaattagacgtggcgtatttggaggcactcagccttgaagttgctgccgaaatgacgcgcttggaggaagaagtattccgtttagcaggccactcctttaaccttaattctcgcgatcagttagaacgtgtgttgttcgatgaacttggtctccctcctatcggcaagacagagaagaccggtaaacgtagcacttcagcggcggttttagaagctcttcgcgaagtccatcccattgtggacaagatcttgcagtaccgcgaactcgcgaaattgaaaggcacctatattgaccctcttccggcattagtccacccgaaaacgggacgcctccatacccgcttcaaccaaacagccacggcgaccggtcgtttgtcctcctctgatccaaaccttcagaatattccagtacgtaccccattgggccagaagatccgccgcgcgtttgtagctgaggagggttggcgtttagtggccctcgattatagccaaattgaattacgtgtccttgcccatctttctggcgatgagaacctcatccgcgtgtttcaggaaggcaaagacattcacactcaaacggcaagctggatgtttggattatcagctgaagcgatcgatcctttgatgcgtcgtgcagcgaagaccatcaatttcggtgttctctacggtatgagtgcccatcgtttgtcgcaggaattaggcattccctatgaagaagctgcggcgttcattcagcgctactttcaaagctatcccaaagttaaagcatggatcgagaagactctcgaagaaggccgcacacgtggttacgtagagaccttatttggacgtcgccgctatgttcccgatttaaacgctcgcgtgaaatctgtccgtgaagccgccgaacgcatggcgttcaacatgcctgtacagggcacggcagctgacctcatgaaacttgcaatggtgcgcctttttccacaattgcgtgaagttggtgcccgcatgctcttgcaggtccacgatgaactcttgttagaagcgccaaaagagcgtgcggaagaggtggcagccctcgcgaaagaggttatggaaggcgtgtggcccttagcggtgcctcttgaagtcgaagttggtattggcgaggattggttggctgccaaaggataatga

SEQ ID NO: 1384 - protein, 841 aa, synthetic construct
  REGION 1..841: note = Variant of DNA polymerase I from Thermus sp. strain 2.9
MHHHHHHGGSGMLPLFEPKGRVLLVDGHHLAYRNFFALKGLTTSRGEPVQGVYGFAKSLLKALKEDGDVVIVVFDAKAPSFRHEAYEAYKAGRAPTPEDFPRQLALMKELVDLLGLERLEVPGFEADDVLATLAKKAEREGYEVQILTADRDLFQLLSPRISVLHPEGHRITPEWLWEKYGLRPEQWVDFRALAGDPSDNIPGVKGIGEKTALKLLKEWGSLENLLKNLDQVKPESVREKILAHLEDLKLSRELSRVRTDLPLEVDFRGRREPDWEGLKAFLERLEFGSLLHEFGLLESPLPAEEAPWPPPEGAFLGYRLSRPEPMWAELLALAASAQGRVYRAEDPHGALRGLKEVRGLLAKDLAVVALREGLDLPPTDDPMLLAYLLDPSNTTPEGVARRYGGEWTEDAGERALLAERLHANLLGRLQGEERLLWLYEEVEKPLSRVLAHMEATGVKLDVAYLEALSLEVAAEMTRLEEEVFRLAGHSFNLNSRDQLERVLFDELGLPPIGKTEKTGKRSTSAAVLEALREVHPIVDKILQYRELAKLKGTYIDPLPALVHPKTGRLHTRFNQTATATGRLSSSDPNLQNIPVRTPLGQKIRRAFVAEEGWRLVALDYSQIELRVLAHLSGDENLIRVFQEGKDIHTQTASWMFGLSAEAIDPLMRRAAKTINFGVLYGMSAHRLSQELGIPYEEAAAFIQRYFQSYPKVKAWIEKTLEEGRTRGYVETLFGRRRYVPDLNARVKSVREAAERMAFNMPVQGTAADLMKLAMVRLFPQLREVGARMLLQVHDELLLEAPKERAEEVAALAKEVMEGVWPLAVPLEVEVGIGEDWLAAKG

SEQ ID NO: 1385 - DNA, 2529 bp, synthetic construct
  misc_feature 1..2529: note = Variant of DNA polymerase I from Thermus sp. strain 2.9
  source 1..2529: mol_type = other DNA
atgcaccatcatcatcatcatggcggtagcggcatgttaccgttgttcgaacctaaaggtcgcgtgcttctggttgatggccatcatctcgcgtatcgtaacttctttgccctgaaaggattaaccaccagccgtggcgagccggtacagggtgtctacggctttgcaaagtcgctcctgaaagctctgaaagaagacggtgatgtggtgattgttgtctttgatgcgaaagcgccaagttttcgccacgaagcgtacgaagcttacaaagccgggcgtgctccaacgccggaagactttcctcgccaattggcgcttatgaaggaattagtggatttgcttggcctcgaacgcttggaagttcccggtttcgaggcagacgacgtattagcgactctcgcaaagaaagccgaacgtgagggctatgaagtccagatcttgacagcagatcgcgatcttttccagcttttatctccgcgcatctcggtgttacacccggaagggcatcgtatcaccccggaatggctctgggagaaatatggtttgcgtcccgaacaatgggtggattttcgcgccttagcaggcgatccgagcgacaatattccgggagttaaaggtatcggcgagaagacggcgctcaagctccttaaagaatgggggtcgttggagaacttgcttaagaatttagatcaggtcaaaccagagtcagtgcgtgagaagattcttgcacacctcgaagacctcaaattaagcctggaattgtcccgtgtacgcaccgatttgccgctcgaagttgatttccgtggccgccgcgaacctgactgggagggtcttaaagcgtttttagagcgtcttgaatttggttcgctcttgcatgaattcggccttttagaaagcccgttaccagccgaagaagcaccttggccaccgcccgaaggcgcgtttttaggttaccgtttgagtcgcccggaaccgatgtgggccgaattactggctcttgcagcgtctgcccaggggcgtgtgtatcgcgcggaagaccctcatggtgcgctcaagggcctcaaagaagtccgtggactccttgccaaagacttagctgttgttgcattgcgcgaaggtcttgatttacctccgactgatgatccaatgcttcttgcgtacctcttggacccgtcaaacacgacgcccgaaggcgtagcccgtcgttacggcggcgagtggaccgaagatgcaggcgagcgcgcgttattggccgaacgtttgcacgccaatttattaggacgtttgcaaggcgaggaacgtctcctctggctttacgaagaagtggagaaaccattgagtcgcgtgctcgcgcatatggaagctaccggtgtcaaattagacgtggcgtatttggaggcactcagccttgaagttgctgccgaaatgcgccgcttggaggaagaagtattccgtttagcaggccactcctttaaccttaattctcgcgatcagttagaacgtgtgttgttcgatgaacttggtctccctcctatcggcaagacagagaagaccggtaaacgtagcacttcagcggcggttttagaagctcttcgcgaagtccatcccattgtggacaagatcttgcagtaccgcgaactcgcgaaattgaaaggcacctatattgaccctcttccggcattagtccacccgaaaacgggacgcctccatacccgcttcaaccaaacagccacggcgaccggtcgtttgtcctcctctgatccaaaccttcagaatattccagtacgtaccccattgggccagaagatccgccgcgcgtttgtagctgaggagggttggcgtttagtggccctcgattatagccaaattgaattacgtgtccttgcccatctttctggcgatgagaacctcatccgcgtgtttcaggaaggcaaagacattcacactcaaacggcaagctggatgtttggattatcaccagaagcgatcgatcctttgatgcgtcgtgcagcgaagaccattaatttcggtgttctctacggtatgagtgcccatcgtttgtcgcaggaattaggcattccctatgaagaagctgcggcgttcattcagcgctactttcaaagctatcccaaagttaaagcatggatcgagaagactctcgaagaaggccgcacacgtggttacgtagagaccttatttggacgtcgccgctatgttcccgatttaaacgctcgcgtgaaatctgtccgtgaagccgccgaacgcatggcgttcaacatgcctgtacagggcacggcagctgacctcatgaaacttgcaatggtgcgcctttttccacaattgcgtgaagttggtgcccgcatgctcttgcaggtccacgatgaactcttgttagaagcgccaaaagagcgtgcggaagaggtggcagccctcgcgaaagaggttatggaaggcgtgtggcccttagcggtgcctcttgaagtcgaagttggtattggcgaggattggttggctgccaaaggataatga

SEQ ID NO: 1386 - protein, 841 aa, synthetic construct
  REGION 1..841: note = Variant of DNA polymerase I from Thermus sp. strain 2.9
MHHHHHHGGSGMLPLFEPKGRVLLVDGHHLAYRNFFALKGLTTSRGEPVQGVYGFAKSLLKALKEDGDVVIVVFDAKAPSFRHEAYEAYKAGRAPTPEDFPRQLALMKELVDLLGLERLEVPGFEADDVLATLAKKAEREGYEVQILTADRDLFQLLSPRISVLHPEGHRITPEWLWEKYGLRPEQWVDFRALAGDPSDNIPGVKGIGEKTALKLLKEWGSLENLLKNLDQVKPESVREKILAHLEDLKLSLELSRVRTDLPLEVDFRGRREPDWEGLKAFLERLEFGSLLHEFGLLESPLPAEEAPWPPPEGAFLGYRLSRPEPMWAELLALAASAQGRVYRAEDPHGALKGLKEVRGLLAKDLAVVALREGLDLPPTDDPMLLAYLLDPSNTTPEGVARRYGGEWTEDAGERALLAERLHANLLGRLQGEERLLWLYEEVEKPLSRVLAHMEATGVKLDVAYLEALSLEVAAEMRRLEEEVFRLAGHSFNLNSRDQLERVLFDELGLPPIGKTEKTGKRSTSAAVLEALREVHPIVDKILQYRELAKLKGTYIDPLPALVHPKTGRLHTRFNQTATATGRLSSSDPNLQNIPVRTPLGQKIRRAFVAEEGWRLVALDYSQIELRVLAHLSGDENLIRVFQEGKDIHTQTASWMFGLSPEAIDPLMRRAAKTINFGVLYGMSAHRLSQELGIPYEEAAAFIQRYFQSYPKVKAWIEKTLEEGRTRGYVETLFGRRRYVPDLNARVKSVREAAERMAFNMPVQGTAADLMKLAMVRLFPQLREVGARMLLQVHDELLLEAPKERAEEVAALAKEVMEGVWPLAVPLEVEVGIGEDWLAAKG

SEQ ID NO: 1387 - DNA, 2529 bp, synthetic construct
  misc_feature 1..2529: note = Variant of DNA polymerase I from Thermus sp. strain 2.9
  source 1..2529: mol_type = other DNA
atgcaccatcatcatcatcatggcggtagcggcatgttaccgttgttcgaacctaaaggtcgcgtgcttctggttgatggccatcatctcgcgtatcgtaacttctttgccctgaaaggattaaccaccagccgtggcgagccggtacagggtgtctacggctttgcaaagtcgctcctgaaagctctgaaagaagacggtgatgtggtgattgttgtctttgatgcgaaagcgccaagttttcgccacgaagcgtacgaagcttacaaagccgggcgtgctccaacgccggaagactttcctcgccaattggcgcttatgaaggaattagtggatttgcttggcctcgaacgcttggaagttcccggtttcgaggcagacgacgtattagcgactctcgcaaagaaagccgaacgtgagggctatgaagtccagatcttgacagcagatcgcgatcttttccagcttttatctccgcgcatctcggtgttacacccggaagggcatcgtatcaccccggaatggctctgggagaaatatggtttgcgtcccgaacaatgggtggattttcgcgccttagcaggcgatccgagcgacaatattccgggagttaaaggtatcggcgagaagacggcgctcaagctccttaaagaatgggggtcgttggagaacttgcttaagaatttagatcaggtcaaaccagagtcagtgcgtgagaagattcttgcacacctcgaagacctcaaattaagcctggaattgtcccgtgtacgcaccgatttgccgctcgaagttgatttccgtcgtcgccgcgaacctgactgggagggtcttaaagcgtttttagagcgtcttgaatttggttcgctcttgcatgaattcggccttttagaaagcccgttaccagccgaagaagcaccttggccaccgcccgaaggcgcgtttttaggttaccgtttgagtcgcccggaaccgatgtgggccgaattactggctcttgcagcgtctgcccaggggcgtgtgtatcgcgcggaagaccctcatggtgcgctccgtggcctcaaagaagtccgtggactccttgccaaagacttagctgttgttgcattgcgcgaaggtcttgatttacctccgactgatgatccaatgcttcttgcgtacctcttggacccgtcaaacacgacgcccgaaggcgtagcccgtcgttacggcggcgagtggaccgaagatgcaggtaagcgcgcgttattggccgaacgtttgcacgccaatttattaggacgtttgcaaggcgaggaacgtctcctctggctttacgaagaagtggagaaaccattgagtcgcgtgctcgcgcatatggaagctaccggtgtcaaattagacgtggcgtatttggagaacctcagccttgaagttgctgccgaaatgcgccgcttggaggaagaagtattccgtttagcaggccactcctttaaccttaattctcgcgatcagttagaacgtgtgttgttcgatgaacttggtctccctcctatcggcaagacagagaagaccggtaaacgtagcacttcagcggcggttttagaagctcttcgcgaagtccatcccattgtggacaagatcttgcagtaccgcgaactcgcgaaattgaaaggcacctatattgaccctcttccggcattagtccacccgaaaacgggacgcctccatacccgcttcaaccaaacagccacggcgaccggtcgtttgtcctcctctgatccaaaccttcagaatattccagtacgtaccccattgggccagaagatccgccgcgcgtttgtagctgaggagggttggcgtttagtggccctcgattatagccaaattgaattacgtgtccttgcccatctttctggcgatgagaacctcatccgcgtgtttcaggaaggcaaagacattcacactcaaacggcaagctggatgtttggattatcaccagaagcgatcgatcctttgatgcgtcgtgcagcgaagaccattaatttcggtgttctctacggtatgagtgcccatcgtttgtcgcaggaattaggcattccctatgaagaagctgtcgcgttcattcagaagtactttcaaagctatcccaaagttaaagcatggatcgagaagactctcgaagaaggccgcacacgtggttacgtagagaccttatttggacgtcgccgctatgttcccgatttaaacgctcgcgtgaaatctgtccgtgaagccgccgaacgcatggcgttcaacatgcctgtacagggcacggcagctgacctcatgaaacttgcaatggtgcgcctttttccacaattgcgtgaagttggtgcccgcatgctcttgcaggtccacgatgaactcttgttagaagcgccaaaagagcgtgcggaagaggtggcagccctcgcgaaagaggttatggaaggcgtgtggcccttagcggtgcctcttgaagtcgaagttggtattggcgaggattggttggctgccaaaggataatga

SEQ ID NO: 1388 - protein, 841 aa, synthetic construct
  REGION 1..841: note = Variant of DNA polymerase I from Thermus sp. strain 2.9
MHHHHHHGGSGMLPLFEPKGRVLLVDGHHLAYRNFFALKGLTTSRGEPVQGVYGFAKSLLKALKEDGDVVIVVFDAKAPSFRHEAYEAYKAGRAPTPEDFPRQLALMKELVDLLGLERLEVPGFEADDVLATLAKKAEREGYEVQILTADRDLFQLLSPRISVLHPEGHRITPEWLWEKYGLRPEQWVDFRALAGDPSDNIPGVKGIGEKTALKLLKEWGSLENLLKNLDQVKPESVREKILAHLEDLKLSLELSRVRTDLPLEVDFRRRREPDWEGLKAFLERLEFGSLLHEFGLLESPLPAEEAPWPPPEGAFLGYRLSRPEPMWAELLALAASAQGRVYRAEDPHGALRGLKEVRGLLAKDLAVVALREGLDLPPTDDPMLLAYLLDPSNTTPEGVARRYGGEWTEDAGKRALLAERLHANLLGRLQGEERLLWLYEEVEKPLSRVLAHMEATGVKLDVAYLENLSLEVAAEMRRLEEEVFRLAGHSFNLNSRDQLERVLFDELGLPPIGKTEKTGKRSTSAAVLEALREVHPIVDKILQYRELAKLKGTYIDPLPALVHPKTGRLHTRFNQTATATGRLSSSDPNLQNIPVRTPLGQKIRRAFVAEEGWRLVALDYSQIELRVLAHLSGDENLIRVFQEGKDIHTQTASWMFGLSPEAIDPLMRRAAKTINFGVLYGMSAHRLSQELGIPYEEAVAFIQKYFQSYPKVKAWIEKTLEEGRTRGYVETLFGRRRYVPDLNARVKSVREAAERMAFNMPVQGTAADLMKLAMVRLFPQLREVGARMLLQVHDELLLEAPKERAEEVAALAKEVMEGVWPLAVPLEVEVGIGEDWLAAKG

SEQ ID NO: 1389 - DNA, 2529 bp, synthetic construct
  misc_feature 1..2529: note = Variant of DNA polymerase I from Thermus sp. strain 2.9
  source 1..2529: mol_type = other DNA
atgcaccatcatcatcatcatggcggtagcggcatgttaccgttgttcgaacctaaaggtcgcgtgcttctggttgatggccatcatctcgcgtatcgtaacttctttgccctgaaaggattaaccaccagccgtggcgagccggtacagggtgtctacggctttgcaaagtcgctcctgaaagctctgaaagaagacggtgatgtggtgattgttgtctttgatgcgaaagcgccaagttttcgccacgaagcgtacgaagcttacaaagccgggcgtgctccaacgccggaagactttcctcgccaattggcgcttatgaaggaattagtggatttgcttggcctcgaacgcttggaagttcccggtttcgaggcagacgacgtattagcgactctcgcaaagaaagccgaacgtgagggctatgaagtccagatcttgacagcagatcgcgatcttttccagcttttatctccgcgcatctcggtgttacacccggaagggcatcgtatcaccccggaatggctctgggagaaatatggtttgcgtcccgaacaatgggtggattttcgcgccttagcaggcgatccgagcgacaatattccgggagttaaaggtatcggcgagaagacggcgctcaagctccttaaagaatgggggtcgttggagaacttgcttaagaatttagatcaggtcaaaccagagtcagtgcgtgagaagattcttgcacacctcgaagacctcaaattaagccgcgaattgtcccgtgtacgcaccgatttgccgctcgaagttgatttccgtggtcgccgcgaacctgactgggagggtcttaaagcgtttttagagcgtcttgaatttggttcgctcttgcatgaattcggccttttagaaagcccgttaccagccgaagaagcaccttggccaccgcccgaaggcgcgtttttaggttaccgtttgagtcgcccggaaccgatgtgggccgaattactggctcttgcagcgtctgcccaggggcgtgtgtatcgcgcggaagaccctcatggtgcgctccgcggcctcaaagaagtccgtggactccttgccaaagacttagctgttgttgcattgcgcgaaggtcttgatttacctccgactgatgatccaatgcttcttgcgtacctcttggacccgtcaaacacgacgcccgaaggcgtagcccgtcgttacggcggcgagtggaccgaagatgcaggcgagcgcgcgttattggccgaacgtttgcacgccaatttattaggacgtttgcaaggcgaggaacgtctcctctggctttacgaagaagtggagaaaccattgagtcgcgtgctcgcgcatatggaagctaccggtgtcaaattagacgtggcgtatttggagaacctcagccttgaagttgctgccgaaatgcgccgcttggaggaagaagtattccgtttagcaggccactcctttaaccttaattctcgcgatcagttagaacgtgtgttgttcgataaccttggtctccctcctatcggcaagacagagaagaccggtaaacgtagcacttcagcggcggttttagaagctcttcgcgaagtccatcccattgtggacaagatcttgcagtaccgcgaactcgcgaaattgaaaggcacctatattgaccctcttccggcattagtccacccgaaaacgggacgcctccatacccgcttcaaccaaacagccacggcgaccggtcgtttgtcctcctctgatccaaaccttcagaatattccagtacgtaccccattgggccagaagatccgccgcgcgtttgtagctgaggagggttggcgtttagtggccctcgattatagccaaattgaattacgtgtccttgcccatctttctggcgatgagaacctcatccgcgtgtttcaggaaggcaaagacattcacactcaaacggcaagctggatgtttggattatcagcagaagcgatcgatcctttgatgcgtcgtgcagcgaagaccattaatttcggtgttctctacggtatgagtgcccatcgtttgtcgcaggaattaggcattccctatgaagaagctgtcgcgttcattcagaagtactttcaaagctatcccaaagttaaagcatggatcgagaagactctcgaagaaggccgcacacgtggttacgtagagaccttatttggacgtcgccgctatgttcccgatttaaacgctcgcgtgaaatctgtccgtgaagccgccgaacgcatggcgttcaacatgcctgtacagggcacggcagctgacctcatgaaacttgcaatggtgcgcctttttccacaattgcgtgaagttggtgcccgcatgctcttgcaggtccacgatgaactcttgttagaagcgccaaaagagcgtgcggaagaggtggcagccctcgcgaaagaggttatggaaggcgtgtggcccttagcggtgcctcttgaagtcgaagttggtattggcgaggattggttggctgccaaaggataatga

SEQ ID NO: 1390 - protein, 841 aa, synthetic construct
  REGION 1..841: note = Variant of DNA polymerase I from Thermus sp. strain 2.9
MHHHHHHGGSGMLPLFEPKGRVLLVDGHHLAYRNFFALKGLTTSRGEPVQGVYGFAKSLLKALKEDGDVVIVVFDAKAPSFRHEAYEAYKAGRAPTPEDFPRQLALMKELVDLLGLERLEVPGFEADDVLATLAKKAEREGYEVQILTADRDLFQLLSPRISVLHPEGHRITPEWLWEKYGLRPEQWVDFRALAGDPSDNIPGVKGIGEKTALKLLKEWGSLENLLKNLDQVKPESVREKILAHLEDLKLSRELSRVRTDLPLEVDFRGRREPDWEGLKAFLERLEFGSLLHEFGLLESPLPAEEAPWPPPEGAFLGYRLSRPEPMWAELLALAASAQGRVYRAEDPHGALRGLKEVRGLLAKDLAVVALREGLDLPPTDDPMLLAYLLDPSNTTPEGVARRYGGEWTEDAGERALLAERLHANLLGRLQGEERLLWLYEEVEKPLSRVLAHMEATGVKLDVAYLENLSLEVAAEMRRLEEEVFRLAGHSFNLNSRDQLERVLFDNLGLPPIGKTEKTGKRSTSAAVLEALREVHPIVDKILQYRELAKLKGTYIDPLPALVHPKTGRLHTRFNQTATATGRLSSSDPNLQNIPVRTPLGQKIRRAFVAEEGWRLVALDYSQIELRVLAHLSGDENLIRVFQEGKDIHTQTASWMFGLSAEAIDPLMRRAAKTINFGVLYGMSAHRLSQELGIPYEEAVAFIQKYFQSYPKVKAWIEKTLEEGRTRGYVETLFGRRRYVPDLNARVKSVREAAERMAFNMPVQGTAADLMKLAMVRLFPQLREVGARMLLQVHDELLLEAPKERAEEVAALAKEVMEGVWPLAVPLEVEVGIGEDWLAAKG

SEQ ID NO: 1391 - DNA, 2529 bp, synthetic construct
  misc_feature 1..2529: note = Variant of DNA polymerase I from Thermus sp. strain 2.9
  source 1..2529: mol_type = other DNA
atgcaccatcatcatcatcatggcggtagcggcatgttaccgttgttcgaacctaaaggtcgcgtgcttctggttgatggccatcatctcgcgtatcgtaacttctttgccctgaaaggattaaccaccagccgtggcgagccggtacagggtgtctacggctttgcaaagtcgctcctgaaagctctgaaagaagacggtgatgtggtgattgttgtctttgatgcgaaagcgccaagttttcgccacgaagcgtacgaagcttacaaagccgggcgtgctccaacgccggaagactttcctcgccaattggcgcttatgaaggaattagtggatttgcttggcctcgaacgcttggaagttcccggtttcgaggcagacgacgtattagcgactctcgcaaagaaagccgaacgtgagggctatgaagtccagatcttgacagcagatcgcgatcttttccagcttttatctccgcgcatctcggtgttacacccggaagggcatcgtatcaccccggaatggctctgggagaaatatggtttgcgtcccgaacaatgggtggattttcgcgccttagcaggcgatccgagcgacaatattccgggagttaaaggtatcggcgagaagacggcgctcaagctccttaaagaatgggggtcgttggagaacttgcttaagaatttagatcaggtcaaaccagagtcagtgcgtgagaagattcttgcacacctcgaagacctcaaattaagcctggaattgtcccgtgtacgcaccgatttgccgctcgaagttgatttccgtggtcgccgcgaacctgactgggagggtcttaaagcgtttttagagcgtcttgaatttggttcgctcttgcatgaattcggccttttagaaagcccgttaccagccgaagaagcaccttggccaccgcccgaaggcgcgtttttaggttaccgtttgagtcgcccggaaccgatgtgggccgaattactggctcttgcagcgtctgcccaggggcgtgtgtatcgcgcggaagaccctcatggtgcgctccgtggcctcaaagaagtccgtggactccttgccaaagacttagctgttgttgcattgcgcgaaggtcttgatttacctccgactgatgatccaatgcttcttgcgtacctcttggacccgtcaaacacgacgcccgaaggcgtagcccgtcgttacggcggcgagtggaccgaagatgcaggtaagcgcgcgttattggccgaacgtttgcacgccaatttattaggacgtttgcaaggcgaggaacgtctcctctggctttacgaagaagtggagaaaccattgagtcgcgtgctcgcgcatatggaagctaccggtgtcaaattagacgtggcgtatttggaggcactcagccttgaagttgctgccgaaatgcgccgcttggaggaagaagtattccgtttagcaggccactcctttaaccttaattctcgcgatcagttagaacgtgtgttgttcgatgaacttggtctccctcctatcggcaagacagagaagaccggtaaacgtagcacttcagcggcggttttagaagctcttcgcgaagtccatcccattgtggacaagatcttgcagtaccgcgaactcgcgaaattgaaaggcacctatattgaccctcttccggcattagtccacccgaaaacgggacgcctccatacccgcttcaaccaaacagccacggcgaccggtcgtttgtcctcctctgatccaaaccttcagaatattccagtacgtaccccattgggccagaagatccgccgcgcgtttgtagctgaggagggttggcgtttagtggccctcgattatagccaaattgaattacgtgtccttgcccatctttctggcgatgagaacctcatccgcgtgtttcaggaaggcaaagacattcacactcaaacggcaagctggatgtttggattatcagcagaagcgatcgatcctttgatgcgtcgtgcagcgaagaccattaatttcggtgttctctacggtatgagtgcccatcgtttgtcgcaggaattaggcattccctatgaagaagctgtcgcgttcattcagcgctactttcaaagctatcccaaagttaaagcatggatcgagaagactctcgaagaaggccgcacacgtggttacgtagagaccttatttggacgtcgccgctatgttcccgatttaaacgctcgcgtgaaatctgtccgtgaagccgccgaacgcatggcgttcaacatgcctgtacagggcacggcagctgacctcatgaaacttgcaatggtgcgcctttttccacaattgcgtgaagttggtgcccgcatgctcttgcaggtccacgatgaactcttgttagaagcgccaaaagagcgtgcggaagaggtggcagccctcgcgaaagaggttatggaaggcgtgtggcccttagcggtgcctcttgaagtcgaagttggtattggcgaggattggttggctgccaaaggataatga

SEQ ID NO: 1392 - protein, 841 aa, synthetic construct
  REGION 1..841: note = Variant of DNA polymerase I from Thermus sp. strain 2.9
MHHHHHHGGSGMLPLFEPKGRVLLVDGHHLAYRNFFALKGLTTSRGEPVQGVYGFAKSLLKALKEDGDVVIVVFDAKAPSFRHEAYEAYKAGRAPTPEDFPRQLALMKELVDLLGLERLEVPGFEADDVLATLAKKAEREGYEVQILTADRDLFQLLSPRISVLHPEGHRITPEWLWEKYGLRPEQWVDFRALAGDPSDNIPGVKGIGEKTALKLLKEWGSLENLLKNLDQVKPESVREKILAHLEDLKLSLELSRVRTDLPLEVDFRGRREPDWEGLKAFLERLEFGSLLHEFGLLESPLPAEEAPWPPPEGAFLGYRLSRPEPMWAELLALAASAQGRVYRAEDPHGALRGLKEVRGLLAKDLAVVALREGLDLPPTDDPMLLAYLLDPSNTTPEGVARRYGGEWTEDAGKRALLAERLHANLLGRLQGEERLLWLYEEVEKPLSRVLAHMEATGVKLDVAYLEALSLEVAAEMRRLEEEVFRLAGHSFNLNSRDQLERVLFDELGLPPIGKTEKTGKRSTSAAVLEALREVHPIVDKILQYRELAKLKGTYIDPLPALVHPKTGRLHTRFNQTATATGRLSSSDPNLQNIPVRTPLGQKIRRAFVAEEGWRLVALDYSQIELRVLAHLSGDENLIRVFQEGKDIHTQTASWMFGLSAEAIDPLMRRAAKTINFGVLYGMSAHRLSQELGIPYEEAVAFIQRYFQSYPKVKAWIEKTLEEGRTRGYVETLFGRRRYVPDLNARVKSVREAAERMAFNMPVQGTAADLMKLAMVRLFPQLREVGARMLLQVHDELLLEAPKERAEEVAALAKEVMEGVWPLAVPLEVEVGIGEDWLAAKG

SEQ ID NO: 1393 - DNA, 2529 bp, synthetic construct
  misc_feature 1..2529: note = Variant of DNA polymerase I from Thermus sp. strain 2.9
  source 1..2529: mol_type = other DNA
atgcaccatcatcatcatcatggcggtagcggcatgttaccgttgttcgaacctaaaggtcgcgtgcttctggttgatggccatcatctcgcgtatcgtaacttctttgccctgaaaggattaaccaccagccgtggcgagccggtacagggtgtctacggctttgcaaagtcgctcctgaaagctctgaaagaagacggtgatgtggtgattgttgtctttgatgcgaaagcgccaagttttcgccacgaagcgtacgaagcttacaaagccgggcgtgctccaacgccggaagactttcctcgccaattggcgcttatgaaggaattagtggatttgcttggcctcgaacgcttggaagttcccggtttcgaggcagacgacgtattagcgactctcgcaaagaaagccgaacgtgagggctatgaagtccagatcttgacagcagatcgcgatcttttccagcttttatctccgcgcatctcggtgttacacccggaagggcatcgtatcaccccggaatggctctgggagaaatatggtttgcgtcccgaacaatgggtggattttcgcgccttagcaggcgatccgagcgacaatattccgggagttaaaggtatcggcgagaagacggcgctcaagctccttaaagaatgggggtcgttggagaacttgcttaagaatttagatcaggtcaaaccagagtcagtgcgtgagaagattcttgcacacctcgaagacctcaaattaagccgcgaattgtcccgtgtacgcaccgatttgccgctcgaagttgatttccgtcgtcgccgcgaacctgactgggagggtcttaaagcgtttttagagcgtcttgaatttggttcgctcttgcatgaattcggccttttagaaagcccgttaccagccgaagaagcaccttggccaccgcccgaaggcgcgtttttaggttaccgtttgagtcgcccggaaccgatgtgggccgaattactggctcttgcagcgtctgcccaggggcgtgtgtatcgcgcggaagaccctcatggtgcgctccgcggcctcaaagaagtcaacggactccttgccaaagacttagctgttgttgcattgcgcgaaggtcttgatttacctccgactgatgatccaatgcttcttgcgtacctcttggacccgtcaaacacgacgcccgaaggcgtagcccgtcgttacggcggcgagtggaccgaagatgcagctgagcgcgcgttattggccgaacgtttgcacgccaatttattaggacgtttgcaaggcgaggaacgtctcctctggctttacgaagaagtggagaaaccattgagtcgcgtgctcgcgcatatggaagctaccggtgtcaaattagacgtggcgtatttggaggcactcagccttgaagttgctgccgaaatgcgccgcttggaggaagaagtattccgtttagcaggccactcctttaaccttaattctcgcgatcagttagaacgtgtgttgttcgatgaacttggtctccctcctatcggcaagacagagaagaccggtaaacgtagcacttcagcggcggttttagaagctcttcgcgaagtccatcccattgtggacaagatcttgcagtaccgcgaactcgcgaaattgaaaggcacctatattgaccctcttccggcattagtccacccgaaaacgggacgcctccatacccgcttcaaccaaacagccacggcgaccggtcgtttgtcctcctctgatccaaaccttcagaatattccagtacgtaccccattgggccagaagatccgccgcgcgtttgtagctgaggagggttggcgtttagtggccctcgattatagccaaattgaattacgtgtccttgcccatctttctggcgatgagaacctcatccgcgtgtttcaggaaggcaaagacattcacactcaaacggcaagctggatgtttggattatcaccagaagcgatcgatcctttgatgcgtcgtgcagcgaagaccattaatttcggtgttctctacggtatgagtgcccatcgtttgtcgcaggaattaggcattccctatgaagaagctgccgcgttcattcagaagtactttcaaagctatcccaaagttaaagcatggatcgagaagactctcgaagaaggccgcacacgtggttacgtagagaccttatttggacgtcgccgctatgttcccgatttaaacgctcgcgtgaaatctgtccgtgaagccgccgaacgcatggcgttcaacatgcctgtacagggcacggcagctgacctcatgaaacttgcaatggtgcgcctttttccacaattgcgtgaagttggtgcccgcatgctcttgcaggtccacgatgaactcttgttagaagcgccaaaagagcgtgcggaagaggtggcagccctcgcgaaagaggttatggaaggcgtgtggcccttagcggtgcctcttgaagtcgaagttggtattggcgaggattggttggctgccaaaggataatga

SEQ ID NO: 1394 - protein, 841 aa, synthetic construct
  REGION 1..841: note = Variant of DNA polymerase I from Thermus sp. strain 2.9
MHHHHHHGGSGMLPLFEPKGRVLLVDGHHLAYRNFFALKGLTTSRGEPVQGVYGFAKSLLKALKEDGDVVIVVFDAKAPSFRHEAYEAYKAGRAPTPEDFPRQLALMKELVDLLGLERLEVPGFEADDVLATLAKKAEREGYEVQILTADRDLFQLLSPRISVLHPEGHRITPEWLWEKYGLRPEQWVDFRALAGDPSDNIPGVKGIGEKTALKLLKEWGSLENLLKNLDQVKPESVREKILAHLEDLKLSRELSRVRTDLPLEVDFRRRREPDWEGLKAFLERLEFGSLLHEFGLLESPLPAEEAPWPPPEGAFLGYRLSRPEPMWAELLALAASAQGRVYRAEDPHGALRGLKEVNGLLAKDLAVVALREGLDLPPTDDPMLLAYLLDPSNTTPEGVARRYGGEWTEDAAERALLAERLHANLLGRLQGEERLLWLYEEVEKPLSRVLAHMEATGVKLDVAYLEALSLEVAAEMRRLEEEVFRLAGHSFNLNSRDQLERVLFDELGLPPIGKTEKTGKRSTSAAVLEALREVHPIVDKILQYRELAKLKGTYIDPLPALVHPKTGRLHTRFNQTATATGRLSSSDPNLQNIPVRTPLGQKIRRAFVAEEGWRLVALDYSQIELRVLAHLSGDENLIRVFQEGKDIHTQTASWMFGLSPEAIDPLMRRAAKTINFGVLYGMSAHRLSQELGIPYEEAAAFIQKYFQSYPKVKAWIEKTLEEGRTRGYVETLFGRRRYVPDLNARVKSVREAAERMAFNMPVQGTAADLMKLAMVRLFPQLREVGARMLLQVHDELLLEAPKERAEEVAALAKEVMEGVWPLAVPLEVEVGIGEDWLAAKG

SEQ ID NO: 1395 - DNA, 2529 bp, synthetic construct
  misc_feature 1..2529: note = Variant of DNA polymerase I from Thermus sp. strain 2.9
  source 1..2529: mol_type = other DNA
atgcaccatcatcatcatcatggcggtagcggcatgttaccgttgttcgaacctaaaggtcgcgtgcttctggttgatggccatcatctcgcgtatcgtaacttctttgccctgaaaggattaaccaccagccgtggcgagccggtacagggtgtctacggctttgcaaagtcgctcctgaaagctctgaaagaagacggtgatgtggtgattgttgtctttgatgcgaaagcgccaagttttcgccacgaagcgtacgaagcttacaaagccgggcgtgctccaacgccggaagactttcctcgccaattggcgcttatgaaggaattagtggatttgcttggcctcgaacgcttggaagttcccggtttcgaggcagacgacgtattagcgactctcgcaaagaaagccgaacgtgagggctatgaagtccagatcttgacagcagatcgcgatcttttccagcttttatctccgcgcatctcggtgttacacccggaagggcatcgtatcaccccggaatggctctgggagaaatatggtttgcgtcccgaacaatgggtggattttcgcgccttagcaggcgatccgagcgacaatattccgggagttaaaggtatcggcgagaagacggcgctccggctccttaaagaatgggggtcgttggagaacttgcttaagaatttagatcaggtcaaaccagagtcagtgcgtgagaagattcttgcacacctcgaagacctcaaattaagccgcgaattgtcccgtgtacgcaccgatttgccgctcgaagttgatttccgtggccgccgcgaacctgactgggagggtcttaaagcgtttttagagcgtcttgaatttggttcgctcttgcatgaattcggccttttagaaagcccgttaccagccgaagaagcaccttggccaccgcccgaaggcgcgtttttaggttaccgtttgagtcgcccggaaccgatgtgggccgaattattggctcttgcagcgtctgcccagggacgtgtgtatcgcgcggaagaccctcatggtgcgctccgcggcctcaaagaagtccgtggactccttgccaaagacttagctgttgttgcattgcgcgaaggtcttgatttacctccgactgatgatccaatgcttcttgcgtacctcttggacccgtcaaacacgacgcccgaaggcgtagcccgtcgttacggcggcgagtggaccgaagatgcaggcgagcgcgcgttattggccgaacgtttgcacgccaatttattaggacgtttgcaaggcgaggaacgtctcctctggctttacgaagaagtggagaaaccattgagtcgcgtgctcgcgcatatggaagctaccggtgtcaaattagacgtggcgtatttggaggcactcagccttgaagttgctgccgaaatgcgccgcttggaggaagaagtattccgtttagcaggccactcctttaaccttaattctcgcgatcagttagaacgtgtgttgttcgatgaacttggtctccctcctatcggcaagacagagaagaccggtaaacgtagcacttcagcggcggttttagaagctcttcgcgaagtccatcccattgtggacaagatcttgcagtaccgcgaactcgcgaaattgaaaggcacctatattgaccctcttccggcattagtccacccgaaaacgggacgcctccatacccgcttcaaccaaacagccacggcgaccggtcgtttgtcctcctctgatccaaaccttcagaatattccagtacgtaccccattgggccagaagatccgccgcgcgtttgtagctgaggagggttggcgtttagtggccctcgattatagccaaattgaattacgtgtccttgcccatctttctggcgatgagaacctcatccgcgtgtttcaggaaggcaaagacattcacactcaaacggcaagctggatgtttggattatcagctgaagcgatcgatcctttgatgcgtcgtgcagcgaagaccatcaatttcggtgttctctacggtatgagtgcccatcgtttgtcgcaggaattaggcattccctatgaagaagctgcggcgttcattcagcgctactttcaaagctatcccaaagttaaagcatggatcgagaagactctcgaagaaggccgcacacgtggttacgtagagaccttatttggacgtcgccgctatgttcccgatttaaacgctcgcgtgaaatctgtccgtgaagccgccgaacgcatggcgttcaacatgcctgtacagggcacggcagctgacctcatgaaacttgcaatggtgcgcctttttccacaattgcgtgaagttggtgcccgcatgctcttgcaggtccacgatgaactcttgttagaagcgccaaaagagcgtgcggaagaggtggcagccctcgcgaaagaggttatggaaggcgtgtggcccttagcggtgcctcttgaagtcgaagttggtattggcgaggattggttggctgccaaaggataatga

SEQ ID NO: 1396 - protein, 841 aa, synthetic construct
  REGION 1..841: note = Variant of DNA polymerase I from Thermus sp. strain 2.9
MHHHHHHGGSGMLPLFEPKGRVLLVDGHHLAYRNFFALKGLTTSRGEPVQGVYGFAKSLLKALKEDGDVVIVVFDAKAPSFRHEAYEAYKAGRAPTPEDFPRQLALMKELVDLLGLERLEVPGFEADDVLATLAKKAEREGYEVQILTADRDLFQLLSPRISVLHPEGHRITPEWLWEKYGLRPEQWVDFRALAGDPSDNIPGVKGIGEKTALRLLKEWGSLENLLKNLDQVKPESVREKILAHLEDLKLSRELSRVRTDLPLEVDFRGRREPDWEGLKAFLERLEFGSLLHEFGLLESPLPAEEAPWPPPEGAFLGYRLSRPEPMWAELLALAASAQGRVYRAEDPHGALRGLKEVRGLLAKDLAVVALREGLDLPPTDDPMLLAYLLDPSNTTPEGVARRYGGEWTEDAGERALLAERLHANLLGRLQGEERLLWLYEEVEKPLSRVLAHMEATGVKLDVAYLEALSLEVAAEMRRLEEEVFRLAGHSFNLNSRDQLERVLFDELGLPPIGKTEKTGKRSTSAAVLEALREVHPIVDKILQYRELAKLKGTYIDPLPALVHPKTGRLHTRFNQTATATGRLSSSDPNLQNIPVRTPLGQKIRRAFVAEEGWRLVALDYSQIELRVLAHLSGDENLIRVFQEGKDIHTQTASWMFGLSAEAIDPLMRRAAKTINFGVLYGMSAHRLSQELGIPYEEAAAFIQRYFQSYPKVKAWIEKTLEEGRTRGYVETLFGRRRYVPDLNARVKSVREAAERMAFNMPVQGTAADLMKLAMVRLFPQLREVGARMLLQVHDELLLEAPKERAEEVAALAKEVMEGVWPLAVPLEVEVGIGEDWLAAKG

SEQ ID NO: 1397 - DNA, 2529 bp, synthetic construct
  misc_feature 1..2529: note = Variant of DNA polymerase I from Thermus sp. strain 2.9
  source 1..2529: mol_type = other DNA
atgcaccatcatcatcatcatggcggtagcggcatgttaccgttgttcgaacctaaaggtcgcgtgcttctggttgatggccatcatctcgcgtatcgtaacttctttgccctgaaaggattaaccaccagccgtggcgagccggtacagggtgtctacggctttgcaaagtcgctcctgaaagctctgaaagaagacggtgatgtggtgattgttgtctttgatgcgaaagcgccaagttttcgccacgaagcgtacgaagcttacaaagccgggcgtgctccaacgccggaagactttcctcgccaattggcgcttatgaaggaattagtggatttgcttggcctcgaacgcttggaagttcccggtttcgaggcagacgacgtattagcgactctcgcaaagaaagccgaacgtgagggctatgaagtccagatcttgacagcagatcgcgatcttttccagcttttatctccgcgcatctcggtgttacacccggaagggcatcgtatcaccccggaatggctctgggagaaatatggtttgcgtcccgaacaatgggtggattttcgcgccttagcaggcgatccgagcgacaatattccgggagttaaaggtatcggcgagaagacggcgctcaagctccttaaagaatgggggtcgttggagaacttgcttaagaatttagatcaggtcaaaccagagtcagtgcgtgagaagattcttgcacacctcgaagacctcaaattaagccgcgaattgtcccgtgtacgcaccgatttgccgctcgaagttgatttccgtggtcgccgcgaacctgactgggagggtcttaaagcgtttttagagcgtcttgaatttggttcgctcttgcatgaattcggccttttagaaagcccgttaccagccgaagaagcaccttggccaccgcccgaaggcgcgtttttaggttaccgtttgagtcgcccggaaccgatgtgggccgaattactggctcttgcagcgtctgcccaggggcgtgtgtatcgcgcggaagaccctcatggtgcgctccgtggcctcaaagaagtccgtggactccttgccaaagacttagctgttgttgcattgcgcgaaggtcttgatttacctccgactgatgatccaatgcttcttgcgtacctcttggacccgtcaaacacgacgcccgaaggcgtagcccgtcgttacggcggcgagtggaccgaagatgcaggcgagcgcgcgttattggccgaacgtttgcacgccaatttattaggacgtttgcaaggcgaggaacgtctcctctggctttacgaagaagtggagaaaccattgagtcgcgtgctcgcgcatatggaagctaccggtgtcaaattagacgtggcgtatttggaggcactcagccttgaagttgctgccgaaatgcgccgcttggaggaagaagtattccgtttagcaggccactcctttaaccttaattctcgcgatcagttagaacgtgtgttgttcgataaccttggtctccctcctatcggcaagacagagaagaccggtaaacgtagcacttcagcggcggttttagaagctcttcgcgaagtccatcccattgtggacaagatcttgcagtaccgcgaactcgcgaaattgaaaggcacctatattgaccctcttccggcattagtccacccgaaaacgggacgcctccatacccgcttcaaccaaacagccacggcgaccggtcgtttgtcctcctctgatccaaaccttcagaatattccagtacgtaccccattgggccagaagatccgccgcgcgtttgtagctgaggagggttggcgtttagtggccctcgattatagccaaattgaattacgtgtccttgcccatctttctggcgatgagaacctcatccgcgtgtttcaggaaggcaaagacattcacactcaaacggcaagctggatgtttggattatcagcagaagcgatcgatcctttgatgcgtcgtgcagcgaagaccgttaatttcggtgttctctacggtatgagtgcccatcgtttgtcgcaggaattaggcattccctatgaagaagctgtcgcgttcattcagaagtactttcaaagctatcccaaagttaaagcatggatcgagaagactctcgaagaaggccgcacacgtggttacgtagagaccttatttggacgtcgccgctatgttcccgatttaaacgctcgcgtgaaatctgtccgtgaagccgccgaacgcatggcgttcaacatgcctgtacagggcacggcagctgacctcatgaaacttgcaatggtgcgcctttttccacaattgcgtgaagttggtgcccgcatgctcttgcaggtccacgatgaactcttgttagaagcgccaaaagagcgtgcggaagaggtggcagccctcgcgaaagaggttatggaaggcgtgtggcccttagcggtgcctcttgaagtcgaagttggtattggcgaggattggttggctgccaaaggataatga

SEQ ID NO: 1398 - protein, 841 aa, synthetic construct
  REGION 1..841: note = Variant of DNA polymerase I from Thermus sp. strain 2.9
MHHHHHHGGSGMLPLFEPKGRVLLVDGHHLAYRNFFALKGLTTSRGEPVQGVYGFAKSLLKALKEDGDVVIVVFDAKAPSFRHEAYEAYKAGRAPTPEDFPRQLALMKELVDLLGLERLEVPGFEADDVLATLAKKAEREGYEVQILTADRDLFQLLSPRISVLHPEGHRITPEWLWEKYGLRPEQWVDFRALAGDPSDNIPGVKGIGEKTALKLLKEWGSLENLLKNLDQVKPESVREKILAHLEDLKLSRELSRVRTDLPLEVDFRGRREPDWEGLKAFLERLEFGSLLHEFGLLESPLPAEEAPWPPPEGAFLGYRLSRPEPMWAELLALAASAQGRVYRAEDPHGALRGLKEVRGLLAKDLAVVALREGLDLPPTDDPMLLAYLLDPSNTTPEGVARRYGGEWTEDAGERALLAERLHANLLGRLQGEERLLWLYEEVEKPLSRVLAHMEATGVKLDVAYLEALSLEVAAEMRRLEEEVFRLAGHSFNLNSRDQLERVLFDNLGLPPIGKTEKTGKRSTSAAVLEALREVHPIVDKILQYRELAKLKGTYIDPLPALVHPKTGRLHTRFNQTATATGRLSSSDPNLQNIPVRTPLGQKIRRAFVAEEGWRLVALDYSQIELRVLAHLSGDENLIRVFQEGKDIHTQTASWMFGLSAEAIDPLMRRAAKTVNFGVLYGMSAHRLSQELGIPYEEAVAFIQKYFQSYPKVKAWIEKTLEEGRTRGYVETLFGRRRYVPDLNARVKSVREAAERMAFNMPVQGTAADLMKLAMVRLFPQLREVGARMLLQVHDELLLEAPKERAEEVAALAKEVMEGVWPLAVPLEVEVGIGEDWLAAKG

SEQ ID NO: 1399 - DNA, 2529 bp, synthetic construct
  misc_feature 1..2529: note = Variant of DNA polymerase I from Thermus sp. strain 2.9
  source 1..2529: mol_type = other DNA
atgcaccatcatcatcatcatggcggtagcggcatgttaccgttgttcgaacctaaaggtcgcgtgcttctggttgatggccatcatctcgcgtatcgtaacttctttgccctgaaaggattaaccaccagccgtggcgagccggtacagggtgtctacggctttgcaaagtcgctcctgaaagctctgaaagaagacggtgatgtggtgattgttgtctttgatgcgaaagcgccaagttttcgccacgaagcgtacgaagcttacaaagccgggcgtgctccaacgccggaagactttcctcgccaattggcgcttatgaaggaattagtggatttgcttggcctcgaacgcttggaagttcccggtttcgaggcagacgacgtattagcgactctcgcaaagaaagccgaacgtgagggctatgaagtccagatcttgacagcagatcgcgatcttttccagcttttatctccgcgcatctcggtgttacacccggaagggcatcgtatcaccccggaatggctctgggagaaatatggtttgcgtcccgaacaatgggtggattttcgcgccttagcaggcgatccgagcgacaatattccgggagttaaaggtatcggcgagaagacggcgctcaagctccttaaagaatgggggtcgttggagaacttgcttaagaatttagatcaggtcaaaccagagtcagtgcgtgagaagattcttgcacacctcgaagacctcaaattaagccgcgaattgtcccgtgtacgcaccgatttgccgctcgaagttgatttccgtggccgccgcgaacctgactgggagggtcttaaagcgtttttagagcgtcttgaatttggttcgctcttgcatgaattcggccttttagaaagcccgttaccagccgaagaagcaccttggccaccgcccgaaggcgcgtttttaggttaccgtttgagtcgcccggaaccgatgtgggccgaattattggctcttgcagcgtctgcccagggacgtgtgtatcgcgcggaagaccctcatggtgcgctccgcggcctcaaagaagtccgtggactccttgccaaagacttagctgttgttgcattgcgcgaaggtcttgatttacctccgactgatgatccaatgcttcttgcgtacctcttggacccgtcaaacacgacgcccgaaggcgtagcccgtcgttacggcggcgagtggaccgaagatgcaggcgagcgcgcgttattggccgaacgtttgcacgccaatttattaggacgtttgcaaggcgaggaacgtctcctctggctttacgaagaagtggagaaaccattgagtcgcgtgctcgcgcatatggaagctaccggtgtcaaattagacgtggcgtatttggaggcactcagccttgaagttgctgccgaaatgcgccgcttggaggaagaagtattccgtttagcaggccactcctttaaccttaattctcgcgatcagttagaactggtgttgttcgatgaacttggtctccctcctatcggcaagacagagaagaccggtaaacgtagcacttcagcggcggttttagaagctcttcgcgaagtccatcccattgtggacaagatcttgcagtaccgcgaactcgcgaaattgaaaggcacctatattgaccctcttccggcattagtccacccgaaaacgggacgcctccatacccgcttcaaccaaacagccacggcgaccggtcgtttgtcctcctctgatccaaaccttcagaatattccagtacgtaccccattgggccagaagatccgccgcgcgtttgtagctgaggagggttggcgtttagtggccctcgattatagccaaattgaattacgtgtccttgcccatctttctggcgatgagaacctcatccgcgtgtttcaggaaggcaaagacattcacactcaaacggcaagctggatgtttggattatcagctgaagcgatcgatcctttgatgcgtcgtgcagcgaagaccatcaatttcggtgttctctacggtatgagtgcccatcgtttgtcgcaggaattaggcattccctatgaagaagctgcggcgttcattcagcgctactttcaaagctatcccaaagttaaagcatggatcgagaagactctcgaagaaggccgcacacgtggttacgtagagaccttatttggacgtcgccgctatgttcccgatttaaacgctcgcgtgaaatctgtccgtgaagccgccgaacgcatggcgttcaacatgcctgtacagggcacggcagctgacctcatgaaacttgcaatggtgcgcctttttccacaattgcgtgaagttggtgcccgcatgctcttgcaggtccacgatgaactcttgttagaagcgccaaaagagcgtgcggaagaggtggcagccctcgcgaaagaggttatggaaggcgtgtggcccttagcggtgcctcttgaagtcgaagttggtattggcgaggattggttggctgccaaaggataatga

SEQ ID NO: 1400 - protein, 841 aa, synthetic construct
  REGION 1..841: note = Variant of DNA polymerase I from Thermus sp. strain 2.9
MHHHHHHGGSGMLPLFEPKGRVLLVDGHHLAYRNFFALKGLTTSRGEPVQGVYGFAKSLLKALKEDGDVVIVVFDAKAPSFRHEAYEAYKAGRAPTPEDFPRQLALMKELVDLLGLERLEVPGFEADDVLATLAKKAEREGYEVQILTADRDLFQLLSPRISVLHPEGHRITPEWLWEKYGLRPEQWVDFRALAGDPSDNIPGVKGIGEKTALKLLKEWGSLENLLKNLDQVKPESVREKILAHLEDLKLSRELSRVRTDLPLEVDFRGRREPDWEGLKAFLERLEFGSLLHEFGLLESPLPAEEAPWPPPEGAFLGYRLSRPEPMWAELLALAASAQGRVYRAEDPHGALRGLKEVRGLLAKDLAVVALREGLDLPPTDDPMLLAYLLDPSNTTPEGVARRYGGEWTEDAGERALLAERLHANLLGRLQGEERLLWLYEEVEKPLSRVLAHMEATGVKLDVAYLEALSLEVAAEMRRLEEEVFRLAGHSFNLNSRDQLELVLFDELGLPPIGKTEKTGKRSTSAAVLEALREVHPIVDKILQYRELAKLKGTYIDPLPALVHPKTGRLHTRFNQTATATGRLSSSDPNLQNIPVRTPLGQKIRRAFVAEEGWRLVALDYSQIELRVLAHLSGDENLIRVFQEGKDIHTQTASWMFGLSAEAIDPLMRRAAKTINFGVLYGMSAHRLSQELGIPYEEAAAFIQRYFQSYPKVKAWIEKTLEEGRTRGYVETLFGRRRYVPDLNARVKSVREAAERMAFNMPVQGTAADLMKLAMVRLFPQLREVGARMLLQVHDELLLEAPKERAEEVAALAKEVMEGVWPLAVPLEVEVGIGEDWLAAKG

SEQ ID NO: 1401 - DNA, 2529 bp, synthetic construct
  misc_feature 1..2529: note = Variant of DNA polymerase I from Thermus sp. strain 2.9
  source 1..2529: mol_type = other DNA
atgcaccatcatcatcatcatggcggtagcggcatgttaccgttgttcgaacctaaaggtcgcgtgcttctggttgatggccatcatctcgcgtatcgtaacttctttgccctgaaaggattaaccaccagccgtggcgagccggtacagggtgtctacggctttgcaaagtcgctcctgaaagctctgaaagaagacggtgatgtggtgattgttgtctttgatgcgaaagcgccaagttttcgccacgaagcgtacgaagcttacaaagccgggcgtgctccaacgccggaagactttcctcgccaattggcgcttatgaaggaattagtggatttgcttggcctcgaacgcttggaagttcccggtttcgaggcagacgacgtattagcgactctcgcaaagaaagccgaacgtgagggctatgaagtccagatcttgacagcagatcgcgatcttttccagcttttatctccgcgcatctcggtgttacacccggaagggcatcgtatcaccccggaatggctctgggagaaatatggtttgcgtcccgaacaatgggtggattttcgcgccttagcaggcgatccgagcgacaatattccgggagttaaaggtatcggcgagaagacggcgctcaagctccttaaagaatgggggtcgttggagaacttgcttaagaatttagatcaggtcaaaccagagtcagtgcgtgagaagattcttgcacacctcgaagacctcaaattaagccgcgaattgtcccgtgtacgcaccgatttgccgctcgaagttgatttccgtggccgccgcgaacctgactgggagggtcttaaagcgtttttagagcgtcttgaatttggttcgctcttgcatgaattcggccttttagaaagcccgttaccagccgaagaagcaccttggccaccgcccgaaggcgcgtttttaggttaccgtttgagtcgcccggaaccgatgtgggccgaattattggctcttgcagcgtctgcccagggacgtgtgtatcgcgcggaagaccctcatggtgcgctccgcggcctcaaagaagtccgtggactccttgccaaagacttagctgttgttgcattgcgcgaaggtcttgatttacctccgactgatgatccaatgcttcttgcgtacctcttggacccgtcaaacacgacgcccgaaggcgtagcccgtcgttacggcggcgagtggaccgaagatgcagctaagcgcgcgttattggccgaacgtttgcacgccaatttattaggacgtttgcaaggcgaggaacgtctcctctggctttacgaagaagtggagaaaccattgagtcgcgtgctcgcgcatatggaagctaccggtgtcaaattagacgtggcgtatttggagaacctcagccttgaagttgctgccgaaatgcgccgcttggaggaagaagtattccgtttagcaggccactcctttaaccttaattctcgcgatcagttagaacgtgtgttgttcgatgaacttggtctccctcctatcggcaagacagagaagaccggtaaacgtagcacttcagcggcggttttagaagctcttcgcgaagtccatcccattgtggacaagatcttgcagtaccgcgaactcgcgaaattgaaaggcacctatattgaccctcttccggcattagtccacccgaaaacgggacgcctccatacccgcttcaaccaaacagccacggcgaccggtcgtttgtcctcctctgatccaaaccttcagaatattccagtacgtaccccattgggccagaagatccgccgcgcgtttgtagctgaggagggttggcgtttagtggccctcgattatagccaaattgaattacgtgtccttgcccatctttctggcgatgagaacctcatccgcgtgtttcaggaaggcaaagacattcacactcaaacggcaagctggatgtttggattatcaccagaagcgatcgatcctttgatgcgtcgtgcagcgaagaccattaatttcggtgttctctacggtatgagtgcccatcgtttgtcgcaggaattaggcattccctatgaagaagctgcggcgttcattcagcgctactttcaaagctatcccaaagttaaagcatggatcgagaagactctcgaagaaggccgcacacgtggttacgtagagaccttatttggacgtcgccgctatgttcccgatttaaacgctcgcgtgaaatctgtccgtgaagccgccgaacgcatggcgttcaacatgcctgtacagggcacggcagctgacctcatgaaacttgcaatggtgcgcctttttccacaattgcgtgaagttggtgcccgcatgctcttgcaggtccacgatgaactcttgttagaagcgccaaaagagcgtgcggaagaggtggcagccctcgcgaaagaggttatggaaggcgtgtggcccttagcggtgcctcttgaagtcgaagttggtattggcgaggattggttggctgccaaaggataatga

SEQ ID NO: 1402 - protein, 841 aa, synthetic construct
  REGION 1..841: note = Variant of DNA polymerase I from Thermus sp. strain 2.9
MHHHHHHGGSGMLPLFEPKGRVLLVDGHHLAYRNFFALKGLTTSRGEPVQGVYGFAKSLLKALKEDGDVVIVVFDAKAPSFRHEAYEAYKAGRAPTPEDFPRQLALMKELVDLLGLERLEVPGFEADDVLATLAKKAEREGYEVQILTADRDLFQLLSPRISVLHPEGHRITPEWLWEKYGLRPEQWVDFRALAGDPSDNIPGVKGIGEKTALKLLKEWGSLENLLKNLDQVKPESVREKILAHLEDLKLSRELSRVRTDLPLEVDFRGRREPDWEGLKAFLERLEFGSLLHEFGLLESPLPAEEAPWPPPEGAFLGYRLSRPEPMWAELLALAASAQGRVYRAEDPHGALRGLKEVRGLLAKDLAVVALREGLDLPPTDDPMLLAYLLDPSNTTPEGVARRYGGEWTEDAAKRALLAERLHANLLGRLQGEERLLWLYEEVEKPLSRVLAHMEATGVKLDVAYLENLSLEVAAEMRRLEEEVFRLAGHSFNLNSRDQLERVLFDELGLPPIGKTEKTGKRSTSAAVLEALREVHPIVDKILQYRELAKLKGTYIDPLPALVHPKTGRLHTRFNQTATATGRLSSSDPNLQNIPVRTPLGQKIRRAFVAEEGWRLVALDYSQIELRVLAHLSGDENLIRVFQEGKDIHTQTASWMFGLSPEAIDPLMRRAAKTINFGVLYGMSAHRLSQELGIPYEEAAAFIQRYFQSYPKVKAWIEKTLEEGRTRGYVETLFGRRRYVPDLNARVKSVREAAERMAFNMPVQGTAADLMKLAMVRLFPQLREVGARMLLQVHDELLLEAPKERAEEVAALAKEVMEGVWPLAVPLEVEVGIGEDWLAAKG

SEQ ID NO: 1403 - DNA, 2529 bp, synthetic construct
  misc_feature 1..2529: note = Variant of DNA polymerase I from Thermus sp. strain 2.9
  source 1..2529: mol_type = other DNA
atgcaccatcatcatcatcatggcggtagcggcatgttaccgttgttcgaacctaaaggtcgcgtgcttctggttgatggccatcatctcgcgtatcgtaacttctttgccctgaaaggattaaccaccagccgtggcgagccggtacagggtgtctacggctttgcaaagtcgctcctgaaagctctgaaagaagacggtgatgtggtgattgttgtctttgatgcgaaagcgccaagttttcgccacgaagcgtacgaagcttacaaagccgggcgtgctccaacgccggaagactttcctcgccaattggcgcttatgaaggaattagtggatttgcttggcctcgaacgcttggaagttcccggtttcgaggcagacgacgtattagcgactctcgcaaagaaagccgaacgtgagggctatgaagtccagatcttgacagcagatcgcgatcttttccagcttttatctccgcgcatctcggtgttacacccggaagggcatcgtatcaccccggaatggctctgggagaaatatggtttgcgtcccgaacaatgggtggattttcgcgccttagcaggcgatccgagcgacaatattccgggagttaaaggtatcggcgagaagacggcgctcaagctccttaaagaatgggggtcgttggagaacttgcttaagaatttagatcaggtcaaaccagagtcagtgcgtgagaagattcttgcacacctcgaagacctcaaattaagcctggaattgtcccgtgtacgcaccgatttgccgctcgaagttgatttccgtggccgccgcgaacctgactgggagggtcttaaagcgtttttagagcgtcttgaatttggttcgctcttgcatgaattcggccttttagaaagcccgttaccagccgaagaagcaccttggccaccgcccgaaggcgcgtttttaggttaccgtttgagtcgcccggaaccgatgtgggccgaattactggctcttgcagcgtctgcccaggagcgtgtgtatcgcgcggaagaccctcatggtgcgctccgtggcctcaaagaagtccgtggactccttgccaaagacttagctgttgttgcattgcgcgaaggtcttgatttacctccgactgatgatccaatgcttcttgcgtacctcttggacccgtcaaacacgacgcccgaaggcgtagcccgtcgttacggcggcgagtggaccgaagatgcagctaagcgcgcgttattggccgaacgtttgcacgccaatttattaggacgtttgcaaggcgaggaacgtctcctctggctttacgaagaagtggagaaaccattgagtcgcgtgctcgcgcatatggaagctaccggtgtcaaattagacgtggcgtatttggaggctctcagccttgaagttgctgccgaaatgcgccgcttggaggaagaagtattccgtttagcaggccactcctttaaccttaattctcgcgatcagttagaacgtgtgttgttcgatgaacttggtctccctcctatcggcaagacagagaagaccggtaaacgtagcacttcagcggcggttttagaagctcttcgcgaagtccatcccattgtggacaagatcttgcagtaccgcgaactcgcgaaattgaaaggcacctatattgaccctcttccggcattagtccacccgaaaacgggacgcctccatacccgcttcaaccaaacagccacggcgaccggtcgtttgtcctcctctgatccaaaccttcagaatattccagtacgtaccccattgggccagaagatccgccgcgcgtttgtagctgaggagggttggcgtttagtggccctcgattatagccaaattgaattacgtgtccttgcccatctttctggcgatgagaacctcatccgcgtgtttcaggaaggcaaagacattcacactcaaacggcaagctggatgtttggattatcagcagaagcgatcgatcctttgatgcgtcgtgcagcgaagaccgttaatttcggtgttctctacggtatgagtgcccatcgtttgtcgcaggaattaggcattccctatgaagaagctgtcgcgttcattcagaagtactttcaaagctatcccaaagttaaagcatggatcgagaagactctcgaagaaggccgcacacgtggttacgtagagaccttatttggacgtcgccgctatgttcccgatttaaacgctcgcgtgaaatctgtccgtgaagccgccgaacgcatggcgttcaacatgcctgtacagggcacggcagctgacctcatgaaacttgcaatggtgcgcctttttccacaattgcgtgaagttggtgcccgcatgctcttgcaggtccacgatgaactcttgttagaagcgccaaaagagcgtgcggaagaggtggcagccctcgcgaaagaggttatggaaggcgtgtggcccttagcggtgcctcttgaagtcgaagttggtattggcgaggattggttggctgccaaaggataatga

SEQ ID NO: 1404 - protein, 841 aa, synthetic construct
  REGION 1..841: note = Variant of DNA polymerase I from Thermus sp. strain 2.9
MHHHHHHGGSGMLPLFEPKGRVLLVDGHHLAYRNFFALKGLTTSRGEPVQGVYGFAKSLLKALKEDGDVVIVVFDAKAPSFRHEAYEAYKAGRAPTPEDFPRQLALMKELVDLLGLERLEVPGFEADDVLATLAKKAEREGYEVQILTADRDLFQLLSPRISVLHPEGHRITPEWLWEKYGLRPEQWVDFRALAGDPSDNIPGVKGIGEKTALKLLKEWGSLENLLKNLDQVKPESVREKILAHLEDLKLSLELSRVRTDLPLEVDFRGRREPDWEGLKAFLERLEFGSLLHEFGLLESPLPAEEAPWPPPEGAFLGYRLSRPEPMWAELLALAASAQERVYRAEDPHGALRGLKEVRGLLAKDLAVVALREGLDLPPTDDPMLLAYLLDPSNTTPEGVARRYGGEWTEDAAKRALLAERLHANLLGRLQGEERLLWLYEEVEKPLSRVLAHMEATGVKLDVAYLEALSLEVAAEMRRLEEEVFRLAGHSFNLNSRDQLERVLFDELGLPPIGKTEKTGKRSTSAAVLEALREVHPIVDKILQYRELAKLKGTYIDPLPALVHPKTGRLHTRFNQTATATGRLSSSDPNLQNIPVRTPLGQKIRRAFVAEEGWRLVALDYSQIELRVLAHLSGDENLIRVFQEGKDIHTQTASWMFGLSAEAIDPLMRRAAKTVNFGVLYGMSAHRLSQELGIPYEEAVAFIQKYFQSYPKVKAWIEKTLEEGRTRGYVETLFGRRRYVPDLNARVKSVREAAERMAFNMPVQGTAADLMKLAMVRLFPQLREVGARMLLQVHDELLLEAPKERAEEVAALAKEVMEGVWPLAVPLEVEVGIGEDWLAAKG

SEQ ID NO: 1405 - DNA, 2529 bp, synthetic construct
  misc_feature 1..2529: note = Variant of DNA polymerase I from Thermus sp. strain 2.9
  source 1..2529: mol_type = other DNA
atgcaccatcatcatcatcatggcggtagcggcatgttaccgttgttcgaacctaaaggtcgcgtgcttctggttgatggccatcatctcgcgtatcgtaacttctttgccctgaaaggattaaccaccagccgtggcgagccggtacagggtgtctacggctttgcaaagtcgctcctgaaagctctgaaagaagacggtgatgtggtgattgttgtctttgatgcgaaagcgccaagttttcgccacgaagcgtacgaagcttacaaagccgggcgtgctccaacgccggaagactttcctcgccaattggcgcttatgaaggaattagtggatttgcttggcctcgaacgcttggaagttcccggtttcgaggcagacgacgtattagcgactctcgcaaagaaagccgaacgtgagggctatgaagtccagatcttgacagcagatcgcgatcttttccagcttttatctccgcgcatctcggtgttacacccggaagggcatcgtatcaccccggaatggctctgggagaaatatggtttgcgtcccgaacaatgggtggattttcgcgccttagcaggcgatccgagcgacaatattccgggagttaaaggtatcggcgagaagacggcgctcaagctccttaaagaatgggggtcgttggagaacttgcttaagaatttagatcaggtcaaaccagagtcagtgcgtgagaagattcttgcacacctcgaagacctcaaattaagcctggaattgtcccgtgtacgcaccgatttgccgctcgaagttgatttccgtggtcgccgcgaacctgactgggagggtcttaaagcgtttttagagcgtcttgaatttggttcgctcttgcatgaattcggccttttagaaagcccgttaccagccgaagaagcaccttggccaccgcccgaaggcgcgtttttaggttaccgtttgagtcgcccggaaccgatgtgggccgaattatcggctcttgcagcgtctgcccaggggcgtgtgtatcgcgcggaagaccctcatggtgcgctccgtggcctcaaagaagtccgtggactccttgccaaagacttagctgttgttgcattgcgcgaaggtcttgatttacctccgactgatgatccaatgcttcttgcgtacctcttggacccgtcaaacacgacgcccgaaggcgtagcccgtcgttacggcggcgagtggaccgaagatgcagctaagcgcgcgttattggccgaacgtttgcacgccaatttattaggacgtttgcaaggcgaggaacgtctcctctggctttacgaagaagtggagaaaccattgagtcgcgtgctcgcgcatatggaagctaccggtgtcaaattagacgtggcgtatttggaggcactcagccttgaagttgctgccgaaatgcgccgcttggaggaagaagtattccgtttagcaggccactcctttaaccttaattctcgcgatcagttagaacgtgtgttgttcgatgaacttggtctccctcctatcggcaagacagagaagaccggtaaacgtagcacttcagcggcggttttagaagctcttcgcgaagtccatcccattgtggacaagatcttgcagtaccgcgaactcgcgaaattgaaaggcacctatattgaccctcttccggcattagtccacccgaaaacgggacgcctccatacccgcttcaaccaaacagccacggcgaccggtcgtttgtcctcctctgatccaaaccttcagaatattccagtacgtaccccattgggccagaagatccgccgcgcgtttgtagctgaggagggttggcgtttagtggccctcgattatagccaaattgaattacgtgtccttgcccatctttctggcgatgagaacctcatccgcgtgtttcaggaaggcaaagacattcacactcaaacggcaagctggatgtttggattatcagcagaagcgatcgatcctttgatgcgtcgtgcagcgaagaccattaatttcggtgttctctacggtatgagtgcccatcgtttgtcgcaggaattaggcattccctatgaagaagctgcggcgttcattcagcgctactttcaaagctatcccaaagttaaagcatggatcgagaagactctcgaagaaggccgcacacgtggttacgtagagaccttatttggacgtcgccgctatgttcccgatttaaacgctcgcgtgaaatctgtccgtgaagccgccgaacgcatggcgttcaacatgcctgtacagggcacggcagctgacctcatgaaacttgcaatggtgcgcctttttccacaattgcgtgaagttggtgcccgcatgctcttgcaggtccacgatgaactcttgttagaagcgccaaaagagcgtgcggaagaggtggcagccctcgcgaaagaggttatggaaggcgtgtggcccttagcggtgcctcttgaagtcgaagttggtattggcgaggattggttggctgccaaaggataatga

SEQ ID NO: 1406 - protein, 841 aa, synthetic construct
  REGION 1..841: note = Variant of DNA polymerase I from Thermus sp. strain 2.9
MHHHHHHGGSGMLPLFEPKGRVLLVDGHHLAYRNFFALKGLTTSRGEPVQGVYGFAKSLLKALKEDGDVVIVVFDAKAPSFRHEAYEAYKAGRAPTPEDFPRQLALMKELVDLLGLERLEVPGFEADDVLATLAKKAEREGYEVQILTADRDLFQLLSPRISVLHPEGHRITPEWLWEKYGLRPEQWVDFRALAGDPSDNIPGVKGIGEKTALKLLKEWGSLENLLKNLDQVKPESVREKILAHLEDLKLSLELSRVRTDLPLEVDFRGRREPDWEGLKAFLERLEFGSLLHEFGLLESPLPAEEAPWPPPEGAFLGYRLSRPEPMWAELSALAASAQGRVYRAEDPHGALRGLKEVRGLLAKDLAVVALREGLDLPPTDDPMLLAYLLDPSNTTPEGVARRYGGEWTEDAAKRALLAERLHANLLGRLQGEERLLWLYEEVEKPLSRVLAHMEATGVKLDVAYLEALSLEVAAEMRRLEEEVFRLAGHSFNLNSRDQLERVLFDELGLPPIGKTEKTGKRSTSAAVLEALREVHPIVDKILQYRELAKLKGTYIDPLPALVHPKTGRLHTRFNQTATATGRLSSSDPNLQNIPVRTPLGQKIRRAFVAEEGWRLVALDYSQIELRVLAHLSGDENLIRVFQEGKDIHTQTASWMFGLSAEAIDPLMRRAAKTINFGVLYGMSAHRLSQELGIPYEEAAAFIQRYFQSYPKVKAWIEKTLEEGRTRGYVETLFGRRRYVPDLNARVKSVREAAERMAFNMPVQGTAADLMKLAMVRLFPQLREVGARMLLQVHDELLLEAPKERAEEVAALAKEVMEGVWPLAVPLEVEVGIGEDWLAAKG

SEQ ID NO: 1407 - DNA, 2529 bp, synthetic construct
  misc_feature 1..2529: note = Variant of DNA polymerase I from Thermus sp. strain 2.9
  source 1..2529: mol_type = other DNA
atgcaccatcatcatcatcatggcggtagcggcatgttaccgttgttcgaacctaaaggtcgcgtgcttctggttgatggccatcatctcgcgtatcgtaacttctttgccctgaaaggattaaccaccagccgtggcgagccggtacagggtgtctacggctttgcaaagtcgctcctgaaagctctgaaagaagacggtgatgtggtgattgttgtctttgatgcgaaagcgccaagttttcgccacgaagcgtacgaagcttacaaagccgggcgtgctccaacgccggaagactttcctcgccaattggcgcttatgaaggaattagtggatttgcttggcctcgaacgcttggaagttcccggtttcgaggcagacgacgtattagcgactctcgcaaagaaagccgaacgtgagggctatgaagtccagatcttgacagcagatcgcgatcttttccagcttttatctccgcgcatctcggtgttacacccggaagggcatcgtatcaccccggaatggctctgggagaaatatggtttgcgtcccgaacaatgggtggattttcgcgccttagcaggcgatccgagcgacaatattccgggagttaaaggtatcggcgagaagacggcgctcaagctccttaaagaatgggggtcgttggagaacttgcttaagaatttagatcaggtcaaaccagagtcagtgcgtgagaagattcttgcacacctcgaagacctcaaattaagccgcgaattgtcccgtgtacgcaccgatttgccgctcgaagttgatttccgtggccgccgcgaacctgactgggagggtcttaaagcgtttttagagcgtcttgaatttggttcgctcttgcatgaattcggccttttagaaagcccgttaccagccgaagaagcaccttggccaccgcccgaaggcgcgtttttaggttaccgtttgagtcgcccggaaccgatgtgggccgaattattggctcttgcagcgtctgcccagggacgtgtgtatcgcgcggaagaccctcatggtgcgctccgcggcctcaaagaagtccgtggactccttgccaaagacttagctgttgttgcattgcgcgaaggtcttgatttacctccgactgatgatccaatgcttcttgcgtacctcttggacccgtcaaacacgacgcccgaaggcgtagcccgtcgttacggcggcgagtggaccgaagatgcaggcgagcgcgcgttattggccgaacgtttgcacgccaatttattaggacgtttgcaaggcgaggaacgtctcctctggctttacgaagaagtggagaaaccattgagtcgcgtgctcgcgcatatggaagctaccggtgtcaaattagacgtggcgtatttggaggcactcagccttgaagttgctgccgaaatgcgccgcttggaggaagaagtattcattttagcaggccactcctttaaccttaattctcgcgatcagttagaacgtgtgttgttcgatgaacttggtctccctcctatcggcaagacagagaagaccggtaaacgtagcacttcagcggcggttttagaagctcttcgcgaagtccatcccattgtggacaagatcttgcagtaccgcgaactcgcgaaattgaaaggcacctatattgaccctcttccggcattagtccacccgaaaacgggacgcctccatacccgcttcaaccaaacagccacggcgaccggtcgtttgtcctcctctgatccaaaccttcagaatattccagtacgtaccccattgggccagaagatccgccgcgcgtttgtagctgaggagggttggcgtttagtggccctcgattatagccaaattgaattacgtgtccttgcccatctttctggcgatgagaacctcatccgcgtgtttcaggaaggcaaagacattcacactcaaacggcaagctggatgtttggattatcagctgaagcgatcgatcctttgatgcgtcgtgcagcgaagaccatcaatttcggtgttctctacggtatgagtgcccatcgtttgtcgcaggaattaggcattccctatgaagaagctgcggcgttcattcagcgctactttcaaagctatcccaaagttaaagcatggatcgagaagactctcgaagaaggccgcacacgtggttacgtagagaccttatttggacgtcgccgctatgttcccgatttaaacgctcgcgtgaaatctgtccgtgaagccgccgaacgcatggcgttcaacatgcctgtacagggcacggcagctgacctcatgaaacttgcaatggtgcgcctttttccacaattgcgtgaagttggtgcccgcatgctcttgcaggtccacgatgaactcttgttagaagcgccaaaagagcgtgcggaagaggtggcagccctcgcgaaagaggttatggaaggcgtgtggcccttagcggtgcctcttgaagtcgaagttggtattggcgaggattggttggctgccaaaggataatga

SEQ ID NO: 1408 - protein, 841 aa, synthetic construct
  REGION 1..841: note = Variant of DNA polymerase I from Thermus sp. strain 2.9
MHHHHHHGGSGMLPLFEPKGRVLLVDGHHLAYRNFFALKGLTTSRGEPVQGVYGFAKSLLKALKEDGDVVIVVFDAKAPSFRHEAYEAYKAGRAPTPEDFPRQLALMKELVDLLGLERLEVPGFEADDVLATLAKKAEREGYEVQILTADRDLFQLLSPRISVLHPEGHRITPEWLWEKYGLRPEQWVDFRALAGDPSDNIPGVKGIGEKTALKLLKEWGSLENLLKNLDQVKPESVREKILAHLEDLKLSRELSRVRTDLPLEVDFRGRREPDWEGLKAFLERLEFGSLLHEFGLLESPLPAEEAPWPPPEGAFLGYRLSRPEPMWAELLALAASAQGRVYRAEDPHGALRGLKEVRGLLAKDLAVVALREGLDLPPTDDPMLLAYLLDPSNTTPEGVARRYGGEWTEDAGERALLAERLHANLLGRLQGEERLLWLYEEVEKPLSRVLAHMEATGVKLDVAYLEALSLEVAAEMRRLEEEVFILAGHSFNLNSRDQLERVLFDELGLPPIGKTEKTGKRSTSAAVLEALREVHPIVDKILQYRELAKLKGTYIDPLPALVHPKTGRLHTRFNQTATATGRLSSSDPNLQNIPVRTPLGQKIRRAFVAEEGWRLVALDYSQIELRVLAHLSGDENLIRVFQEGKDIHTQTASWMFGLSAEAIDPLMRRAAKTINFGVLYGMSAHRLSQELGIPYEEAAAFIQRYFQSYPKVKAWIEKTLEEGRTRGYVETLFGRRRYVPDLNARVKSVREAAERMAFNMPVQGTAADLMKLAMVRLFPQLREVGARMLLQVHDELLLEAPKERAEEVAALAKEVMEGVWPLAVPLEVEVGIGEDWLAAKG

SEQ ID NO: 1409 - DNA, 2529 bp, synthetic construct
  misc_feature 1..2529: note = Variant of DNA polymerase I from Thermus sp. strain 2.9
  source 1..2529: mol_type = other DNA
atgcaccatcatcatcatcatggcggtagcggcatgttaccgttgttcgaacctaaaggtcgcgtgcttctggttgatggccatcatctcgcgtatcgtaacttctttgccctgaaaggattaaccaccagccgtggcgagccggtacagggtgtctacggctttgcaaagtcgctcctgaaagctctgaaagaagacggtgatgtggtgattgttgtctttgatgcgaaagcgccaagttttcgccacgaagcgtacgaagcttacaaagccgggcgtgctccaacgccggaagactttcctcgccaattggcgcttatgaaggaattagtggatttgcttggcctcgaacgcttggaagttcccggtttcgaggcagacgacgtattagcgactctcgcaaagaaagccgaacgtgagggctatgaagtccagatcttgacagcagatcgcgatcttttccagcttttatctccgcgcatctcggtgttacacccggaagggcatcgtatcaccccggaatggctctgggagaaatatggtttgcgtcccgaacaatgggtggattttcgcgccttagcaggcgatccgagcgacaatattccgggagttaaaggtatcggcgagaagacggcgctcaagctccttaaagaatgggggtcgttggagaacttgcttaagaatttagatcaggtcaaaccagagtcagtgcgtgagaagattcttgcacacctcgaagacctcaaattaagccgcgaattgtcccgtgtacgcaccgatttgccgctcgaagttgatttccgtggccgccgcgaacctgactgggagggtcttaaagcgtttttagagcgtcttgaatttggttcgctcttgcatgaattcggccttttagaaagcccgttaccagccgaagaagcaccttggccaccgcccgaaggcgcgtttttaggttaccgtttgagtcgcccggaaccgatgtgggccgaattactggctcttgcagcgtctgcccaggggcgtgtgtatcgcgcggaagaccctcatggtgcgctccgcggcctcaaagaagtccgtggactccttgccaaagacttagctgttgttgcattgcgcgaaggtcttgatttacctccgactgatgatccaatgcttcttgcgtacctcttggacccgtcaaacacgacgcccgaaggcgtagcccgtcgttacggcggcgagtggaccgaagatgcaggcgagcgcgcgttattggccgaacgtttgcacgccaatttattaggacgtttgcaaggcgaggaacgtctcctctggctttacgaagaagtggagaaaccattgagtcgcgtgctcgcgcatatggaagctaccggtgtcaaattagacgtggcgtatttggaggcactcagccttgaagttgctgccgaaatgcgccgcttggaggaagaagtattccgtttagcaggccactcctttaaccttaattctcgcgatcagttagaacgtgtgttgttcgatgaacttggtctccctcctatcggcaagacagagaagaccggtaaacgtagcacttcagcggcggttttagaagctcttcgcgaagtccatcccattgtggacaagatcttgcagtaccgcgaactcgcgaaattgaaaggcacctatattgaccctcttccggcattagtccacccgaaaacgggacgcctccatacccgcttcaaccaaacagccacggcgaccggtcgtttgtcctcctctgatccaaaccttcagaatattccagtacgtaccccattgggccagaagatccgccgcgcgtttgtagctgaggagggttggcgtttagtggccctcgattatagccaaattgaattacgtgtccttgcccatctttctggcgatgagaacctcatccgcgtgtttcaggaaggcaaagacattcacactcaaacggcaagctggatgtttggattatcagctgaagcgatcgatcctttgatgcgtcgtgcagcgaagaccgttaatttcggtgttctctacggtatgagtgcccatcgtttgtcgcaggaattaggcattccctatgaagaagctgtcgcgttcattcagcgctactttcaaagctatcccaaagttaaagcatggatcgagaagactctcgaagaaggccgcacacgtggttacgtagagaccttatttggacgtcgccgctatgttcccgatttaaacgctcgcgtgaaatctgtccgtgaagccgccgaacgcatggcgttcaacatgcctgtacagggcacggcagctgacctcatgaaacttgcaatggtgcgcctttttccacaattgcgtgaagttggtgcccgcatgctcttgcaggtccacgatgaactcttgttagaagcgccaaaagagcgtgcggaagaggtggcagccctcgcgaaagaggttatggaaggcgtgtggcccttagcggtgcctcttgaagtcgaagttggtattggcgaggattggttggctgccaaaggataatga

SEQ ID NO: 1410 - protein, 841 aa, synthetic construct
  REGION 1..841: note = Variant of DNA polymerase I from Thermus sp. strain 2.9
MHHHHHHGGSGMLPLFEPKGRVLLVDGHHLAYRNFFALKGLTTSRGEPVQGVYGFAKSLLKALKEDGDVVIVVFDAKAPSFRHEAYEAYKAGRAPTPEDFPRQLALMKELVDLLGLERLEVPGFEADDVLATLAKKAEREGYEVQILTADRDLFQLLSPRISVLHPEGHRITPEWLWEKYGLRPEQWVDFRALAGDPSDNIPGVKGIGEKTALKLLKEWGSLENLLKNLDQVKPESVREKILAHLEDLKLSRELSRVRTDLPLEVDFRGRREPDWEGLKAFLERLEFGSLLHEFGLLESPLPAEEAPWPPPEGAFLGYRLSRPEPMWAELLALAASAQGRVYRAEDPHGALRGLKEVRGLLAKDLAVVALREGLDLPPTDDPMLLAYLLDPSNTTPEGVARRYGGEWTEDAGERALLAERLHANLLGRLQGEERLLWLYEEVEKPLSRVLAHMEATGVKLDVAYLEALSLEVAAEMRRLEEEVFRLAGHSFNLNSRDQLERVLFDELGLPPIGKTEKTGKRSTSAAVLEALREVHPIVDKILQYRELAKLKGTYIDPLPALVHPKTGRLHTRFNQTATATGRLSSSDPNLQNIPVRTPLGQKIRRAFVAEEGWRLVALDYSQIELRVLAHLSGDENLIRVFQEGKDIHTQTASWMFGLSAEAIDPLMRRAAKTVNFGVLYGMSAHRLSQELGIPYEEAVAFIQRYFQSYPKVKAWIEKTLEEGRTRGYVETLFGRRRYVPDLNARVKSVREAAERMAFNMPVQGTAADLMKLAMVRLFPQLREVGARMLLQVHDELLLEAPKERAEEVAALAKEVMEGVWPLAVPLEVEVGIGEDWLAAKG

SEQ ID NO: 1411 - DNA, 2529 bp, synthetic construct
  misc_feature 1..2529: note = Variant of DNA polymerase I from Thermus sp. strain 2.9
  source 1..2529: mol_type = other DNA
atgcaccatcatcatcatcatggcggtagcggcatgttaccgttgttcgaacctaaaggtcgcgtgcttctggttgatggccatcatctcgcgtatcgtaacttctttgccctgaaaggattaaccaccagccgtggcgagccggtacagggtgtctacggctttgcaaagtcgctcctgaaagctctgaaagaagacggtgatgtggtgattgttgtctttgatgcgaaagcgccaagttttcgccacgaagcgtacgaagcttacaaagccgggcgtgctccaacgccggaagactttcctcgccaattggcgcttatgaaggaattagtggatttgcttggcctcgaacgcttggaagttcccggtttcgaggcagacgacgtattagcgactctcgcaaagaaagccgaacgtgagggctatgaagtccagatcttgacagcagatcgcgatcttttccagcttttatctccgcgcatctcggtgttacacccggaagggcatcgtatcaccccggaatggctctgggagaaatatggtttgcgtcccgaacaatgggtggattttcgcgccttagcaggcgatccgagcgacaatattccgggagttaaaggtatcggcgagaagacggcgctcaagctccttaaagaatgggggtcgttggagaacttgcttaagaatttagatcaggtcaaaccagagtcagtgcgtgagaagattcttgcacacctcgaagacctcaaaataagccgcgaattgtcccgtgtacgcaccgatttgccgctcgaagttgatttccgtcgtcgccgcgaacctgactgggagggtcttaaagcgtttttagagcgtcttgaatttggttcgctcttgcatgaattcggccttttagaaagcccgttaccagccgaagaagcaccttggccaccgcccgaaggcgcgtttttaggttaccgtttgagtcgcccggaaccgatgtgggccgaattatcggctcttgcagcgtctgcccagggacgtgtgtatcgcgcggaagaccctcatggtgcgctccgcggcctcaaagaagtccgtggactccttgccaaagacttagctgttgttgcattgcgcgaaggtcttgatttacctccgactgatgatccaatgcttcttgcgtacctcttggacccgtcaaacacgacgcccgaaggcgtagcccgtcgttacggcggcgagtggaccgaagatgcaggcgagcgcgcgttattggccgaacgtttgcacgccaatttattaggacgtttgcaaggcgaggaacgtctcctctggctttacgaagaagtggagaaaccattgagtcgcgtgctcgcgcatatggaagctaccggtgtcaaattagacgtggcgtatttggaggcactcagccttgaagttgctgccgaaatgcgccgcttggaggaagaagtattccgtttagcaggccactcctttaaccttaattctcgcgatcagttagaacgtgtgttgttcgatgaacttggtctccctcctatcggcaagacagagaagaccggtaaacgtagcacttcagcggcggttttagaagctcttcgcgaagtccatcccattgtggacaagatcttgcagtaccgcgaactcgcgaaattgaaaggcacctatattgaccctcttccggcattagtccacccgaaaacgggacgcctccatacccgcttcaaccaaacagccacggcgaccggtcgtttgtcctcctctgatccaaaccttcagaatattccagtacgtaccccattgggccagaagatccgccgcgcgtttgtagctgaggagggttggcgtttagtggccctcgattatagccaaattgaattacgtgtccttgcccatctttctggcgatgagaacctcatccgcgtgtttcaggaaggcaaagacattcacactcaaacggcaagctggatgtttggattatcagcagaagcgatcgatcctttgatgcgtcgtgcagcgaagaccattaatttcggtgttctctacggtatgagtgcccatcgtttgtcgcaggaattaggcattccctatgaagaagctgcggcgttcattcagcgctactttcaaagctatcccaaagttaaagcatggatcgagaagactctcgaagaaggccgcacacgtggttacgtagagaccttatttggacgtcgccgctatgttcccgatttaaacgctcgcgtgaaatctgtccgtgaagccgccgaacgcatggcgttcaacatgcctgtacagggcacggcagctgacctcatgaaacttgcaatggtgcgcctttttccacaattgcgtgaagttggtgcccgcatgctcttgcaggtccacgatgaactcttgttagaagcgccaaaagagcgtgcggaagaggtggcagccctcgcgaaagaggttatggaaggcgtgtggcccttagcggtgcctcttgaagtcgaagttggtattggcgaggattggttggctgccaaaggataatga

SEQ ID NO: 1412 - protein, 841 aa, synthetic construct
  REGION 1..841: note = Variant of DNA polymerase I from Thermus sp. strain 2.9
MHHHHHHGGSGMLPLFEPKGRVLLVDGHHLAYRNFFALKGLTTSRGEPVQGVYGFAKSLLKALKEDGDVVIVVFDAKAPSFRHEAYEAYKAGRAPTPEDFPRQLALMKELVDLLGLERLEVPGFEADDVLATLAKKAEREGYEVQILTADRDLFQLLSPRISVLHPEGHRITPEWLWEKYGLRPEQWVDFRALAGDPSDNIPGVKGIGEKTALKLLKEWGSLENLLKNLDQVKPESVREKILAHLEDLKISRELSRVRTDLPLEVDFRRRREPDWEGLKAFLERLEFGSLLHEFGLLESPLPAEEAPWPPPEGAFLGYRLSRPEPMWAELSALAASAQGRVYRAEDPHGALRGLKEVRGLLAKDLAVVALREGLDLPPTDDPMLLAYLLDPSNTTPEGVARRYGGEWTEDAGERALLAERLHANLLGRLQGEERLLWLYEEVEKPLSRVLAHMEATGVKLDVAYLEALSLEVAAEMRRLEEEVFRLAGHSFNLNSRDQLERVLFDELGLPPIGKTEKTGKRSTSAAVLEALREVHPIVDKILQYRELAKLKGTYIDPLPALVHPKTGRLHTRFNQTATATGRLSSSDPNLQNIPVRTPLGQKIRRAFVAEEGWRLVALDYSQIELRVLAHLSGDENLIRVFQEGKDIHTQTASWMFGLSAEAIDPLMRRAAKTINFGVLYGMSAHRLSQELGIPYEEAAAFIQRYFQSYPKVKAWIEKTLEEGRTRGYVETLFGRRRYVPDLNARVKSVREAAERMAFNMPVQGTAADLMKLAMVRLFPQLREVGARMLLQVHDELLLEAPKERAEEVAALAKEVMEGVWPLAVPLEVEVGIGEDWLAAKG

SEQ ID NO: 1413 - DNA, 2529 bp, synthetic construct
  misc_feature 1..2529: note = Variant of DNA polymerase I from Thermus sp. strain 2.9
  source 1..2529: mol_type = other DNA
atgcaccatcatcatcatcatggcggtagcggcatgttaccgttgttcgaacctaaaggtcgcgtgcttctggttgatggccatcatctcgcgtatcgtaacttctttgccctgaaaggattaaccaccagccgtggcgagccggtacagggtgtctacggctttgcaaagtcgctcctgaaagctctgaaagaagacggtgatgtggtgattgttgtctttgatgcgaaagcgccaagttttcgccacgaagcgtacgaagcttacaaagccgggcgtgctccaacgccggaagactttcctcgccaattggcgcttatgaaggaattagtggatttgcttggcctcgaacgcttggaagttcccggtttcgaggcagacgacgtattagcgactctcgcaaagaaagccgaacgtgagggctatgaagtccagatcttgacagcagatcgcgatcttttccagcttttatctccgcgcatctcggtgttacacccggaagggcatcgtatcaccccggaatggctctgggagaaatatggtttgcgtcccgaacaatgggtggattttcgcgccttagcaggcgatccgagcgacaatattccgggagttaaaggtatcggcgagaagacggcgctcaagctccttaaagaatgggggtcgttggagaacttgcttaagaatttagatcaggtcaaaccagagtcagtgcgtgagaagattcttgcacacctcgaagacctcaaattaagccgcgaattgtcccgtgtacgcaccgatttgccgctcgaagttgatttccgtggtcgccgcgaacctgactgggagggtcttaaagcgtttttagagcgtcttgaatttggttcgctcttgcatgaattcggccttttagaaagcccgttaccagccgaagaagcaccttggccaccgcccgaaggcgcgtttttaggttaccgtttgagtcgcccggaaccgatgtgggccgaattattggctcttgcagcgtctgcccaggagcgtgtgtatcgcgcggaagaccctcatggtgcgctccgcggcctcaaagaagtccgtggactccttgccaaagacttagctgttgttgcattgcgcgaaggtcttgatttacctccgactgatgatccaatgcttcttgcgtacctcttggacccgtcaaacacgacgcccgaaggcgtagcccgtcgttacggcggcgagtggaccgaagatgcagctaagcgcgcgttattggccgaacgtttgcacgccaatttattaggacgtttgcaaggcgaggaacgtctcctctggctttacgaagaagtggagaaaccattgagtcgcgtgctcgcgcatatggaagctaccggtgtcaaattagacgtggcgtatttggagaacctcagccttgaagttgctgccgaaatgcgccgcttggaggaagaagtattccgtttagcaggccactcctttaaccttaattctcgcgatcagttagaacgtgtgttgttcgatgaacttggtctccctcctatcggcaagacagagaagaccggtaaacgtagcacttcagcggcggttttagaagctcttcgcgaagtccatcccattgtggacaagatcttgcagtaccgcgaactcgcgaaattgaaaggcacctatattgaccctcttccggcattagtccacccgaaaacgggacgcctccatacccgcttcaaccaaacagccacggcgaccggtcgtttgtcctcctctgatccaaaccttcagaatattccagtacgtaccccattgggccagaagatccgccgcgcgtttgtagctgaggagggttggcgtttagtggccctcgattatagccaaattgaattacgtgtccttgcccatctttctggcgatgagaacctcatccgcgtgtttcaggaaggcaaagacattcacactcaaacggcaagctggatgtttggattatcagctgaagcgatcgatcctttgatgcgtcgtgcagcgaagaccgttaatttcggtgttctctacggtatgagtgcccatcgtttgtcgcaggaattaggcattccctatgaagaagctgtcgcgttcattcagcgctactttcaaagctatcccaaagttaaagcatggatcgagaagactctcgaagaaggccgcacacgtggttacgtagagaccttatttggacgtcgccgctatgttcccgatttaaacgctcgcgtgaaatctgtccgtgaagccgccgaacgcatggcgttcaacatgcctgtacagggcacggcagctgacctcatgaaacttgcaatggtgcgcctttttccacaattgcgtgaagttggtgcccgcatgctcttgcaggtccacgatgaactcttgttagaagcgccaaaagagcgtgcggaagaggtggcagccctcgcgaaagaggttatggaaggcgtgtggcccttagcggtgcctcttgaagtcgaagttggtattggcgaggattggttggctgccaaaggataatga

SEQ ID NO: 1414 - protein, 841 aa, synthetic construct
  REGION 1..841: note = Variant of DNA polymerase I from Thermus sp. strain 2.9
MHHHHHHGGSGMLPLFEPKGRVLLVDGHHLAYRNFFALKGLTTSRGEPVQGVYGFAKSLLKALKEDGDVVIVVFDAKAPSFRHEAYEAYKAGRAPTPEDFPRQLALMKELVDLLGLERLEVPGFEADDVLATLAKKAEREGYEVQILTADRDLFQLLSPRISVLHPEGHRITPEWLWEKYGLRPEQWVDFRALAGDPSDNIPGVKGIGEKTALKLLKEWGSLENLLKNLDQVKPESVREKILAHLEDLKLSRELSRVRTDLPLEVDFRGRREPDWEGLKAFLERLEFGSLLHEFGLLESPLPAEEAPWPPPEGAFLGYRLSRPEPMWAELLALAASAQERVYRAEDPHGALRGLKEVRGLLAKDLAVVALREGLDLPPTDDPMLLAYLLDPSNTTPEGVARRYGGEWTEDAAKRALLAERLHANLLGRLQGEERLLWLYEEVEKPLSRVLAHMEATGVKLDVAYLENLSLEVAAEMRRLEEEVFRLAGHSFNLNSRDQLERVLFDELGLPPIGKTEKTGKRSTSAAVLEALREVHPIVDKILQYRELAKLKGTYIDPLPALVHPKTGRLHTRFNQTATATGRLSSSDPNLQNIPVRTPLGQKIRRAFVAEEGWRLVALDYSQIELRVLAHLSGDENLIRVFQEGKDIHTQTASWMFGLSAEAIDPLMRRAAKTVNFGVLYGMSAHRLSQELGIPYEEAVAFIQRYFQSYPKVKAWIEKTLEEGRTRGYVETLFGRRRYVPDLNARVKSVREAAERMAFNMPVQGTAADLMKLAMVRLFPQLREVGARMLLQVHDELLLEAPKERAEEVAALAKEVMEGVWPLAVPLEVEVGIGEDWLAAKG

SEQ ID NO: 1415 - DNA, 2529 bp, synthetic construct
  misc_feature 1..2529: note = Variant of DNA polymerase I from Thermus sp. strain 2.9
  source 1..2529: mol_type = other DNA
atgcaccatcatcatcatcatggcggtagcggcatgttaccgttgttcgaacctaaaggtcgcgtgcttctggttgatggccatcatctcgcgtatcgtaacttctttgccctgaaaggattaaccaccagccgtggcgagccggtacagggtgtctacggctttgcaaagtcgctcctgaaagctctgaaagaagacggtgatgtggtgattgttgtctttgatgcgaaagcgccaagttttcgccacgaagcgtacgaagcttacaaagccgggcgtgctccaacgccggaagactttcctcgccaattggcgcttatgaaggaattagtggatttgcttggcctcgaacgcttggaagttcccggtttcgaggcagacgacgtattagcgactctcgcaaagaaagccgaacgtgagggctatgaagtccagatcttgacagcagatcgcgatcttttccagcttttatctccgcgcatctcggtgttacacccggaagggcatcgtatcaccccggaatggctctgggagaaatatggtttgcgtcccgaacaatgggtggattttcgcgccttagcaggcgatccgagcgacaatattccgggagttaaaggtatcggcgagaagacggcgctcaagctccttaaagaatgggggtcgttggagaacttgcttaagaatttagatcaggtcaaaccagagtcagtgcgtgagaagattcttgcacacctcgaagacctcaaattaagccgcgaattgtcccgtgtacgcaccgatttgccgctcgaagttgatttccgtcgtcgccgcgaacctgactgggagggtcttaaagcgtttttagagcgtcttgaatttggttcgctcttgcatgaattcggccttttagaaagcccgttaccagccgaagaagcaccttggccaccgcccgaaggcgcgtttttaggttaccgtttgagtcgcccggaaccgatgtgggccgaattactggctcttgcagcgtctgcccagggacgtgtgtatcgcgcggaagaccctcatggtgcgctccgcggcctcaaagaagtccgtggactccttgccaaagacttagctgttgttgcattgcgcgaaggtcttgatttacctccgactgatgatccaatgcttcttgcgtacctcttggacccgtcaaacacgacgcccgaaggcgtagcccgtcgttacggcggcgagtggaccgaagatgcagctaagcgcgcgttattggccgaacgtttgcacgccaatttattaggacgtttgcaaggcgaggaacgtctcctctggctttacgaagaagtggagaaaccattgagtcgcgtgctcgcgcatatggaagctaccggtgtcaaattagacgtggcgtatttggaggctctcagccttgaagttgctgccgaaatgcgccgcttggaggaagaagtattccgtttagcaggccactcctttaaccttaattctcgcgatcagttagaacgtgtgttgttcgatgaacttggtctccctcctatcggcaagacagagaagaccggtaaacgtagcacttcagcggcggttttagaagctcttcgcgaagtccatcccattgtggacaagatcttgcagtaccgcgaactcgcgaaattgaaaggcacctatattgaccctcttccggcattagtccacccgaaaacgggacgcctccatacccgcttcaaccaaacagccacggcgaccggtcgtttgtcctcctctgatccaaaccttcagaatattccagtacgtaccccattgggccagaagatccgccgcgcgtttgtagctgaggagggttggcgtttagtggccctcgattatagccaaattgaattacgtgtccttgcccatctttctggcgatgagaacctcatccgcgtgtttcaggaaggcaaagacattcacactcaaacggcaagctggatgtttggattatcagcagaagcgatcgatcctttgatgcgtcgtgcagcgaagaccgttaatttcggtgttctctacggtatgagtgcccatcgtttgtcgcaggaattaggcattccctatgaagaagctgcggcgttcattcagcgctactttcaaagctatcccaaagttaaagcatggatcgagaagactctcgaagaaggccgcacacgtggttacgtagagaccttatttggacgtcgccgctatgttcccgatttaaacgctcgcgtgaaatctgtccgtgaagccgccgaacgcatggcgttcaacatgcctgtacagggcacggcagctgacctcatgaaacttgcaatggtgcgcctttttccacaattgcgtgaagttggtgcccgcatgctcttgcaggtccacgatgaactcttgttagaagcgccaaaagagcgtgcggaagaggtggcagccctcgcgaaagaggttatggaaggcgtgtggcccttagcggtgcctcttgaagtcgaagttggtattggcgaggattggttggctgccaaaggataatga

SEQ ID NO: 1416 - protein, 841 aa, synthetic construct
  REGION 1..841: note = Variant of DNA polymerase I from Thermus sp. strain 2.9
MHHHHHHGGSGMLPLFEPKGRVLLVDGHHLAYRNFFALKGLTTSRGEPVQGVYGFAKSLLKALKEDGDVVIVVFDAKAPSFRHEAYEAYKAGRAPTPEDFPRQLALMKELVDLLGLERLEVPGFEADDVLATLAKKAEREGYEVQILTADRDLFQLLSPRISVLHPEGHRITPEWLWEKYGLRPEQWVDFRALAGDPSDNIPGVKGIGEKTALKLLKEWGSLENLLKNLDQVKPESVREKILAHLEDLKLSRELSRVRTDLPLEVDFRRRREPDWEGLKAFLERLEFGSLLHEFGLLESPLPAEEAPWPPPEGAFLGYRLSRPEPMWAELLALAASAQGRVYRAEDPHGALRGLKEVRGLLAKDLAVVALREGLDLPPTDDPMLLAYLLDPSNTTPEGVARRYGGEWTEDAAKRALLAERLHANLLGRLQGEERLLWLYEEVEKPLSRVLAHMEATGVKLDVAYLEALSLEVAAEMRRLEEEVFRLAGHSFNLNSRDQLERVLFDELGLPPIGKTEKTGKRSTSAAVLEALREVHPIVDKILQYRELAKLKGTYIDPLPALVHPKTGRLHTRFNQTATATGRLSSSDPNLQNIPVRTPLGQKIRRAFVAEEGWRLVALDYSQIELRVLAHLSGDENLIRVFQEGKDIHTQTASWMFGLSAEAIDPLMRRAAKTVNFGVLYGMSAHRLSQELGIPYEEAAAFIQRYFQSYPKVKAWIEKTLEEGRTRGYVETLFGRRRYVPDLNARVKSVREAAERMAFNMPVQGTAADLMKLAMVRLFPQLREVGARMLLQVHDELLLEAPKERAEEVAALAKEVMEGVWPLAVPLEVEVGIGEDWLAAKG

SEQ ID NO: 1417 - DNA, 2529 bp, synthetic construct
  misc_feature 1..2529: note = Variant of DNA polymerase I from Thermus sp. strain 2.9
  source 1..2529: mol_type = other DNA
atgcaccatcatcatcatcatggcggtagcggcatgttaccgttgttcgaacctaaaggtcgcgtgcttctggttgatggccatcatctcgcgtatcgtaacttctttgccctgaaaggattaaccaccagccgtggcgagccggtacagggtgtctacggctttgcaaagtcgctcctgaaagctctgaaagaagacggtgatgtggtgattgttgtctttgatgcgaaagcgccaagttttcgccacgaagcgtacgaagcttacaaagccgggcgtgctccaacgccggaagactttcctcgccaattggcgcttatgaaggaattagtggatttgcttggcctcgaacgcttggaagttcccggtttcgaggcagacgacgtattagcgactctcgcaaagaaagccgaacgtgagggctatgaagtccagatcttgacagcagatcgcgatcttttccagcttttatctccgcgcatctcggtgttacacccggaagggcatcgtatcaccccggaatggctctgggagaaatatggtttgcgtcccgaacaatgggtggattttcgcgccttagcaggcgatccgagcgacaatattccgggagttaaaggtatcggcgagaagacggcgctcaagctccttaaagaatgggggtcgttggagaacttgcttaagaatttagatcaggtcaaaccagagtcagtgcgtgagaagattcttgcacacctcgaagacctcaaattaagcctggaattgtcccgtgtacgcaccgatttgccgctcgaagttgatttccgtggtcgccgcgaacctgactgggagggtcttaaagcgtttttagagcgtcttgaatttggttcgctcttgcatgaattcggccttttagaaagcccgttaccagccgaagaagcaccttggccaccgcccgaaggcgcgtttttaggttaccgtttgagtcgcccggaaccgatgtgggccgaattatcggctcttgcagcgtctgcccaggagcgtgtgtatcgcgcggaagaccctcatggtgcgctccgcggcctcaaagaagtccgtggactccttgccaaagacttagctgttgttgcattgcgcgaaggtcttgatttacctccgactgatgatccaatgcttcttgcgtacctcttggacccgtcaaacacgacgcccgaaggcgtagcccgtcgttacggcggcgagtggaccgaagatgcagctaagcgcgcgttattggccgaacgtttgcacgccaatttattaggacgtttgcaaggcgaggaacgtctcctctggctttacgaagaagtggagaaaccattgagtcgcgtgctcgcgcatatggaagctaccggtgtcaaattagacgtggcgtatttggagaacctcagccttgaagttgctgccgaaatgcgccgcttggaggaagaagtattccgtttagcaggccactcctttaaccttaattctcgcgatcagttagaacgtgtgttgttcgatgagcttggtctccctcctatcggcaagacagagaagaccggtaaacgtagcacttcagcggcggttttagaagctcttcgcgaagtccatcccattgtggacaagatcttgcagtaccgcgaactcgcgaaattgaaaggcacctatattgaccctcttccggcattagtccacccgaaaacgggacgcctccatacccgcttcaaccaaacagccacggcgaccggtcgtttgtcctcctctgatccaaaccttcagaatattccagtacgtaccccattgggccagaagatccgccgcgcgtttgtagctgaggagggttggcgtttagtggccctcgattatagccaaattgaattacgtgtccttgcccatctttctggcgatgagaacctcatccgcgtgtttcaggaaggcaaagacattcacactcaaacggcaagctggatgtttggattatcagcagaagcgatcgatcctttgatgcgtcgtgcagcgaagaccattaatttcggtgttctctacggtatgagtgcccatcgtttgtcgcaggaattaggcattccctatgaagaagctgtcgcgttcattcagcgctactttcaaagctatcccaaagttaaagcatggatcgagaagactctcgaagaaggccgcacacgtggttacgtagagaccttatttggacgtcgccgctatgttcccgatttaaacgctcgcgtgaaatctgtccgtgaagccgccgaacgcatggcgttcaacatgcctgtacagggcacggcagctgacctcatgaaacttgcaatggtgcgcctttttccacaattgcgtgaagttggtgcccgcatgctcttgcaggtccacgatgaactcttgttagaagcgccaaaagagcgtgcggaagaggtggcagccctcgcgaaagaggttatggaaggcgtgtggcccttagcggtgcctcttgaagtcgaagttggtattggcgaggattggttggctgccaaaggataatga

SEQ ID NO: 1418 - protein, 841 aa, synthetic construct
  REGION 1..841: note = Variant of DNA polymerase I from Thermus sp. strain 2.9
MHHHHHHGGSGMLPLFEPKGRVLLVDGHHLAYRNFFALKGLTTSRGEPVQGVYGFAKSLLKALKEDGDVVIVVFDAKAPSFRHEAYEAYKAGRAPTPEDFPRQLALMKELVDLLGLERLEVPGFEADDVLATLAKKAEREGYEVQILTADRDLFQLLSPRISVLHPEGHRITPEWLWEKYGLRPEQWVDFRALAGDPSDNIPGVKGIGEKTALKLLKEWGSLENLLKNLDQVKPESVREKILAHLEDLKLSLELSRVRTDLPLEVDFRGRREPDWEGLKAFLERLEFGSLLHEFGLLESPLPAEEAPWPPPEGAFLGYRLSRPEPMWAELSALAASAQERVYRAEDPHGALRGLKEVRGLLAKDLAVVALREGLDLPPTDDPMLLAYLLDPSNTTPEGVARRYGGEWTEDAAKRALLAERLHANLLGRLQGEERLLWLYEEVEKPLSRVLAHMEATGVKLDVAYLENLSLEVAAEMRRLEEEVFRLAGHSFNLNSRDQLERVLFDELGLPPIGKTEKTGKRSTSAAVLEALREVHPIVDKILQYRELAKLKGTYIDPLPALVHPKTGRLHTRFNQTATATGRLSSSDPNLQNIPVRTPLGQKIRRAFVAEEGWRLVALDYSQIELRVLAHLSGDENLIRVFQEGKDIHTQTASWMFGLSAEAIDPLMRRAAKTINFGVLYGMSAHRLSQELGIPYEEAVAFIQRYFQSYPKVKAWIEKTLEEGRTRGYVETLFGRRRYVPDLNARVKSVREAAERMAFNMPVQGTAADLMKLAMVRLFPQLREVGARMLLQVHDELLLEAPKERAEEVAALAKEVMEGVWPLAVPLEVEVGIGEDWLAAKG

SEQ ID NO: 1419 - DNA, 2529 bp, synthetic construct
  misc_feature 1..2529: note = Variant of DNA polymerase I from Thermus sp. strain 2.9
  source 1..2529: mol_type = other DNA
atgcaccatcatcatcatcatggcggtagcggcatgttaccgttgttcgaacctaaaggtcgcgtgcttctggttgatggccatcatctcgcgtatcgtaacttctttgccctgaaaggattaaccaccagccgtggcgagccggtacagggtgtctacggctttgcaaagtcgctcctgaaagctctgaaagaagacggtgatgtggtgattgttgtctttgatgcgaaagcgccaagttttcgccacgaagcgtacgaagcttacaaagccgggcgtgctccaacgccggaagactttcctcgccaattggcgcttatgaaggaattagtggatttgcttggcctcgaacgcttggaagttcccggtttcgaggcagacgacgtattagcgactctcgcaaagaaagccgaacgtgagggctatgaagtccagatcttgacagcagatcgcgatcttttccagcttttatctccgcgcatctcggtgttacacccggaagggcatcgtatcaccccggaatggctctgggagaaatatggtttgcgtcccgaacaatgggtggattttcgcgccttagcaggcgatccgagcgacaatattccgggagttaaaggtatcggcgagaagacggcgctcaagctccttaaagaatgggggtcgttggagaacttgcttaagaatttagatcaggtcaaaccagagtcagtgcgtgagaagattcttgcacacctcgaagacctcaaattaagccgcgaattgtcccgtgtacgcaccgatttgccgctcgaagttgatttccgtggccgccgcgaacctgactgggagggtcttaaagcgtttttagagcgtcttgaatttggttcgctcttgcatgaattcggccttttagaaagcccgttaccagccgaagaagcaccttggccaccgcccgaaggcgcgtttttaggttaccgtttgagtcgcccggaaccgatgtgggccgaattatcggctcttgcagcgtctgcccagggacgtgtgtatcgcgcggaagaccctcatggtgcgctccgcggcctcaaagaagtccgtggactccttgccaaagacttagctgttgttgcattgcgcgaaggtcttgatttacctccgactgatgatccaatgcttcttgcgtacctcttggacccgtcaaacacgacgcccgaaggcgtagcccgtcgttacggcggcgagtggaccgaagatgcaggcgagcgcgcgttattggccgaacgtttgcacgccaatttattaggacgtttgcaaggcgaggaacgtctcctctggctttacgaagaagtggagaaaccattgagtcgcgtgctcgcgcatatggaagctaccggtgtcaaattagacgtggcgtatttggagaacctcagccttgaagttgctgccgaaatgcgccgcttggaggaagaagtattccgtttagcaggccactcctttaaccttaattctcgcgatcagttagaacgtgtgttgttcgatgaacttggtctccctcctatcggcaagacagagaagaccggtaaacgtagcacttcagcggcggttttagaagctcttcgcgaagtccatcccattgtggacaagatcttgcagtaccgcgaactcgcgaaattgaaaggcacctatattgaccctcttccggcattagtccacccgaaaacgggacgcctccatacccgcttcaaccaaacagccacggcgaccggtcgtttgtcctcctctgatccaaaccttcagaatattccagtacgtaccccattgggccagaagatccgccgcgcgtttgtagctgaggagggttggcgtttagtggccctcgattatagccaaattgaattacgtgtccttgcccatctttctggcgatgagaacctcatccgcgtgtttcaggaaggcaaagacattcacactcaaacggcaagctggatgtttggattatcagctgaagcgatcgatcctttgatgcgtcgtgcagcgaagaccatcaatttcggtgttctctacggtatgagtgcccatcgtttgtcgcaggaattaggcattccctatgaagaagctgcggcgttcattcagcgctactttcaaagctatcccaaagttaaagcatggatcgagaagactctcgaagaaggccgcacacgtggttacgtagagaccttatttggacgtcgccgctatgttcccgatttaaacgctcgcgtgaaatctgtccgtgaagccgccgaacgcatggcgttcaacatgcctgtacagggcacggcagctgacctcatgaaacttgcaatggtgcgcctttttccacaattgcgtgaagttggtgcccgcatgctcttgcaggtccacgatgaactcttgttagaagcgccaaaagagcgtgcggaagaggtggcagccctcgcgaaagaggttatggaaggcgtgtggcccttagcggtgcctcttgaagtcgaagttggtattggcgaggattggttggctgccaaaggataatga

SEQ ID NO: 1420 - protein, 841 aa, synthetic construct
  REGION 1..841: note = Variant of DNA polymerase I from Thermus sp. strain 2.9
MHHHHHHGGSGMLPLFEPKGRVLLVDGHHLAYRNFFALKGLTTSRGEPVQGVYGFAKSLLKALKEDGDVVIVVFDAKAPSFRHEAYEAYKAGRAPTPEDFPRQLALMKELVDLLGLERLEVPGFEADDVLATLAKKAEREGYEVQILTADRDLFQLLSPRISVLHPEGHRITPEWLWEKYGLRPEQWVDFRALAGDPSDNIPGVKGIGEKTALKLLKEWGSLENLLKNLDQVKPESVREKILAHLEDLKLSRELSRVRTDLPLEVDFRGRREPDWEGLKAFLERLEFGSLLHEFGLLESPLPAEEAPWPPPEGAFLGYRLSRPEPMWAELSALAASAQGRVYRAEDPHGALRGLKEVRGLLAKDLAVVALREGLDLPPTDDPMLLAYLLDPSNTTPEGVARRYGGEWTEDAGERALLAERLHANLLGRLQGEERLLWLYEEVEKPLSRVLAHMEATGVKLDVAYLENLSLEVAAEMRRLEEEVFRLAGHSFNLNSRDQLERVLFDELGLPPIGKTEKTGKRSTSAAVLEALREVHPIVDKILQYRELAKLKGTYIDPLPALVHPKTGRLHTRFNQTATATGRLSSSDPNLQNIPVRTPLGQKIRRAFVAEEGWRLVALDYSQIELRVLAHLSGDENLIRVFQEGKDIHTQTASWMFGLSAEAIDPLMRRAAKTINFGVLYGMSAHRLSQELGIPYEEAAAFIQRYFQSYPKVKAWIEKTLEEGRTRGYVETLFGRRRYVPDLNARVKSVREAAERMAFNMPVQGTAADLMKLAMVRLFPQLREVGARMLLQVHDELLLEAPKERAEEVAALAKEVMEGVWPLAVPLEVEVGIGEDWLAAKG

SEQ ID NO: 1421 - DNA, 2529 bp, synthetic construct
  misc_feature 1..2529: note = Variant of DNA polymerase I from Thermus sp. strain 2.9
  source 1..2529: mol_type = other DNA
atgcaccatcatcatcatcatggcggtagcggcatgttaccgttgttcgaacctaaaggtcgcgtgcttctggttgatggccatcatctcgcgtatcgtaacttctttgccctgaaaggattaaccaccagccgtggcgagccggtacagggtgtctacggctttgcaaagtcgctcctgaaagctctgaaagaagacggtgatgtggtgattgttgtctttgatgcgaaagcgccaagttttcgccacgaagcgtacgaagcttacaaagccgggcgtgctccaacgccggaagactttcctcgccaattggcgcttatgaaggaattagtggatttgcttggcctcgaacgcttggaagttcccggtttcgaggcagacgacgtattagcgactctcgcaaagaaagccgaacgtgagggctatgaagtccagatcttgacagcagatcgcgatcttttccagcttttatctccgcgcatctcggtgttacacccggaagggcatcgtatcaccccggaatggctctgggagaaatatggtttgcgtcccgaacaatgggtggattttcgcgccttagcaggcgatccgagcgacaatattccgggagttaaaggtatcggcgagaagacggcgctcaagctccttaaagaatgggggtcgttggagaacttgcttaagaatttagatcaggtcaaaccagagtcagtgcgtgagaagattcttgcacacctcgaagacctcaaattaagccgcgaattgtcccgtgtacgcaccgatttgccgctcgaagttgatttccgtggccgccgcgaacctgactgggagggtcttaaagcgtttttagagcgtcttgaatttggttcgctcttgcatgaattcggccttttagaaagcccgttaccagccgaagaagcaccttggccaccgcccgaaggcgcgtttttaggttaccgtttgagtcgcccggaaccgatgtgggccgaattattggctcttgcagcgtctgcccagggacgtgtgtatcgcgcggaagaccctcatggtgcgctccgcggcctcaaagaagtccgtggactccttgccaaagacttagctgttgttgcattgcgcgaaggtcttgatttacctccgactgatgatccaatgcttcttgcgtacctcttggacccgtcaaacacgacgcccgaaggcgtagcccgtcgttacggcggcgagtggaccgaagatgcaggtaagcgcgcgttattggccgaacgtttgcacgccaatttattaggacgtttgcaaggcgaggaacgtctcctctggctttacgaagaagtggagaaaccattgagtcgcgtgctcgcgcatatggaagctaccggtgtcaaattagacgtggcgtatttggaggctctcagccttgaagttgctgccgaaatgcgccgcttggaggaagaagtattccgtttagcaggccactcctttaaccttaattctcgcgatcagttagaacgtgtgttgttcgatgaacttggtctccctcctatcggcaagacagagaagaccggtaaacgtagcacttcagcggcggttttagaagctcttcgcgaagtccatcccattgtggacaagatcttgcagtaccgcgaactcgcgaaattgaaaggcacctatattgaccctcttccggcattagtccacccgaaaacgggacgcctccatacccgcttcaaccaaacagccacggcgaccggtcgtttgtcctcctctgatccaaaccttcagaatattccagtacgtaccccattgggccagaagatccgccgcgcgtttgtagctgaggagggttggcgtttagtggccctcgattatagccaaattgaattacgtgtccttgcccatctttctggcgatgagaacctcatccgcgtgtttcaggaaggcaaagacattcacactcaaacggcaagctggatgtttggattatcagctgaagcgatcgatcctttgatgcgtcgtgcagcgaagaccgttaatttcggtgttctctacggtatgagtgcccatcgtttgtcgcaggaattaggcattccctatgaagaagctgtcgcgttcattcagaagtactttcaaagctatcccaaagttaaagcatggatcgagaagactctcgaagaaggccgcacacgtggttacgtagagaccttatttggacgtcgccgctatgttcacgatttaaacgctcgcgtgaaatctgtccgtgaagccgccgaacgcatggcgttcaacatgcctgtacagggcacggcagctgacctcatgaaacttgcaatggtgcgcctttttccacaattgcgtgaagttggtgcccgcatgctcttgcaggtccacgatgaactcttgttagaagcgccaaaagagcgtgcggaagaggtggcagccctcgcgaaagaggttatggaaggcgtgtggcccttagcggtgcctcttgaagtcgaagttggtattggcgaggattggttggctgccaaaggataatga

SEQ ID NO: 1422 - protein, 841 aa, synthetic construct
  REGION 1..841: note = Variant of DNA polymerase I from Thermus sp. strain 2.9
MHHHHHHGGSGMLPLFEPKGRVLLVDGHHLAYRNFFALKGLTTSRGEPVQGVYGFAKSLLKALKEDGDVVIVVFDAKAPSFRHEAYEAYKAGRAPTPEDFPRQLALMKELVDLLGLERLEVPGFEADDVLATLAKKAEREGYEVQILTADRDLFQLLSPRISVLHPEGHRITPEWLWEKYGLRPEQWVDFRALAGDPSDNIPGVKGIGEKTALKLLKEWGSLENLLKNLDQVKPESVREKILAHLEDLKLSRELSRVRTDLPLEVDFRGRREPDWEGLKAFLERLEFGSLLHEFGLLESPLPAEEAPWPPPEGAFLGYRLSRPEPMWAELLALAASAQGRVYRAEDPHGALRGLKEVRGLLAKDLAVVALREGLDLPPTDDPMLLAYLLDPSNTTPEGVARRYGGEWTEDAGKRALLAERLHANLLGRLQGEERLLWLYEEVEKPLSRVLAHMEATGVKLDVAYLEALSLEVAAEMRRLEEEVFRLAGHSFNLNSRDQLERVLFDELGLPPIGKTEKTGKRSTSAAVLEALREVHPIVDKILQYRELAKLKGTYIDPLPALVHPKTGRLHTRFNQTATATGRLSSSDPNLQNIPVRTPLGQKIRRAFVAEEGWRLVALDYSQIELRVLAHLSGDENLIRVFQEGKDIHTQTASWMFGLSAEAIDPLMRRAAKTVNFGVLYGMSAHRLSQELGIPYEEAVAFIQKYFQSYPKVKAWIEKTLEEGRTRGYVETLFGRRRYVHDLNARVKSVREAAERMAFNMPVQGTAADLMKLAMVRLFPQLREVGARMLLQVHDELLLEAPKERAEEVAALAKEVMEGVWPLAVPLEVEVGIGEDWLAAKG

SEQ ID NO: 1423 - DNA, 2529 bp, synthetic construct
  misc_feature 1..2529: note = Variant of DNA polymerase I from Thermus sp. strain 2.9
  source 1..2529: mol_type = other DNA
atgcaccatcatcatcatcatggcggtagcggcatgttaccgttgttcgaacctaaaggtcgcgtgcttctggttgatggccatcatctcgcgtatcgtaacttctttgccctgaaaggattaaccaccagccgtggcgagccggtacagggtgtctacggctttgcaaagtcgctcctgaaagctctgaaagaagacggtgatgtggtgattgttgtctttgatgcgaaagcgccaagttttcgccacgaagcgtacgaagcttacaaagccgggcgtgctccaacgccggaagactttcctcgccaattggcgcttatgaaggaattagtggatttgcttggcctcgaacgcttggaagttcccggtttcgaggcagacgacgtattagcgactctcgcaaagaaagccgaacgtgagggctatgaagtccagatcttgacagcagatcgcgatcttttccagcttttatctccgcgcatctcggtgttacacccggaagggcatcgtatcaccccggaatggctctgggagaaatatggtttgcgtcccgaacaatgggtggattttcgcgccttagcaggcgatccgagcgacaatattccgggagttaaaggtatcggcgagaagacggcgctcaagctccttaaagaatgggggtcgttggagaacttgcttaagaatttagatcaggtcaaaccagagtcagtgcgtgagaagattcttgcacacctcgaagacctcaaattaagccgcgaattgtcccgtgtacgcaccgatttgccgctcgaagttgatttccgtggtcgccgcgaacctgactgggagggtcttaaagcgtttttagagcgtcttgaatttggttcgctcttgcatgaattcggccttttagaaagcccgttaccagccgaagaagcaccttggccaccgcccgaaggcgcgtttttaggttaccgtttgagtcgcccggaaccgatgtgggccgaattactggctcttgcagcgtctgcccagggacgtgtgtatcgcgcggaagaccctcatggtgcgctccgcggcctcaaagaagtcaacggactccttgccaaagacttagctgttgttgcattgcgcgaaggtcttgatttacctccgactgatgatccaatgcttcttgcgtacctcttggacccgtcaaacacgacgcccgaaggcgtagcccgtcgttacggcggcgagtggaccgaagatgcaggcgagcgcgcgttattggccgaacgtttgcacgccaatttattaggacgtttgcaaggcgaggaacgtctcctctggctttacgaagaagtggagaaaccattgagtcgcgtgctcgcgcatatggaagctaccggtgtcaaattagacgtggcgtatttggaggcactcagccttgaagttgctgccgaaatgcgccgcttggaggaagaagtattccgtttagcaggccactcctttaaccttaattctcgcgatcagttagaacgtgtgttgttcgatgaacttggtctccctcctatcggcaagacagagaagaccggtaaacgtagcacttcagcggcggttttagaagctcttcgcgaagtccatcccattgtggacaagatcttgcagtaccgcgaactcgcgaaattgaaaggcacctatattgaccctcttccggcattagtccacccgaaaacgggacgcctccatacccgcttcaaccaaacagccacggcgaccggtcgtttgtcctcctctgatccaaaccttcagaatattccagtacgtaccccattgggccagaagatccgccgcgcgtttgtagctgaggagggttggcgtttagtggccctcgattatagccaaattgaattacgtgtccttgcccatctttctggcgatgagaacctcatccgcgtgtttcaggaaggcaaagacattcacactcaaacggcaagctggatgtttggattatcagctgaagcgatcgatcctttgatgcgtcgtgcagcgaagaccgttaatttcggtgttctctacggtatgagtgcccatcgtttgtcgcaggaattaggcattccctatgaagaagctgcggcgttcattcagcgctactttcaaagctatcccaaagttaaagcatggatcgagaagactctcgaagaaggccgcacacgtggttacgtagagaccttatttggacgtcgccgctatgttcccgatttaaacgctcgcgtgaaatctgtccgtgaagccgccgaacgcatggcgttcaacatgcctgtacagggcacggcagctgacctcatgaaacttgcaatggtgcgcctttttccacaattgcgtgaagttggtgcccgcatgctcttgcaggtccacgatgaactcttgttagaagcgccaaaagagcgtgcggaagaggtggcagccctcgcgaaagaggttatggaaggcgtgtggcccttagcggtgcctcttgaagtcgaagttggtattggcgaggattggttggctgccaaaggataatga

SEQ ID NO: 1424 - protein, 841 aa, synthetic construct
  REGION 1..841: note = Variant of DNA polymerase I from Thermus sp. strain 2.9
MHHHHHHGGSGMLPLFEPKGRVLLVDGHHLAYRNFFALKGLTTSRGEPVQGVYGFAKSLLKALKEDGDVVIVVFDAKAPSFRHEAYEAYKAGRAPTPEDFPRQLALMKELVDLLGLERLEVPGFEADDVLATLAKKAEREGYEVQILTADRDLFQLLSPRISVLHPEGHRITPEWLWEKYGLRPEQWVDFRALAGDPSDNIPGVKGIGEKTALKLLKEWGSLENLLKNLDQVKPESVREKILAHLEDLKLSRELSRVRTDLPLEVDFRGRREPDWEGLKAFLERLEFGSLLHEFGLLESPLPAEEAPWPPPEGAFLGYRLSRPEPMWAELLALAASAQGRVYRAEDPHGALRGLKEVNGLLAKDLAVVALREGLDLPPTDDPMLLAYLLDPSNTTPEGVARRYGGEWTEDAGERALLAERLHANLLGRLQGEERLLWLYEEVEKPLSRVLAHMEATGVKLDVAYLEALSLEVAAEMRRLEEEVFRLAGHSFNLNSRDQLERVLFDELGLPPIGKTEKTGKRSTSAAVLEALREVHPIVDKILQYRELAKLKGTYIDPLPALVHPKTGRLHTRFNQTATATGRLSSSDPNLQNIPVRTPLGQKIRRAFVAEEGWRLVALDYSQIELRVLAHLSGDENLIRVFQEGKDIHTQTASWMFGLSAEAIDPLMRRAAKTVNFGVLYGMSAHRLSQELGIPYEEAAAFIQRYFQSYPKVKAWIEKTLEEGRTRGYVETLFGRRRYVPDLNARVKSVREAAERMAFNMPVQGTAADLMKLAMVRLFPQLREVGARMLLQVHDELLLEAPKERAEEVAALAKEVMEGVWPLAVPLEVEVGIGEDWLAAKG

SEQ ID NO: 1425 - DNA, 2529 bp, synthetic construct
  misc_feature 1..2529: note = Variant of DNA polymerase I from Thermus sp. strain 2.9
  source 1..2529: mol_type = other DNA
atgcaccatcatcatcatcatggcggtagcggcatgttaccgttgttcgaacctaaaggtcgcgtgcttctggttgatggccatcatctcgcgtatcgtaacttctttgccctgaaaggattaaccaccagccgtggcgagccggtacagggtgtctacggctttgcaaagtcgctcctgaaagctctgaaagaagacggtgatgtggtgattgttgtctttgatgcgaaagcgccaagttttcgccacgaagcgtacgaagcttacaaagccgggcgtgctccaacgccggaagactttcctcgccaattggcgcttatgaaggaattagtggatttgcttggcctcgaacgcttggaagttcccggtttcgaggcagacgacgtattagcgactctcgcaaagaaagccgaacgtgagggctatgaagtccagatcttgacagcagatcgcgatcttttccagcttttatctccgcgcatctcggtgttacacccggaagggcatcgtatcaccccggaatggctctgggagaaatatggtttgcgtcccgaacaatgggtggattttcgcgccttagcaggcgatccgagcgacaatattccgggagttaaaggtatcggcgagaagacggcgctcaagctccttaaagaatgggggtcgttggagaacttgcttaagaatttagatcaggtcaaaccagagtcagtgcgtgagaagattcttgcacacctcgaagacctcaaattaagccgcgaattgtcccgtgtacgcaccgatttgccgctcgaagttgatttccgtggccgccgcgaacctgactgggagggtcttaaagcgtttttagagcgtcttgaatttggttcgctcttgcatgaattcggccttttagaaagcccgttaccagccgaagaagcaccttggccaccgcccgaaggcgcgtttttaggttaccgtttgagtcgcccggaaccgatgtgggccgaattattggctcttgcagcgtctgcccagggacgtgtgtatcgcgcggaagaccctcatggtgcgctccgcggcctcaaagaagtccgtggactccttgccaaagacttagctgttgttgcattgcgcgaaggtcttgatttacctccgactgatgatccaatgcttcttgcgtacctcttggacccgtcaaacacgacgcccgaaggcgtagcccgtcgttacggcggcgagtggaccgaagatgcaggcgagcgcgcgttattggccgaacgtttgcacgccaatttattaggacgtttgcaaggcgaggaacgtctcctctggctttacgaagaagtggagaaaccattgagtcgcgtgctcgcgcatatggaagctaccggtgtcaaattagacgtggcgtatttggaggcactcagccttgaagttgctgccgaaatgcgccgcttggaggaagaagtattccgtttagcaggccactcctttaaccttaattctcgcgatcagttagaacgtgtgttgttcgatgaacttggtctccctcctatcggcggtacagagaagaccggtaaacgtagcacttcagcggcggttttagaagctcttcgcgaagtccatcccattgtggacaagatcttgcagtaccgcgaactcgcgaaattgaaaggcacctatattgaccctcttccggcattagtccacccgaaaacgggacgcctccatacccgcttcaaccaaacagccacggcgaccggtcgtttgtcctcctctgatccaaaccttcagaatattccagtacgtaccccattgggccagaagatccgccgcgcgtttgtagctgaggagggttggcgtttagtggccctcgattatagccaaattgaattacgtgtccttgcccatctttctggcgatgagaacctcatccgcgtgtttcaggaaggcaaagacattcacactcaaacggcaagctggatgtttggattatcagctgaagcgatcgatcctttgatgcgtcgtgcagcgaagaccatcaatttcggtgttctctacggtatgagtgcccatcgtttgtcgcaggaattaggcattccctatgaagaagctgcggcgttcattcagcgctactttcaaagctatcccaaagttaaagcatggatcgagaagactctcgaagaaggccgcacacgtggttacgtagagaccttatttggacgtcgccgctatgttcccgatttaaacgctcgcgtgaaatctgtccgtgaagccgccgaacgcatggcgttcaacatgcctgtacagggcacggcagctgacctcatgaaacttgcaatggtgcgcctttttccacaattgcgtgaagttggtgcccgcatgctcttgcaggtccacgatgaactcttgttagaagcgccaaaagagcgtgcggaagaggtggcagccctcgcgaaagaggttatggaaggcgtgtggcccttagcggtgcctcttgaagtcgaagttggtattggcgaggattggttggctgccaaaggataatga

SEQ ID NO: 1426 - protein, 841 aa, synthetic construct
  REGION 1..841: note = Variant of DNA polymerase I from Thermus sp. strain 2.9
MHHHHHHGGSGMLPLFEPKGRVLLVDGHHLAYRNFFALKGLTTSRGEPVQGVYGFAKSLLKALKEDGDVVIVVFDAKAPSFRHEAYEAYKAGRAPTPEDFPRQLALMKELVDLLGLERLEVPGFEADDVLATLAKKAEREGYEVQILTADRDLFQLLSPRISVLHPEGHRITPEWLWEKYGLRPEQWVDFRALAGDPSDNIPGVKGIGEKTALKLLKEWGSLENLLKNLDQVKPESVREKILAHLEDLKLSRELSRVRTDLPLEVDFRGRREPDWEGLKAFLERLEFGSLLHEFGLLESPLPAEEAPWPPPEGAFLGYRLSRPEPMWAELLALAASAQGRVYRAEDPHGALRGLKEVRGLLAKDLAVVALREGLDLPPTDDPMLLAYLLDPSNTTPEGVARRYGGEWTEDAGERALLAERLHANLLGRLQGEERLLWLYEEVEKPLSRVLAHMEATGVKLDVAYLEALSLEVAAEMRRLEEEVFRLAGHSFNLNSRDQLERVLFDELGLPPIGGTEKTGKRSTSAAVLEALREVHPIVDKILQYRELAKLKGTYIDPLPALVHPKTGRLHTRFNQTATATGRLSSSDPNLQNIPVRTPLGQKIRRAFVAEEGWRLVALDYSQIELRVLAHLSGDENLIRVFQEGKDIHTQTASWMFGLSAEAIDPLMRRAAKTINFGVLYGMSAHRLSQELGIPYEEAAAFIQRYFQSYPKVKAWIEKTLEEGRTRGYVETLFGRRRYVPDLNARVKSVREAAERMAFNMPVQGTAADLMKLAMVRLFPQLREVGARMLLQVHDELLLEAPKERAEEVAALAKEVMEGVWPLAVPLEVEVGIGEDWLAAKG

SEQ ID NO: 1427 - DNA, 2529 bp, synthetic construct
  misc_feature 1..2529: note = Variant of DNA polymerase I from Thermus sp. strain 2.9
  source 1..2529: mol_type = other DNA
atgcaccatcatcatcatcatggcggtagcggcatgttaccgttgttcgaacctaaaggtcgcgtgcttctggttgatggccatcatctcgcgtatcgtaacttctttgccctgaaaggattaaccaccagccgtggcgagccggtacagggtgtctacggctttgcaaagtcgctcctgaaagctctgaaagaagacggtgatgtggtgattgttgtctttgatgcgaaagcgccaagttttcgccacgaagcgtacgaagcttacaaagccgggcgtgctccaacgccggaagactttcctcgccaattggcgcttatgaaggaattagtggatttgcttggcctcgaacgcttggaagttcccggtttcgaggcagacgacgtattagcgactctcgcaaagaaagccgaacgtgagggctatgaagtccagatcttgacagcagatcgcgatcttttccagcttttatctccgcgcatctcggtgttacacccggaagggcatcgtatcaccccggaatggctctgggagaaatatggtttgcgtcccgaacaatgggtggattttcgcgccttagcaggcgatccgagcgacaatattccgggagttaaaggtatcggcgagaagacggcgctcaagctccttaaagaatgggggtcgttggagaacttgcttaagaatttagatcaggtcaaaccagagtcagtgcgtgagaagattcttgcacacctcgaagacctcaaattaagccgcgaattgtcccgtgtacgcaccgatttgccgctcgaagttgatttccgtggccgccgcgaacctgactttgagggtcttaaagcgtttttagagcgtcttgaatttggttcgctcttgcatgaattcggccttttagaaagcccgttaccagccgaagaagcaccttggccaccgcccgaaggcgcgtttttaggttaccgtttgagtcgcccggaaccgatgtgggccgaattattggctcttgcagcgtctgcccagggacgtgtgtatcgcgcggaagaccctcatggtgcgctccgcggcctcaaagaagtccgtggactccttgccaaagacttagctgttgttgcattgcgcgaaggtcttgatttacctccgactgatgatccaatgcttcttgcgtacctcttggacccgtcaaacacgacgcccgaaggcgtagcccgtcgttacggcggcgagtggaccgaagatgcaggcgagcgcgcgttattggccgaacgtttgcacgccaatttattaggacgtttgcaaggcgaggaacgtctcctctggctttacgaagaagtggagaaaccattgagtcgcgtgctcgcgcatatggaagctaccggtgtcaaattagacgtggcgtatttggaggcactcagccttgaagttgctgccgaaatgcgccgcttggaggaagaagtattccgtttagcaggccactcctttaaccttaattctcgcgatcagttagaacgtgtgttgttcgatgaacttggtctccctcctatcggcaagacagagaagaccggtaaacgtagcacttcagcggcggttttagaagctcttcgcgaagtccatcccattgtggacaagatcttgcagtaccgcgaactcgcgaaattgaaaggcacctatattgaccctcttccggcattagtccacccgaaaacgggacgcctccatacccgcttcaaccaaacagccacggcgaccggtcgtttgtcctcctctgatccaaaccttcagaatattccagtacgtaccccattgggccagaagatccgccgcgcgtttgtagctgaggagggttggcgtttagtggccctcgattatagccaaattgaattacgtgtccttgcccatctttctggcgatgagaacctcatccgcgtgtttcaggaaggcaaagacattcacactcaaacggcaagctggatgtttggattatcagctgaagcgatcgatcctttgatgcgtcgtgcagcgaagaccatcaatttcggtgttctctacggtatgagtgcccatcgtttgtcgcaggaattaggcattccctatgaagaagctgcggcgttcattcagcgctactttcaaagctatcccaaagttaaagcatggatcgagaagactctcgaagaaggccgcacacgtggttacgtagagaccttatttggacgtcgccgctatgttcccgatttaaacgctcgcgtgaaatctgtccgtgaagccgccgaacgcatggcgttcaacatgcctgtacagggcacggcagctgacctcatgaaacttgcaatggtgcgcctttttccacaattgcgtgaagttggtgcccgcatgctcttgcaggtccacgatgaactcttgttagaagcgccaaaagagcgtgcggaagaggtggcagccctcgcgaaagaggttatggaaggcgtgtggcccttagcggtgcctcttgaagtcgaagttggtattggcgaggattggttggctgccaaaggataatga

SEQ ID NO: 1428 - protein, 841 aa, synthetic construct
  REGION 1..841: note = Variant of DNA polymerase I from Thermus sp. strain 2.9
MHHHHHHGGSGMLPLFEPKGRVLLVDGHHLAYRNFFALKGLTTSRGEPVQGVYGFAKSLLKALKEDGDVVIVVFDAKAPSFRHEAYEAYKAGRAPTPEDFPRQLALMKELVDLLGLERLEVPGFEADDVLATLAKKAEREGYEVQILTADRDLFQLLSPRISVLHPEGHRITPEWLWEKYGLRPEQWVDFRALAGDPSDNIPGVKGIGEKTALKLLKEWGSLENLLKNLDQVKPESVREKILAHLEDLKLSRELSRVRTDLPLEVDFRGRREPDFEGLKAFLERLEFGSLLHEFGLLESPLPAEEAPWPPPEGAFLGYRLSRPEPMWAELLALAASAQGRVYRAEDPHGALRGLKEVRGLLAKDLAVVALREGLDLPPTDDPMLLAYLLDPSNTTPEGVARRYGGEWTEDAGERALLAERLHANLLGRLQGEERLLWLYEEVEKPLSRVLAHMEATGVKLDVAYLEALSLEVAAEMRRLEEEVFRLAGHSFNLNSRDQLERVLFDELGLPPIGKTEKTGKRSTSAAVLEALREVHPIVDKILQYRELAKLKGTYIDPLPALVHPKTGRLHTRFNQTATATGRLSSSDPNLQNIPVRTPLGQKIRRAFVAEEGWRLVALDYSQIELRVLAHLSGDENLIRVFQEGKDIHTQTASWMFGLSAEAIDPLMRRAAKTINFGVLYGMSAHRLSQELGIPYEEAAAFIQRYFQSYPKVKAWIEKTLEEGRTRGYVETLFGRRRYVPDLNARVKSVREAAERMAFNMPVQGTAADLMKLAMVRLFPQLREVGARMLLQVHDELLLEAPKERAEEVAALAKEVMEGVWPLAVPLEVEVGIGEDWLAAKG

SEQ ID NO: 1429 - DNA, 2529 bp, synthetic construct
  misc_feature 1..2529: note = Variant of DNA polymerase I from Thermus sp. strain 2.9
  source 1..2529: mol_type = other DNA
atgcaccatcatcatcatcatggcggtagcggcatgttaccgttgttcgaacctaaaggtcgcgtgcttctggttgatggccatcatctcgcgtatcgtaacttctttgccctgaaaggattaaccaccagccgtggcgagccggtacagggtgtctacggctttgcaaagtcgctcctgaaagctctgaaagaagacggtgatgtggtgattgttgtctttgatgcgaaagcgccaagttttcgccacgaagcgtacgaagcttacaaagccgggcgtgctccaacgccggaagactttcctcgccaattggcgcttatgaaggaattagtggatttgcttggcctcgaacgcttggaagttcccggtttcgaggcagacgacgtattagcgactctcgcaaagaaagccgaacgtgagggctatgaagtccagatcttgacagcagatcgcgatcttttccagcttttatctccgcgcatctcggtgttacacccggaagggcatcgtatcaccccggaatggctctgggagaaatatggtttgcgtcccgaacaatgggtggattttcgcgccttagcaggcgatccgagcgacaatattccgggagttaaaggtatcggcgagaagacggcgctcaagctccttaaagaatgggggtcgttggagaacttgcttaagaatttagatcaggtcaaaccagagtcagtgcgtgagaagattcttgcacacctcgaagacctcaaattaagccgcgaattgtcccgtgtacgcaccgatttgccgctcgaagttgatttccgtggtcgccgcgaacctgactgggagggtcttaaagcgtttttagagcgtcttgaatttggttcgctcttgcatgaattcggccttttagaaagcccgttaccagccgaagaagcaccttggccaccgcccgaaggcgcgtttttaggttaccgtttgagtcgcccggaaccgatgtgggccgaattattggctcttgcagcgtctgcccaggagcgtgtgtatcgcgcggaagaccctcatggtgcgctcaagggcctcaaagaagtccgtggactccttgccaaagacttagctgttgttgcattgcgcgaaggtcttgatttacctccgactgatgatccaatgcttcttgcgtacctcttggacccgtcaaacacgacgcccgaaggcgtagcccgtcgttacggcggcgagtggaccgaagatgcaggcgagcgcgcgttattggccgaacgtttgcacgccaatttattaggacgtttgcaaggcgaggaacgtctcctctggctttacgaagaagtggagaaaccattgagtcgcgtgctcgcgcatatggaagctaccggtgtcaaattagacgtggcgtatttggaggcactcagccttgaagttgctgccgaaatgcgccgcttggaggaagaagtattccgtttagcaggccactcctttaaccttaattctcgcgatcagttagaacgtgtgttgttcgatgaacttggtctccctcctatcggcaagacagagaagaccggtaaacgtagcacttcagcggcggttttagaagctcttcgcgaagtccatcccattgtggacaagatcttgcagtaccgcgaactcgcgaaattgaaaggcacctatattgaccctcttccggcattagtccacccgaaaacgggacgcctccatacccgcttcaaccaaacagccacggcgaccggtcgtttgtcctcctctgatccaaaccttcagaatattccagtacgtaccccattgggccagaagatccgccgcgcgtttgtagctgaggagggttggcgtttagtggccctcgattatagccaaattgaattacgtgtccttgcccatctttctggcgatgagaacctcatccgcgtgtttcaggaaggcaaagacattcacactcaaacggcaagctggatgtttggattatcagctgaagcgatcgatcctttgatgcgtcgtgcagcgaagaccattaatttcggtgttctctacggtatgagtgcccatcgtttgtcgcaggaattaggcattccctatgaagaagctgcggcgttcattcagcgctactttcaaagctatcccaaagttaaagcatggatcgagaagactctcgaagaaggccgcacacgtggttacgtagagaccttatttggacgtcgccgctatgttcccgatttaaacgctcgcgtgaaatctgtccgtgaagccgccgaacgcatggcgttcaacatgcctgtacagggcacggcagctgacctcatgaaacttgcaatggtgcgcctttttccacaattgcgtgaagttggtgcccgcatgctcttgcaggtccacgatgaactcttgttagaagcgccaaaagagcgtgcggaagaggtggcagccctcgcgaaagaggttatggaaggcgtgtggcccttagcggtgcctcttgaagtcgaagttggtattggcgaggattggttggctgccaaaggataatga

SEQ ID NO: 1430 - protein, 841 aa, synthetic construct
  REGION 1..841: note = Variant of DNA polymerase I from Thermus sp. strain 2.9
MHHHHHHGGSGMLPLFEPKGRVLLVDGHHLAYRNFFALKGLTTSRGEPVQGVYGFAKSLLKALKEDGDVVIVVFDAKAPSFRHEAYEAYKAGRAPTPEDFPRQLALMKELVDLLGLERLEVPGFEADDVLATLAKKAEREGYEVQILTADRDLFQLLSPRISVLHPEGHRITPEWLWEKYGLRPEQWVDFRALAGDPSDNIPGVKGIGEKTALKLLKEWGSLENLLKNLDQVKPESVREKILAHLEDLKLSRELSRVRTDLPLEVDFRGRREPDWEGLKAFLERLEFGSLLHEFGLLESPLPAEEAPWPPPEGAFLGYRLSRPEPMWAELLALAASAQERVYRAEDPHGALKGLKEVRGLLAKDLAVVALREGLDLPPTDDPMLLAYLLDPSNTTPEGVARRYGGEWTEDAGERALLAERLHANLLGRLQGEERLLWLYEEVEKPLSRVLAHMEATGVKLDVAYLEALSLEVAAEMRRLEEEVFRLAGHSFNLNSRDQLERVLFDELGLPPIGKTEKTGKRSTSAAVLEALREVHPIVDKILQYRELAKLKGTYIDPLPALVHPKTGRLHTRFNQTATATGRLSSSDPNLQNIPVRTPLGQKIRRAFVAEEGWRLVALDYSQIELRVLAHLSGDENLIRVFQEGKDIHTQTASWMFGLSAEAIDPLMRRAAKTINFGVLYGMSAHRLSQELGIPYEEAAAFIQRYFQSYPKVKAWIEKTLEEGRTRGYVETLFGRRRYVPDLNARVKSVREAAERMAFNMPVQGTAADLMKLAMVRLFPQLREVGARMLLQVHDELLLEAPKERAEEVAALAKEVMEGVWPLAVPLEVEVGIGEDWLAAKG

SEQ ID NO: 1431 - DNA, 2529 bp, synthetic construct
  misc_feature 1..2529: note = Variant of DNA polymerase I from Thermus sp. strain 2.9
  source 1..2529: mol_type = other DNA
atgcaccatcatcatcatcatggcggtagcggcatgttaccgttgttcgaacctaaaggtcgcgtgcttctggttgatggccatcatctcgcgtatcgtaacttctttgccctgaaaggattaaccaccagccgtggcgagccggtacagggtgtctacggctttgcaaagtcgctcctgaaagctctgaaagaagacggtgatgtggtgattgttgtctttgatgcgaaagcgccaagttttcgccacgaagcgtacgaagcttacaaagccgggcgtgctccaacgccggaagactttcctcgccaattggcgcttatgaaggaattagtggatttgcttggcctcgaacgcttggaagttcccggtttcgaggcagacgacgtattagcgactctcgcaaagaaagccgaacgtgagggctatgaagtccagatcttgacagcagatcgcgatcttttccagcttttatctccgcgcatctcggtgttacacccggaagggcatcgtatcaccccggaatggctctgggagaaatatggtttgcgtcccgaacaatgggtggattttcgcgccttagcaggcgatccgagcgacaatattccgggagttaaaggtatcggcgagaagacggcgctcaagctccttaaagaatgggggtcgttggagaacttgcttaagaatttagatcaggtcaaaccagagtcagtgcgtgagaagattcttgcacacctcgaagacctcaaattaagcctggaattgtcccgtgtacgcaccgatttgccgctcgaagttgatttccgtggccgccgcgaacctgactgggagggtcttaaagcgtttttagagcgtcttgaatttggttcgctcttgcatgaattcggccttttagaaagcccgttaccagccgaagaagcaccttggccaccgcccgaaggcgcgtttttaggttaccgtttgagtcgcccggaaccgatgtgggccgaattactggctcttgcagcgtctgcccagggacgtgtgtatcgcgcggaagaccctcatggtgcgctccgtggcctcaaagaagtccgtggactccttgccaaagacttagctgttgttgcattgcgcgaaggtcttgatttacctccgactgatgatccaatgcttcttgcgtacctcttggacccgtcaaacacgacgcccgaaggcgtagcccgtcgttacggcggcgagtggaccgaagatgcagctgagcgcgcgttattggccgaacgtttgcacgccaatttattaggacgtttgcaaggcgaggaacgtctcctctggctttacgaagaagtggagaaaccattgagtcgcgtgctcgcgcatatggaagctaccggtgtcaaattagacgtggcgtatttggaggctctcagccttgaagttgctgccgaaatgcgccgcttggaggaagaagtattccgtttagcaggccactcctttaaccttaattctcgcgatcagttagaacgtgtgttgttcgatgagcttggtctccctcctatcggcaagacagagaagaccggtaaacgtagcacttcagcggcggttttagaagctcttcgcgaagtccatcccattgtggacaagatcttgcagtaccgcgaactcgcgaaattgaaaggcacctatattgaccctcttccggcattagtccacccgaaaacgggacgcctccatacccgcttcaaccaaacagccacggcgaccggtcgtttgtcctcctctgatccaaaccttcagaatattccagtacgtaccccattgggccagaagatccgccgcgcgtttgtagctgaggagggttggcgtttagtggccctcgattatagccaaattgaattacgtgtccttgcccatctttctggcgatgagaacctcatccgcgtgtttcaggaaggcaaagacattcacactcaaacggcaagctggatgtttggattatcagctgaagcgatcgatcctttgatgcgtcgtgcagcgaagaccattaatttcggtgttctctacggtatgagtgcccatcgtttgtcgcaggaattaggcattccctatgaagaagctgcggcgttcattcagcgctactttcaaagctatcccaaagttaaagcatggatcgagaagactctcgaagaaggccgcacacgtggttacgtagagaccttatttggacgtcgccgctatgttcccgatttaaacgctcgcgtgaaatctgtccgtgaagccgccgaacgcatggcgttcaacatgcctgtacagggcacggcagctgacctcatgaaacttgcaatggtgcgcctttttccacaattgcgtgaagttggtgcccgcatgctcttgcaggtccacgatgaactcttgttagaagcgccaaaagagcgtgcggaagaggtggcagccctcgcgaaagaggttatggaaggcgtgtggcccttagcggtgcctcttgaagtcgaagttggtattggcgaggattggttggctgccaaaggataatga

SEQ ID NO: 1432 - protein, 841 aa, synthetic construct
  REGION 1..841: note = Variant of DNA polymerase I from Thermus sp. strain 2.9
MHHHHHHGGSGMLPLFEPKGRVLLVDGHHLAYRNFFALKGLTTSRGEPVQGVYGFAKSLLKALKEDGDVVIVVFDAKAPSFRHEAYEAYKAGRAPTPEDFPRQLALMKELVDLLGLERLEVPGFEADDVLATLAKKAEREGYEVQILTADRDLFQLLSPRISVLHPEGHRITPEWLWEKYGLRPEQWVDFRALAGDPSDNIPGVKGIGEKTALKLLKEWGSLENLLKNLDQVKPESVREKILAHLEDLKLSLELSRVRTDLPLEVDFRGRREPDWEGLKAFLERLEFGSLLHEFGLLESPLPAEEAPWPPPEGAFLGYRLSRPEPMWAELLALAASAQGRVYRAEDPHGALRGLKEVRGLLAKDLAVVALREGLDLPPTDDPMLLAYLLDPSNTTPEGVARRYGGEWTEDAAERALLAERLHANLLGRLQGEERLLWLYEEVEKPLSRVLAHMEATGVKLDVAYLEALSLEVAAEMRRLEEEVFRLAGHSFNLNSRDQLERVLFDELGLPPIGKTEKTGKRSTSAAVLEALREVHPIVDKILQYRELAKLKGTYIDPLPALVHPKTGRLHTRFNQTATATGRLSSSDPNLQNIPVRTPLGQKIRRAFVAEEGWRLVALDYSQIELRVLAHLSGDENLIRVFQEGKDIHTQTASWMFGLSAEAIDPLMRRAAKTINFGVLYGMSAHRLSQELGIPYEEAAAFIQRYFQSYPKVKAWIEKTLEEGRTRGYVETLFGRRRYVPDLNARVKSVREAAERMAFNMPVQGTAADLMKLAMVRLFPQLREVGARMLLQVHDELLLEAPKERAEEVAALAKEVMEGVWPLAVPLEVEVGIGEDWLAAKG

SEQ ID NO: 1433 - DNA, 2529 bp, synthetic construct
  misc_feature 1..2529: note = Variant of DNA polymerase I from Thermus sp. strain 2.9
  source 1..2529: mol_type = other DNA
atgcaccatcatcatcatcatggcggtagcggcatgttaccgttgttcgaacctaaaggtcgcgtgcttctggttgatggccatcatctcgcgtatcgtaacttctttgccctgaaaggattaaccaccagccgtggcgagccggtacagggtgtctacggctttgcaaagtcgctcctgaaagctctgaaagaagacggtgatgtggtgattgttgtctttgatgcgaaagcgccaagttttcgccacgaagcgtacgaagcttacaaagccgggcgtgctccaacgccggaagactttcctcgccaattggcgcttatgaaggaattagtggatttgcttggcctcgaacgcttggaagttcccggtttcgaggcagacgacgtattagcgactctcgcaaagaaagccgaacgtgagggctatgaagtccagatcttgacagcagatcgcgatcttttccagcttttatctccgcgcatctcggtgttacacccggaagggcatcgtatcaccccggaatggctctgggagaaatatggtttgcgtcccgaacaatgggtggattttcgcgccttagcaggcgatccgagcgacaatattccgggagttaaaggtatcggcgagaagacggcgctcaagctccttaaagaatgggggtcgttggagaacttgcttaagaatttagatcaggtcaaaccagagtcagtgcgtgagaagattcttgcacacctcgaagacctcaaattaagccgcgaattgtcccgtgtacgcaccgatttgccgctcgaagttgatttccgtggtcgccgcgaacctgactgggagggtcttaaagcgtttttagagcgtcttgaatttggttcgctcttgcatgaattcggccttttagaaagcccgttaccagccgaagaagcaccttggccaccgcccgaaggcgcgtttttaggttaccgtttgagtcgcccggaaccgatgtgggccgaattactggctcttgcagcgtctgcccagggacgtgtgtatcgcgcggaagaccctcatggtgcgctcaagggcctcaaagaagtccgtggactccttgccaaagacttagctgttgttgcattgcgcgaaggtcttgatttacctccgactgatgatccaatgcttcttgcgtacctcttggacccgtcaaacacgacgcccgaaggcgtagcccgtcgttacggcggcgagtggaccgaagatgcaggcgagcgcgcgttattggccgaacgtttgcacgccaatttattaggacgtttgcaaggcgaggaacgtctcctctggctttacgaagaagtggagaaaccattgagtcgcgtgctcgcgcatatggaagctaccggtgtcaaattagacgtggcgtatttggaggcactcagccttgaagttgctgccgaaatgcgccgcttggaggaagaagtattccgtttagcaggccactcctttaaccttaattctcgcgatcagttagaacgtgtgttgttcgatgaacttggtctccctcctatcggcaagacagagaagaccggtaaacgtagcacttcagcggcggttttagaagctcttcgcgaagtccatcccattgtggacaagatcttgcagtaccgcgaactcgcgaaattgaaaggcacctatattgaccctcttccggcattagtccacccgaaaacgggacgcctccatacccgcttcaaccaaacagccacggcgaccggtcgtttgtcctcctctgatccaaaccttcagaatattccagtacgtaccccattgggccagaagatccgccgcgcgtttgtagctgaggagggttggcgtttagtggccctcgattatagccaaattgaattacgtgtccttgcccatctttctggcgatgagaacctcatccgcgtgtttcaggaaggcaaagacattcacactcaaacggcaagctggatgtttggattatcaccagaagcgatcgatcctttgatgcgtcgtgcagcgaagaccatcaatttcggtgttctctacggtatgagtgcccatcgtttgtcgcaggaattaggcattccctatgaagaagctgcggcgttcattcagcgctactttcaaagctatcccaaagttaaagcatggatcgagaagactctcgaagaaggccgcacacgtggttacgtagagaccttatttggacgtcgccgctatgttcccgatttaaacgctcgcgtgaaatctgtccgtgaagccgccgaacgcatggcgttcaacatgcctgtacagggcacggcagctgacctcatgaaacttgcaatggtgcgcctttttccacaattgcgtgaagttggtgcccgcatgctcttgcaggtccacgatgaactcttgttagaagcgccaaaagagcgtgcggaagaggtggcagccctcgcgaaagaggttatggaaggcgtgtggcccttagcggtgcctcttgaagtcgaagttggtattggcgaggattggttggctgccaaaggataatga

SEQ ID NO: 1434 - protein, 841 aa, synthetic construct
  REGION 1..841: note = Variant of DNA polymerase I from Thermus sp. strain 2.9
MHHHHHHGGSGMLPLFEPKGRVLLVDGHHLAYRNFFALKGLTTSRGEPVQGVYGFAKSLLKALKEDGDVVIVVFDAKAPSFRHEAYEAYKAGRAPTPEDFPRQLALMKELVDLLGLERLEVPGFEADDVLATLAKKAEREGYEVQILTADRDLFQLLSPRISVLHPEGHRITPEWLWEKYGLRPEQWVDFRALAGDPSDNIPGVKGIGEKTALKLLKEWGSLENLLKNLDQVKPESVREKILAHLEDLKLSRELSRVRTDLPLEVDFRGRREPDWEGLKAFLERLEFGSLLHEFGLLESPLPAEEAPWPPPEGAFLGYRLSRPEPMWAELLALAASAQGRVYRAEDPHGALKGLKEVRGLLAKDLAVVALREGLDLPPTDDPMLLAYLLDPSNTTPEGVARRYGGEWTEDAGERALLAERLHANLLGRLQGEERLLWLYEEVEKPLSRVLAHMEATGVKLDVAYLEALSLEVAAEMRRLEEEVFRLAGHSFNLNSRDQLERVLFDELGLPPIGKTEKTGKRSTSAAVLEALREVHPIVDKILQYRELAKLKGTYIDPLPALVHPKTGRLHTRFNQTATATGRLSSSDPNLQNIPVRTPLGQKIRRAFVAEEGWRLVALDYSQIELRVLAHLSGDENLIRVFQEGKDIHTQTASWMFGLSPEAIDPLMRRAAKTINFGVLYGMSAHRLSQELGIPYEEAAAFIQRYFQSYPKVKAWIEKTLEEGRTRGYVETLFGRRRYVPDLNARVKSVREAAERMAFNMPVQGTAADLMKLAMVRLFPQLREVGARMLLQVHDELLLEAPKERAEEVAALAKEVMEGVWPLAVPLEVEVGIGEDWLAAKG

SEQ ID NO: 1435 - DNA, 2529 bp, synthetic construct
  misc_feature 1..2529: note = Variant of DNA polymerase I from Thermus sp. strain 2.9
  source 1..2529: mol_type = other DNA
atgcaccatcatcatcatcatggcggtagcggcatgttaccgttgttcgaacctaaaggtcgcgtgcttctggttgatggccatcatctcgcgtatcgtaacttctttgccctgaaaggattaaccaccagccgtggcgagccggtacagggtgtctacggctttgcaaagtcgctcctgaaagctctgaaagaagacggtgatgtggtgattgttgtctttgatgcgaaagcgccaagttttcgccacgaagcgtacgaagcttacaaagccgggcgtgctccaacgccggaagactttcctcgccaattggcgcttatgaaggaattagtggatttgcttggcctcgaacgcttggaagttcccggtttcgaggcagacgacgtattagcgactctcgcaaagaaagccgaacgtgagggctatgaagtccagatcttgacagcagatcgcgatcttttccagcttttatctccgcgcatctcggtgttacacccggaagggcatcgtatcaccccggaatggctctgggagaaatatggtttgcgtcccgaacaatgggtggattttcgcgccttagcaggcgatccgagcgacaatattccgggagttaaaggtatcggcgagaagacggcgctcaagctccttaaagaatgggggtcgttggagaacttgcttaagaatttagatcaggtcaaaccagagtcagtgcgtgagaagattcttgcacacctcgaagacctcaaattaagccgcgaattgtcccgtgtacgcaccgatttgccgctcgaagttgatttccgtggccgccgcgaacctgactgggagggtcttaaagcgtttttagagcgtcttgaatttggttcgctcttgcatgaattcggccttttagaaagcccgttaccagccgaagaagcaccttggccaccgcccgaaggcgcgtttttaggttaccgtttgagtcgcccggaaccgatgtgggccgaattactggctcttgcagcgtctgcccaggggcgtgcgtatcgcgcggaagaccctcatggtgcgctccgcggcctcaaagaagtccgtggactccttgccaaagacttagctgttgttgcattgcgcgaaggtcttgatttacctccgactgatgatccaatgcttcttgcgtacctcttggacccgtcaaacacgacgcccgaaggcgtagcccgtcgttacggcggcgagtggaccgaagatgcaggcgagcgcgcgttattggccgaacgtttgcacgccaatttattaggacgtttgcaaggcgaggaacgtctcctctggctttacgaagaagtggagaaaccattgagtcgcgtgctcgcgcatatggaagctaccggtgtcaaattagacgtggcgtatttggagaacctcagccttgaagttgctgccgaaatgcgccgcttggaggaagaagtattccgtttagcaggccactcctttaaccttaattctcgcgatcagttagaacgtgtgttgttcgatgagcttggtctccctcctatcggcaagacagagaagaccggtaaacgtagcacttcagcggcggttttagaagctcttcgcgaagtccatcccattgtggacaagatcttgcagtaccgcgaactcgcgaaattgaaaggcacctatattgaccctcttccggcattagtccacccgaaaacgggacgcctccatacccgcttcaaccaaacagccacggcgaccggtcgtttgtcctcctctgatccaaaccttcagaatattccagtacgtaccccattgggccagaagatccgccgcgcgtttgtagctgaggagggttggcgtttagtggccctcgattatagccaaattgaattacgtgtccttgcccatctttctggcgatgagaacctcatccgcgtgtttcaggaaggcaaagacattcacactcaaacggcaagctggatgtttggattatcagcagaagcgatcgatcctttgatgcgtcgtgcagcgaagaccatcaatttcggtgttctctacggtatgagtgcccatcgtttgtcgcaggaattaggcattccctatgaagaagctgcggcgttcattcagcgctactttcaaagctatcccaaagttaaagcatggatcgagaagactctcgaagaaggccgcacacgtggttacgtagagaccttatttggacgtcgccgctatgttcccgatttaaacgctcgcgtgaaatctgtccgtgaagccgccgaacgcatggcgttcaacatgcctgtacagggcacggcagctgacctcatgaaacttgcaatggtgcgcctttttccacaattgcgtgaagttggtgcccgcatgctcttgcaggtccacgatgaactcttgttagaagcgccaaaagagcgtgcggaagaggtggcagccctcgcgaaagaggttatggaaggcgtgtggcccttagcggtgcctcttgaagtcgaagttggtattggcgaggattggttggctgccaaaggataatga

SEQ ID NO: 1436 - protein, 841 aa, synthetic construct
  REGION 1..841: note = Variant of DNA polymerase I from Thermus sp. strain 2.9
MHHHHHHGGSGMLPLFEPKGRVLLVDGHHLAYRNFFALKGLTTSRGEPVQGVYGFAKSLLKALKEDGDVVIVVFDAKAPSFRHEAYEAYKAGRAPTPEDFPRQLALMKELVDLLGLERLEVPGFEADDVLATLAKKAEREGYEVQILTADRDLFQLLSPRISVLHPEGHRITPEWLWEKYGLRPEQWVDFRALAGDPSDNIPGVKGIGEKTALKLLKEWGSLENLLKNLDQVKPESVREKILAHLEDLKLSRELSRVRTDLPLEVDFRGRREPDWEGLKAFLERLEFGSLLHEFGLLESPLPAEEAPWPPPEGAFLGYRLSRPEPMWAELLALAASAQGRAYRAEDPHGALRGLKEVRGLLAKDLAVVALREGLDLPPTDDPMLLAYLLDPSNTTPEGVARRYGGEWTEDAGERALLAERLHANLLGRLQGEERLLWLYEEVEKPLSRVLAHMEATGVKLDVAYLENLSLEVAAEMRRLEEEVFRLAGHSFNLNSRDQLERVLFDELGLPPIGKTEKTGKRSTSAAVLEALREVHPIVDKILQYRELAKLKGTYIDPLPALVHPKTGRLHTRFNQTATATGRLSSSDPNLQNIPVRTPLGQKIRRAFVAEEGWRLVALDYSQIELRVLAHLSGDENLIRVFQEGKDIHTQTASWMFGLSAEAIDPLMRRAAKTINFGVLYGMSAHRLSQELGIPYEEAAAFIQRYFQSYPKVKAWIEKTLEEGRTRGYVETLFGRRRYVPDLNARVKSVREAAERMAFNMPVQGTAADLMKLAMVRLFPQLREVGARMLLQVHDELLLEAPKERAEEVAALAKEVMEGVWPLAVPLEVEVGIGEDWLAAKG

SEQ ID NO: 1437 - DNA, 2529 bp, synthetic construct
  misc_feature 1..2529: note = Variant of DNA polymerase I from Thermus sp. strain 2.9
  source 1..2529: mol_type = other DNA
atgcaccatcatcatcatcatggcggtagcggcatgttaccgttgttcgaacctaaaggtcgcgtgcttctggttgatggccatcatctcgcgtatcgtaacttctttgccctgaaaggattaaccaccagccgtggcgagccggtacagggtgtctacggctttgcaaagtcgctcctgaaagctctgaaagaagacggtgatgtggtgattgttgtctttgatgcgaaagcgccaagttttcgccacgaagcgtacgaagcttacaaagccgggcgtgctccaacgccggaagactttcctcgccaattggcgcttatgaaggaattagtggatttgcttggcctcgaacgcttggaagttcccggtttcgaggcagacgacgtattagcgactctcgcaaagaaagccgaacgtgagggctatgaagtccagatcttgacagcagatcgcgatcttttccagcttttatctccgcgcatctcggtgttacacccggaagggcatcgtatcaccccggaatggctctgggagaaatatggtttgcgtcccgaacaatgggtggattttcgcgccttagcaggcgatccgagcgacaatattccgggagttaaaggtatcggcgagaagacggcgctcaagctccttaaagaatgggggtcgttggagaacttgcttaagaatttagatcaggtcaaaccagagtcagtgcgtgagaagattcttgcacacctcgaagacctcaaattaagccgcgaattgtcccgtgtacgcaccgatttgccgctcgaagttgatttccgtcgtcgccgcgaacctgactgggagggtcttaaagcgtttttagagcgtcttgaatttggttcgctcttgcatgaattcggccttttagaaagcccgttaccagccgaagaagcaccttggccaccgcccgaaggcgcgtttttaggttaccgtttgagtcgcccggaaccgatgtgggccgaattactggctcttgcagcgtctgcccaggggcgtgtgtatcgcgcggaagaccctcatggtgcgctccgtggcctcaaagaagtccgtggactccttgccaaagacttagctgttgttgcattgcgcgaaggtcttgatttacctccgactgatgatccaatgcttcttgcgtacctcttggacccgtcaaacacgacgcccgaaggcgtagcccgtcgttacggcggcgagtggaccgaagatgcaggcgagcgcgcgttattggccgaacgtttgcacgccaatttattaggacgtttgcaaggcgaggaacgtctcctctggctttacgaagaagtggagaaaccattgagtcgcgtgctcgcgcatatggaagctaccggtgtcaaattagacgtggcgtatttggaggctctcagccttgaagttgctgccgaaatgcgccgcttggaggaagaagtattccgtttagcaggccactcctttaaccttaattctcgcgatcagttagaacgtgtgttgttcgataaccttggtctccctcctatcggcaagacagagaagaccggtaaacgtagcacttcagcggcggttttagaagctcttcgcgaagtccatcccattgtggacaagatcttgcagtaccgcgaactcgcgaaattgaaaggcacctatattgaccctcttccggcattagtccacccgaaaacgggacgcctccatacccgcttcaaccaaacagccacggcgaccggtcgtttgtcctcctctgatccaaaccttcagaatattccagtacgtaccccattgggccagaagatccgccgcgcgtttgtagctgaggagggttggcgtttagtggccctcgattatagccaaattgaattacgtgtccttgcccatctttctggcgatgagaacctcatccgcgtgtttcaggaaggcaaagacattcacactcaaacggcaagctggatgtttggattatcagcagaagcgatcgatcctttgatgcgtcgtgcagcgaagaccattaatttcggtgttctctacggtatgagtgcccatcgtttgtcgcaggaattaggcattccctatgaagaagctgcggcgttcattcagcgctactttcaaagctatcccaaagttaaagcatggatcgagaagactctcgaagaaggccgcacacgtggttacgtagagaccttatttggacgtcgccgctatgttcccgatttaaacgctcgcgtgaaatctgtccgtgaagccgccgaacgcatggcgttcaacatgcctgtacagggcacggcagctgacctcatgaaacttgcaatggtgcgcctttttccacaattgcgtgaagttggtgcccgcatgctcttgcaggtccacgatgaactcttgttagaagcgccaaaagagcgtgcggaagaggtggcagccctcgcgaaagaggttatggaaggcgtgtggcccttagcggtgcctcttgaagtcgaagttggtattggcgaggattggttggctgccaaaggataatga

SEQ ID NO: 1438 - protein, 841 aa, synthetic construct
  REGION 1..841: note = Variant of DNA polymerase I from Thermus sp. strain 2.9
MHHHHHHGGSGMLPLFEPKGRVLLVDGHHLAYRNFFALKGLTTSRGEPVQGVYGFAKSLLKALKEDGDVVIVVFDAKAPSFRHEAYEAYKAGRAPTPEDFPRQLALMKELVDLLGLERLEVPGFEADDVLATLAKKAEREGYEVQILTADRDLFQLLSPRISVLHPEGHRITPEWLWEKYGLRPEQWVDFRALAGDPSDNIPGVKGIGEKTALKLLKEWGSLENLLKNLDQVKPESVREKILAHLEDLKLSRELSRVRTDLPLEVDFRRRREPDWEGLKAFLERLEFGSLLHEFGLLESPLPAEEAPWPPPEGAFLGYRLSRPEPMWAELLALAASAQGRVYRAEDPHGALRGLKEVRGLLAKDLAVVALREGLDLPPTDDPMLLAYLLDPSNTTPEGVARRYGGEWTEDAGERALLAERLHANLLGRLQGEERLLWLYEEVEKPLSRVLAHMEATGVKLDVAYLEALSLEVAAEMRRLEEEVFRLAGHSFNLNSRDQLERVLFDNLGLPPIGKTEKTGKRSTSAAVLEALREVHPIVDKILQYRELAKLKGTYIDPLPALVHPKTGRLHTRFNQTATATGRLSSSDPNLQNIPVRTPLGQKIRRAFVAEEGWRLVALDYSQIELRVLAHLSGDENLIRVFQEGKDIHTQTASWMFGLSAEAIDPLMRRAAKTINFGVLYGMSAHRLSQELGIPYEEAAAFIQRYFQSYPKVKAWIEKTLEEGRTRGYVETLFGRRRYVPDLNARVKSVREAAERMAFNMPVQGTAADLMKLAMVRLFPQLREVGARMLLQVHDELLLEAPKERAEEVAALAKEVMEGVWPLAVPLEVEVGIGEDWLAAKG

SEQ ID NO: 1439 - DNA, 2529 bp, synthetic construct
  misc_feature 1..2529: note = Variant of DNA polymerase I from Thermus sp. strain 2.9
  source 1..2529: mol_type = other DNA
atgcaccatcatcatcatcatggcggtagcggcatgttaccgttgttcgaacctaaaggtcgcgtgcttctggttgatggccatcatctcgcgtatcgtaacttctttgccctgaaaggattaaccaccagccgtggcgagccggtacagggtgtctacggctttgcaaagtcgctcctgaaagctctgaaagaagacggtgatgtggtgattgttgtctttgatgcgaaagcgccaagttttcgccacgaagcgtacgaagcttacaaagccgggcgtgctccaacgccggaagactttcctcgccaattggcgcttatgaaggaattagtggatttgcttggcctcgaacgcttggaagttcccggtttcgaggcagacgacgtattagcgactctcgcaaagaaagccgaacgtgagggctatgaagtccagatcttgacagcagatcgcgatcttttccagcttttatctccgcgcatctcggtgttacacccggaagggcatcgtatcaccccggaatggctctgggagaaatatggtttgcgtcccgaacaatgggtggattttcgcgccttagcaggcgatccgagcgacaatattccgggagttaaaggtatcggcgagaagacggcgctcaagctccttaaagaatgggggtcgttggagaacttgcttaagaatttagatcaggtcaaaccagagtcagtgcgtgagaagattcttgcacacctcgaagacctcaaattaagcctggaattgtcccgtgtacgcaccgatttgccgctcgaagttgatttccgtcgtcgccgcgaacctgactgggagggtcttaaagcgtttttagagcgtcttgaatttggttcgctcttgcatgaattcggccttttagaaagcccgttaccagccgaagaagcaccttggccaccgcccgaaggcgcgtttttaggttaccgtttgagtcgcccggaaccgatgtgggccgaattattggctcttgcagcgtctgcccaggggcgtgtgtatcgcgcggaagaccctcatggtgcgctcaagggcctcaaagaagtccgtggactccttgccaaagacttagctgttgttgcattgcgcgaaggtcttgatttacctccgactgatgatccaatgcttcttgcgtacctcttggacccgtcaaacacgacgcccgaaggcgtagcccgtcgttacggcggcgagtggaccgaagatgcaggcgagcgcgcgttattggccgaacgtttgcacgccaatttattaggacgtttgcaaggcgaggaacgtctcctctggctttacgaagaagtggagaaaccattgagtcgcgtgctcgcgcatatggaagctaccggtgtcaaattagacgtggcgtatttggaggctctcagccttgaagttgctgccgaaatgcgccgcttggaggaagaagtattccgtttagcaggccactcctttaaccttaattctcgcgatcagttagaacgtgtgttgttcgatgaacttggtctccctcctatcggcaagacagagaagaccggtaaacgtagcacttcagcggcggttttagaagctcttcgcgaagtccatcccattgtggacaagatcttgcagtaccgcgaactcgcgaaattgaaaggcacctatattgaccctcttccggcattagtccacccgaaaacgggacgcctccatacccgcttcaaccaaacagccacggcgaccggtcgtttgtcctcctctgatccaaaccttcagaatattccagtacgtaccccattgggccagaagatccgccgcgcgtttgtagctgaggagggttggcgtttagtggccctcgattatagccaaattgaattacgtgtccttgcccatctttctggcgatgagaacctcatccgcgtgtttcaggaaggcaaagacattcacactcaaacggcaagctggatgtttggattatcaccagaagcgatcgatcctttgatgcgtcgtgcagcgaagaccattaatttcggtgttctctacggtatgagtgcccatcgtttgtcgcaggaattaggcattccctatgaagaagctgcggcgttcattcagcgctactttcaaagctatcccaaagttaaagcatggatcgagaagactctcgaagaaggccgcacacgtggttacgtagagaccttatttggacgtcgccgctatgttcccgatttaaacgctcgcgtgaaatctgtccgtgaagccgccgaacgcatggcgttcaacatgcctgtacagggcacggcagctgacctcatgaaacttgcaatggtgcgcctttttccacaattgcgtgaagttggtgcccgcatgctcttgcaggtccacgatgaactcttgttagaagcgccaaaagagcgtgcggaagaggtggcagccctcgcgaaagaggttatggaaggcgtgtggcccttagcggtgcctcttgaagtcgaagttggtattggcgaggattggttggctgccaaaggataatga

SEQ ID NO: 1440 - protein, 841 aa, synthetic construct
  REGION 1..841: note = Variant of DNA polymerase I from Thermus sp. strain 2.9
MHHHHHHGGSGMLPLFEPKGRVLLVDGHHLAYRNFFALKGLTTSRGEPVQGVYGFAKSLLKALKEDGDVVIVVFDAKAPSFRHEAYEAYKAGRAPTPEDFPRQLALMKELVDLLGLERLEVPGFEADDVLATLAKKAEREGYEVQILTADRDLFQLLSPRISVLHPEGHRITPEWLWEKYGLRPEQWVDFRALAGDPSDNIPGVKGIGEKTALKLLKEWGSLENLLKNLDQVKPESVREKILAHLEDLKLSLELSRVRTDLPLEVDFRRRREPDWEGLKAFLERLEFGSLLHEFGLLESPLPAEEAPWPPPEGAFLGYRLSRPEPMWAELLALAASAQGRVYRAEDPHGALKGLKEVRGLLAKDLAVVALREGLDLPPTDDPMLLAYLLDPSNTTPEGVARRYGGEWTEDAGERALLAERLHANLLGRLQGEERLLWLYEEVEKPLSRVLAHMEATGVKLDVAYLEALSLEVAAEMRRLEEEVFRLAGHSFNLNSRDQLERVLFDELGLPPIGKTEKTGKRSTSAAVLEALREVHPIVDKILQYRELAKLKGTYIDPLPALVHPKTGRLHTRFNQTATATGRLSSSDPNLQNIPVRTPLGQKIRRAFVAEEGWRLVALDYSQIELRVLAHLSGDENLIRVFQEGKDIHTQTASWMFGLSPEAIDPLMRRAAKTINFGVLYGMSAHRLSQELGIPYEEAAAFIQRYFQSYPKVKAWIEKTLEEGRTRGYVETLFGRRRYVPDLNARVKSVREAAERMAFNMPVQGTAADLMKLAMVRLFPQLREVGARMLLQVHDELLLEAPKERAEEVAALAKEVMEGVWPLAVPLEVEVGIGEDWLAAKG

SEQ ID NO: 1441 - DNA, 2529 bp, synthetic construct
  misc_feature 1..2529: note = Variant of DNA polymerase I from Thermus sp. strain 2.9
  source 1..2529: mol_type = other DNA
atgcaccaccatcatcatcatggcggtagcggcatgttaccgttgttcgaacctaaaggtcgcgtgcttctggttgatggccatcatctcgcgtatcgtaacttctttgccctgaaaggattaaccaccagccgtggcgagccggtacagggtgtctacggctttgcaaagtcgctcctgaaagctctgaaagaagacggtgatgtggtgattgttgtctttgatgcgaaagcgccaagttttcgccacgaagcgtacgaagcttacaaagccgggcgtgctccaacgccggaagactttcctcgccaattggcgcttatgaaggaattagtggatttgcttggcctcgaacgcttggaagttcccggtttcgaggcagacgacgtattagcgactctcgcaaagaaagccgaacgtgagggctatgaagtccagatcttgacagcagatcgcgatcttttccagcttttatctccgcgcatctcggtgttacacccggaagggcatcgtatcaccccggaatggctctgggagaaatatggtttgcgtcccgaacaatgggtggattttcgcgccttagcaggcgatccgagcgacaatattccgggagttaaaggtatcggcgagaagacggcgctcaagctccttaaagaatgggggtcgttggagaacttgcttaagaatttagatcaggtcaaaccagagtcagtgcgtgagaagattcttgcacacctcgaagacctcaaattaagccgcgaattgtcccgtgtacgcaccgatttgccgctcgaagttgatttccgtggccgccgcgaacctgactgggagggtcttaaagcgtttttagagcgtcttgaatttggttcgctcttgcatgaattcggccttttagaaagcccgttaccagccgaagaagcaccttggccaccgcccgaaggcgcgtttttaggttaccgtttgagtcgcccggaaccgatgtgggccgaattattggctcttgcagcgtctgcccagggacgtgtgtatcgcgcggaagaccctcatggtgcgctccgcggcctcaaagaagtccgtggactccttgccaaagacttagctgttgttgcattgcgcgaaggtcttgatttacctccgactgatgatccaatgcttcttgcgtacctcttggacccgtcaaacacgacgcccgaaggcgtagcccgtcgttacggcggcgagtggaccgaagatgcaggcgagcgcgcgttattggccgaacgtttgcacgccaatttattaggacgtttgcaaggcgaggaacgtctcctctggctttacgaagaagtggagaaaccattgagtcgcgtgctcgcgcatatggaagctaccggtgtcaaattagacgtggcgtatttggaggcactcagccttgaagttgctgccgaaatgcgccgcttggaggaagaagtattccgtttagcaggccactcctttaaccttaattctcgcgatcagttagaacgtgtgttgttcgatgaacttggtctccctcctatcggcaagacagagaagaccggtaaacgtagcacttcagcggcggttttagaagctcttcgcgaagtccatcccattgtggacaagatcttgcagtaccgcgaactcgcgaaattgaaaggcacctatattgaccctcttccggcattagtccacccgaaaacgggacgcctccatacccgcttcaaccaaacagccacggcgaccggtcgtttgtcctcctctgatccaaaccttcagaatattccagtacgtaccctgttgggccagaagatccgccgcgcgtttgtagctgaggagggttggcgtttagtggccctcgattatagccaaattgaattacgtgtccttgcccatctttctggcgatgagaacctcatccgcgtgtttcaggaaggcaaagacattcacactcaaacggcaagctggatgtttggattatcagctgaagcgatcgatcctttgatgcgtcgtgcagcgaagaccatcaatttcggtgttctctacggtatgagtgcccatcgtttgtcgcaggaattaggcattccctatgaagaagctgcggcgttcattcagcgctactttcaaagctatcccaaagttaaagcatggatcgagaagactctcgaagaaggccgcacacgtggttacgtagagaccttatttggacgtcgccgctatgttcccgatttaaacgctcgcgtgaaatctgtccgtgaagccgccgaacgcatggcgttcaacatgcctgtacagggcacggcagctgacctcatgaaacttgcaatggtgcgcctttttccacaattgcgtgaagttggtgcccgcatgctcttgcaggtccacgatgaactcttgttagaagcgccaaaagagcgtgcggaagaggtggcagccctcgcgaaagaggttatggaaggcgtgtggcccttagcggtgcctcttgaagtcgaagttggtattggcgaggattggttggctgccaaaggataatga

SEQ ID NO: 1442 - protein, 841 aa, synthetic construct
  REGION 1..841: note = Variant of DNA polymerase I from Thermus sp. strain 2.9
MHHHHHHGGSGMLPLFEPKGRVLLVDGHHLAYRNFFALKGLTTSRGEPVQGVYGFAKSLLKALKEDGDVVIVVFDAKAPSFRHEAYEAYKAGRAPTPEDFPRQLALMKELVDLLGLERLEVPGFEADDVLATLAKKAEREGYEVQILTADRDLFQLLSPRISVLHPEGHRITPEWLWEKYGLRPEQWVDFRALAGDPSDNIPGVKGIGEKTALKLLKEWGSLENLLKNLDQVKPESVREKILAHLEDLKLSRELSRVRTDLPLEVDFRGRREPDWEGLKAFLERLEFGSLLHEFGLLESPLPAEEAPWPPPEGAFLGYRLSRPEPMWAELLALAASAQGRVYRAEDPHGALRGLKEVRGLLAKDLAVVALREGLDLPPTDDPMLLAYLLDPSNTTPEGVARRYGGEWTEDAGERALLAERLHANLLGRLQGEERLLWLYEEVEKPLSRVLAHMEATGVKLDVAYLEALSLEVAAEMRRLEEEVFRLAGHSFNLNSRDQLERVLFDELGLPPIGKTEKTGKRSTSAAVLEALREVHPIVDKILQYRELAKLKGTYIDPLPALVHPKTGRLHTRFNQTATATGRLSSSDPNLQNIPVRTLLGQKIRRAFVAEEGWRLVALDYSQIELRVLAHLSGDENLIRVFQEGKDIHTQTASWMFGLSAEAIDPLMRRAAKTINFGVLYGMSAHRLSQELGIPYEEAAAFIQRYFQSYPKVKAWIEKTLEEGRTRGYVETLFGRRRYVPDLNARVKSVREAAERMAFNMPVQGTAADLMKLAMVRLFPQLREVGARMLLQVHDELLLEAPKERAEEVAALAKEVMEGVWPLAVPLEVEVGIGEDWLAAKG

SEQ ID NO: 1443 - DNA, 2529 bp, synthetic construct
  misc_feature 1..2529: note = Variant of DNA polymerase I from Thermus sp. strain 2.9
  source 1..2529: mol_type = other DNA
atgcaccatcatcatcatcatggcggtagcggcatgttaccgttgttcgaacctaaaggtcgcgtgcttctggttgatggccatcatctcgcgtatcgtaacttctttgccctgaaaggattaaccaccagccgtggcgagccggtacagggtgtctacggctttgcaaagtcgctcctgaaagctctgaaagaagacggtgatgtggtgattgttgtctttgatgcgaaagcgccaagttttcgccacgaagcgtacgaagcttacaaagccgggcgtgctccaacgccggaagactttcctcgccaattggcgcttatgaaggaattagtggatttgcttggcctcgaacgcttggaagttcccggtttcgaggcagacgacgtattagcgactctcgcaaagaaagccgaacgtgagggctatgaagtccagatcttgacagcagatcgcgatcttttccagcttttatctccgcgcatctcggtgttacacccggaagggcatcgtatcaccccggaatggctctgggagaaatatggtttgcgtcccgaacaatgggtggattttcgcgccttagcaggcgatccgagcgacaatattccgggagttaaaggtatcggcgagaagacggcgctcaagctccttaaagaatgggggtcgttggagaacttgcttaagaatttagatcaggtcaaaccagagtcagtgcgtgagaagattcttgcacacctcgaagacctcaaattaagccgcgaattgtcccgtgtacgcaccgatttgccgctcgaagttgatttccgtggtcgccgcgaacctgactgggagggtcttaaagcgtttttagagcgtcttgaatttggttcgctcttgcatgaattcggccttttagaaagcccgttaccagccgaagaagcaccttggccaccgcccgaaggcgcgtttttaggttaccgtttgagtcgcccggaaccgatgtgggccgaattatcggctcttgcagcgtctgcccagggacgtgtgtatcgcgcggaagaccctcatggtgcgctccgcggcctcaaagaagtccgtggactccttgccaaagacttagctgttgttgcattgcgcgaaggtcttgatttacctccgactgatgatccaatgcttcttgcgtacctcttggacccgtcaaacacgacgcccgaaggcgtagcccgtcgttacggcggcgagtggaccgaagatgcaggcgagcgcgcgttattggccgaacgtttgcacgccaatttattaggacgtttgcaaggcgaggaacgtctcctctggctttacgaagaagtggagaaaccattgagtcgcgtgctcgcgcatatggaagctaccggtgtcaaattagacgtggcgtatttggagaacctcagccttgaagttgctgccgaaatgcgccgcttggaggaagaagtattccgtttagcaggccactcctttaaccttaattctcgcgatcagttagaacgtgtgttgttcgataaccttggtctccctcctatcggcaagacagagaagaccggtaaacgtagcacttcagcggcggttttagaagctcttcgcgaagtccatcccattgtggacaagatcttgcagtaccgcgaactcgcgaaattgaaaggcacctatattgaccctcttccggcattagtccacccgaaaacgggacgcctccatacccgcttcaaccaaacagccacggcgaccggtcgtttgtcctcctctgatccaaaccttcagaatattccagtacgtaccccattgggccagaagatccgccgcgcgtttgtagctgaggagggttggcgtttagtggccctcgattatagccaaattgaattacgtgtccttgcccatctttctggcgatgagaacctcatccgcgtgtttcaggaaggcaaagacattcacactcaaacggcaagctggatgtttggattatcagcagaagcgatcgatcctttgatgcgtcgtgcagcgaagaccattaatttcggtgttctctacggtatgagtgcccatcgtttgtcgcaggaattaggcattccctatgaagaagctgcggcgttcattcagcgctactttcaaagctatcccaaagttaaagcatggatcgagaagactctcgaagaaggccgcacacgtggttacgtagagaccttatttggacgtcgccgctatgttcccgatttaaacgctcgcgtgaaatctgtccgtgaagccgccgaacgcatggcgttcaacatgcctgtacagggcacggcagctgacctcatgaaacttgcaatggtgcgcctttttccacaattgcgtgaagttggtgcccgcatgctcttgcaggtccacgatgaactcttgttagaagcgccaaaagagcgtgcggaagaggtggcagccctcgcgaaagaggttatggaaggcgtgtggcccttagcggtgcctcttgaagtcgaagttggtattggcgaggattggttggctgccaaaggataatga

SEQ ID NO: 1444 - protein, 841 aa, synthetic construct
  REGION 1..841: note = Variant of DNA polymerase I from Thermus sp. strain 2.9
MHHHHHHGGSGMLPLFEPKGRVLLVDGHHLAYRNFFALKGLTTSRGEPVQGVYGFAKSLLKALKEDGDVVIVVFDAKAPSFRHEAYEAYKAGRAPTPEDFPRQLALMKELVDLLGLERLEVPGFEADDVLATLAKKAEREGYEVQILTADRDLFQLLSPRISVLHPEGHRITPEWLWEKYGLRPEQWVDFRALAGDPSDNIPGVKGIGEKTALKLLKEWGSLENLLKNLDQVKPESVREKILAHLEDLKLSRELSRVRTDLPLEVDFRGRREPDWEGLKAFLERLEFGSLLHEFGLLESPLPAEEAPWPPPEGAFLGYRLSRPEPMWAELSALAASAQGRVYRAEDPHGALRGLKEVRGLLAKDLAVVALREGLDLPPTDDPMLLAYLLDPSNTTPEGVARRYGGEWTEDAGERALLAERLHANLLGRLQGEERLLWLYEEVEKPLSRVLAHMEATGVKLDVAYLENLSLEVAAEMRRLEEEVFRLAGHSFNLNSRDQLERVLFDNLGLPPIGKTEKTGKRSTSAAVLEALREVHPIVDKILQYRELAKLKGTYIDPLPALVHPKTGRLHTRFNQTATATGRLSSSDPNLQNIPVRTPLGQKIRRAFVAEEGWRLVALDYSQIELRVLAHLSGDENLIRVFQEGKDIHTQTASWMFGLSAEAIDPLMRRAAKTINFGVLYGMSAHRLSQELGIPYEEAAAFIQRYFQSYPKVKAWIEKTLEEGRTRGYVETLFGRRRYVPDLNARVKSVREAAERMAFNMPVQGTAADLMKLAMVRLFPQLREVGARMLLQVHDELLLEAPKERAEEVAALAKEVMEGVWPLAVPLEVEVGIGEDWLAAKG

SEQ ID NO: 1445 - DNA, 2529 bp, synthetic construct
  misc_feature 1..2529: note = Variant of DNA polymerase I from Thermus sp. strain 2.9
  source 1..2529: mol_type = other DNA
atgcaccatcatcatcatcatggcggtagcggcatgttaccgttgttcgaacctaaaggtcgcgtgcttctggttgatggccatcatctcgcgtatcgtaacttctttgccctgaaaggattaaccaccagccgtggcgagccggtacagggtgtctacggctttgcaaagtcgctcctgaaagctctgaaagaagacggtgatgtggtgattgttgtctttgatgcgaaagcgccaagttttcgccacgaagcgtacgaagcttacaaagccgggcgtgctccaacgccggaagactttcctcgccaattggcgcttatgaaggaattagtggatttgcttggcctcgaacgcttggaagttcccggtttcgaggcagacgacgtattagcgactctcgcaaagaaagccgaacgtgagggctatgaagtccagatcttgacagcagatcgcgatcttttccagcttttatctccgcgcatctcggtgttacacccggaagggcatcgtatcaccccggaatggctctgggagaaatatggtttgcgtcccgaacaatgggtggattttcgcgccttagcaggcgatccgagcgacaatattccgggagttaaaggtatcggcgagaagacggcgctcaagctccttaaagaatgggggtcgttggagaacttgcttaagaatttagatcaggtcaaaccagagtcagtgcgtgagaagattcttgcacacctcgaagacctcaaattaagccgcgaattgtcccgtgtacgcaccgatttgccgctcgaagttgatttcggtggccgccgcgaacctgactgggagggtcttaaagcgtttttagagcgtcttgaatttggttcgctcttgcatgaattcggccttttagaaagcccgttaccagccgaagaagcaccttggccaccgcccgaaggcgcgtttttaggttaccgtttgagtcgcccggaaccgatgtgggccgaattattggctcttgcagcgtctgcccagggacgtgtgtatcgcgcggaagaccctcatggtgcgctccgcggcctcaaagaagtccgtggactccttgccaaagacttagctgttgttgcattgcgcgaaggtcttgatttacctccgactgatgatccaatgcttcttgcgtacctcttggacccgtcaaacacgacgcccgaaggcgtagcccgtcgttacggcggcgagtggaccgaagatgcaggcgagcgcgcgttattggccgaacgtttgcacgccaatttattaggacgtttgcaaggcgaggaacgtctcctctggctttacgaagaagtggagaaaccattgagtcgcgtgctcgcgcatatggaagctaccggtgtcaaattagacgtggcgtatttggaggcactcagccttgaagttgctgccgaaatgcgccgcttggaggaagaagtattccgtttagcaggccactcctttaaccttaattctcgcgatcagttagaacgtgtgttgttcgatgaacttggtctccctcctatcggcaagacagagaagaccggtaaacgtagcacttcagcggcggttttagaagctcttcgcgaagtccatcccattgtggacaagatcttgcagtaccgcgaactcgcgaaattgaaaggcacctatattgaccctcttccggcattagtccacccgaaaacgggacgcctccatacccgcttcaaccaaacagccacggcgaccggtcgtttgtcctcctctgatccaaaccttcagaatattccagtacgtaccccattgggccagaagatccgccgcgcgtttgtagctgaggagggttggcgtttagtggccctcgattatagccaaattgaattacgtgtccttgcccatctttctggcgatgagaacctcatccgcgtgtttcaggaaggcaaagacattcacactcaaacggcaagctggatgtttggattatcagctgaagcgatcgatcctttgatgcgtcgtgcagcgaagaccatcaatttcggtgttctctacggtatgagtgcccatcgtttgtcgcaggaattaggcattccctatgaagaagctgcggcgttcattcagcgctactttcaaagctatcccaaagttaaagcatggatcgagaagactctcgaagaaggccgcacacgtggttacgtagagaccttatttggacgtcgccgctatgttcccgatttaaacgctcgcgtgaaatctgtccgtgaagccgccgaacgcatggcgttcaacatgcctgtacagggcacggcagctgacctcatgaaacttgcaatggtgcgcctttttccacaattgcgtgaagttggtgcccgcatgctcttgcaggtccacgatgaactcttgttagaagcgccaaaagagcgtgcggaagaggtggcagccctcgcgaaagaggttatggaaggcgtgtggcccttagcggtgcctcttgaagtcgaagttggtattggcgaggattggttggctgccaaaggataatga

SEQ ID NO: 1446 - protein, 841 aa, synthetic construct
  REGION 1..841: note = Variant of DNA polymerase I from Thermus sp. strain 2.9
MHHHHHHGGSGMLPLFEPKGRVLLVDGHHLAYRNFFALKGLTTSRGEPVQGVYGFAKSLLKALKEDGDVVIVVFDAKAPSFRHEAYEAYKAGRAPTPEDFPRQLALMKELVDLLGLERLEVPGFEADDVLATLAKKAEREGYEVQILTADRDLFQLLSPRISVLHPEGHRITPEWLWEKYGLRPEQWVDFRALAGDPSDNIPGVKGIGEKTALKLLKEWGSLENLLKNLDQVKPESVREKILAHLEDLKLSRELSRVRTDLPLEVDFGGRREPDWEGLKAFLERLEFGSLLHEFGLLESPLPAEEAPWPPPEGAFLGYRLSRPEPMWAELLALAASAQGRVYRAEDPHGALRGLKEVRGLLAKDLAVVALREGLDLPPTDDPMLLAYLLDPSNTTPEGVARRYGGEWTEDAGERALLAERLHANLLGRLQGEERLLWLYEEVEKPLSRVLAHMEATGVKLDVAYLEALSLEVAAEMRRLEEEVFRLAGHSFNLNSRDQLERVLFDELGLPPIGKTEKTGKRSTSAAVLEALREVHPIVDKILQYRELAKLKGTYIDPLPALVHPKTGRLHTRFNQTATATGRLSSSDPNLQNIPVRTPLGQKIRRAFVAEEGWRLVALDYSQIELRVLAHLSGDENLIRVFQEGKDIHTQTASWMFGLSAEAIDPLMRRAAKTINFGVLYGMSAHRLSQELGIPYEEAAAFIQRYFQSYPKVKAWIEKTLEEGRTRGYVETLFGRRRYVPDLNARVKSVREAAERMAFNMPVQGTAADLMKLAMVRLFPQLREVGARMLLQVHDELLLEAPKERAEEVAALAKEVMEGVWPLAVPLEVEVGIGEDWLAAKG

SEQ ID NO: 1447 - DNA, 2529 bp, synthetic construct
  misc_feature 1..2529: note = Variant of DNA polymerase I from Thermus sp. strain 2.9
  source 1..2529: mol_type = other DNA
atgcaccatcatcatcatcatggcggtagcggcatgttaccgttgttcgaacctaaaggtcgcgtgcttctggttgatggccatcatctcgcgtatcgtaacttctttgccctgaaaggattaaccaccagccgtggcgagccggtacagggtgtctacggctttgcaaagtcgctcctgaaagctctgaaagaagacggtgatgtggtgattgttgtctttgatgcgaaagcgccaagttttcgccacgaagcgtacgaagcttacaaagccgggcgtgctccaacgccggaagactttcctcgccaattggcgcttatgaaggaattagtggatttgcttggcctcgaacgcttggaagttcccggtttcgaggcagacgacgtattagcgactctcgcaaagaaagccgaacgtgagggctatgaagtccagatcttgacagcagatcgcgatcttttccagcttttatctccgcgcatctcggtgttacacccggaagggcatcgtatcaccccggaatggctctgggagaaatatggtttgcgtcccgaacaatgggtggattttcgcgccttagcaggcgatccgagcgacaatattccgggagttaaaggtatcggcgagaagacggcgctcaagctccttaaagaatgggggtcgttggagaacttgcttaagaatttagatcaggtcaaaccagagtcagtgcgtgagaagattcttgcacacctcgaagacctcaaattaagccgcgaattgtcccgtgtacgcaccgatttgccgctcgaagttgatttccgtggccgccgcgaacctgactgggagggtcttaaagcgtttttagagcgtcttgaatttggttcgctcttgcatgaattcggccttttagaaagcccgttaccagccgaagaagcaccttggccaccgcccgaaggcgcgtttttaggttaccgtttgagtcgcccggaaccgatgtgggccgaattattggctcttgcagcgtctgcccagggacgtgtgtatcgcgcggaagaccctcatggtgcgctccgcggcctcaaagaagtccgtggactccttgccaaagacttagctgttgttgcattgcgcgaaggtcttgatttacctccgactgatgatccaatgcttcttgcgtacctcttggacccgtcaaacacgacgcccgaaggcgtagcccgtcgttacggcggcgagtggaccgaagatgcaggcgagcgcgcgttattggccgaacgtttgcacgccaatttattaggacgtttgcaaggcgaggaacgtctcctctggctttacgaagaagtggagaaaccattgagtcgcgtgctcgcgcatatggaagctaccggtgtcaaattagacgtggcgtatttggaggcactcagccttgaagttgctgccgaaatgcgccgcttggaggaagaagtattcatgttagcaggccactcctttaaccttaattctcgcgatcagttagaacgtgtgttgttcgatgaacttggtctccctcctatcggcaagacagagaagaccggtaaacgtagcacttcagcggcggttttagaagctcttcgcgaagtccatcccattgtggacaagatcttgcagtaccgcgaactcgcgaaattgaaaggcacctatattgaccctcttccggcattagtccacccgaaaacgggacgcctccatacccgcttcaaccaaacagccacggcgaccggtcgtttgtcctcctctgatccaaaccttcagaatattccagtacgtaccccattgggccagaagatccgccgcgcgtttgtagctgaggagggttggcgtttagtggccctcgattatagccaaattgaattacgtgtccttgcccatctttctggcgatgagaacctcatccgcgtgtttcaggaaggcaaagacattcacactcaaacggcaagctggatgtttggattatcagctgaagcgatcgatcctttgatgcgtcgtgcagcgaagaccatcaatttcggtgttctctacggtatgagtgcccatcgtttgtcgcaggaattaggcattccctatgaagaagctgcggcgttcattcagcgctactttcaaagctatcccaaagttaaagcatggatcgagaagactctcgaagaaggccgcacacgtggttacgtagagaccttatttggacgtcgccgctatgttcccgatttaaacgctcgcgtgaaatctgtccgtgaagccgccgaacgcatggcgttcaacatgcctgtacagggcacggcagctgacctcatgaaacttgcaatggtgcgcctttttccacaattgcgtgaagttggtgcccgcatgctcttgcaggtccacgatgaactcttgttagaagcgccaaaagagcgtgcggaagaggtggcagccctcgcgaaagaggttatggaaggcgtgtggcccttagcggtgcctcttgaagtcgaagttggtattggcgaggattggttggctgccaaaggataatga

SEQ ID NO: 1448 - protein, 841 aa, synthetic construct
  REGION 1..841: note = Variant of DNA polymerase I from Thermus sp. strain 2.9
MHHHHHHGGSGMLPLFEPKGRVLLVDGHHLAYRNFFALKGLTTSRGEPVQGVYGFAKSLLKALKEDGDVVIVVFDAKAPSFRHEAYEAYKAGRAPTPEDFPRQLALMKELVDLLGLERLEVPGFEADDVLATLAKKAEREGYEVQILTADRDLFQLLSPRISVLHPEGHRITPEWLWEKYGLRPEQWVDFRALAGDPSDNIPGVKGIGEKTALKLLKEWGSLENLLKNLDQVKPESVREKILAHLEDLKLSRELSRVRTDLPLEVDFRGRREPDWEGLKAFLERLEFGSLLHEFGLLESPLPAEEAPWPPPEGAFLGYRLSRPEPMWAELLALAASAQGRVYRAEDPHGALRGLKEVRGLLAKDLAVVALREGLDLPPTDDPMLLAYLLDPSNTTPEGVARRYGGEWTEDAGERALLAERLHANLLGRLQGEERLLWLYEEVEKPLSRVLAHMEATGVKLDVAYLEALSLEVAAEMRRLEEEVFMLAGHSFNLNSRDQLERVLFDELGLPPIGKTEKTGKRSTSAAVLEALREVHPIVDKILQYRELAKLKGTYIDPLPALVHPKTGRLHTRFNQTATATGRLSSSDPNLQNIPVRTPLGQKIRRAFVAEEGWRLVALDYSQIELRVLAHLSGDENLIRVFQEGKDIHTQTASWMFGLSAEAIDPLMRRAAKTINFGVLYGMSAHRLSQELGIPYEEAAAFIQRYFQSYPKVKAWIEKTLEEGRTRGYVETLFGRRRYVPDLNARVKSVREAAERMAFNMPVQGTAADLMKLAMVRLFPQLREVGARMLLQVHDELLLEAPKERAEEVAALAKEVMEGVWPLAVPLEVEVGIGEDWLAAKG

SEQ ID NO: 1449 - DNA, 2529 bp, synthetic construct
  misc_feature 1..2529: note = Variant of DNA polymerase I from Thermus sp. strain 2.9
  source 1..2529: mol_type = other DNA
atgcaccatcatcatcatcatggcggtagcggcatgttaccgttgttcgaacctaaaggtcgcgtgcttctggttgatggccatcatctcgcgtatcgtaacttctttgccctgaaaggattaaccaccagccgtggcgagccggtacagggtgtctacggctttgcaaagtcgctcctgaaagctctgaaagaagacggtgatgtggtgattgttgtctttgatgcgaaagcgccaagttttcgccacgaagcgtacgaagcttacaaagccgggcgtgctccaacgccggaagactttcctcgccaattggcgcttatgaaggaattagtggatttgcttggcctcgaacgcttggaagttcccggtttcgaggcagacgacgtattagcgactctcgcaaagaaagccgaacgtgagggctatgaagtccagatcttgacagcagatcgcgatcttttccagcttttatctccgcgcatctcggtgttacacccggaagggcatcgtatcaccccggaatggctctgggagaaatatggtttgcgtcccgaacaatgggtggattttcgcgccttagcaggcgatccgagcgacaatattccgggagttaaaggtatcggcgagaagacggcgctcaagctccttaaagaatgggggtcgttggagaacttgcttaagaatttagatcaggtcaaaccagagtcagtgcgtgagaagattcttgcacacctcgaagacctcaaattaagccgcgaattgtcccgtgtacgcaccgatttgccgctcgaagttgatttccgtcgtcgccgcgaacctgactgggagggtcttaaagcgtttttagagcgtcttgaatttggttcgctcttgcatgaattcggccttttagaaagcccgttaccagccgaagaagcaccttggccaccgcccgaaggcgcgtttttaggttaccgtttgagtcgcccggaaccgatgtgggccgaattattggctcttgcagcgtctgcccaggagcgtgtgtatcgcgcggaagaccctcatggtgcgctccgcggcctcaaagaagtccgtggactccttgccaaagacttagctgttgttgcattgcgcgaaggtcttgatttacctccgactgatgatccaatgcttcttgcgtacctcttggacccgtcaaacacgacgcccgaaggcgtagcccgtcgttacggcggcgagtggaccgaagatgcaggcgagcgcgcgttattggccgaacgtttgcacgccaatttattaggacgtttgcaaggcgaggaacgtctcctctggctttacgaagaagtggagaaaccattgagtcgcgtgctcgcgcatatggaagctaccggtgtcaaattagacgtggcgtatttggaggctctcagccttgaagttgctgccgaaatgcgccgcttggaggaagaagtattccgtttagcaggccactcctttaaccttaattctcgcgatcagttagaacgtgtgttgttcgataaccttggtctccctcctatcggcaagacagagaagaccggtaaacgtagcacttcagcggcggttttagaagctcttcgcgaagtccatcccattgtggacaagatcttgcagtaccgcgaactcgcgaaattgaaaggcacctatattgaccctcttccggcattagtccacccgaaaacgggacgcctccatacccgcttcaaccaaacagccacggcgaccggtcgtttgtcctcctctgatccaaaccttcagaatattccagtacgtaccccattgggccagaagatccgccgcgcgtttgtagctgaggagggttggcgtttagtggccctcgattatagccaaattgaattacgtgtccttgcccatctttctggcgatgagaacctcatccgcgtgtttcaggaaggcaaagacattcacactcaaacggcaagctggatgtttggattatcagcagaagcgatcgatcctttgatgcgtcgtgcagcgaagaccattaatttcggtgttctctacggtatgagtgcccatcgtttgtcgcaggaattaggcattccctatgaagaagctgccgcgttcattcagaagtactttcaaagctatcccaaagttaaagcatggatcgagaagactctcgaagaaggccgcacacgtggttacgtagagaccttatttggacgtcgccgctatgttcccgatttaaacgctcgcgtgaaatctgtccgtgaagccgccgaacgcatggcgttcaacatgcctgtacagggcacggcagctgacctcatgaaacttgcaatggtgcgcctttttccacaattgcgtgaagttggtgcccgcatgctcttgcaggtccacgatgaactcttgttagaagcgccaaaagagcgtgcggaagaggtggcagccctcgcgaaagaggttatggaaggcgtgtggcccttagcggtgcctcttgaagtcgaagttggtattggcgaggattggttggctgccaaaggataatga

SEQ ID NO: 1450 - protein, 841 aa, synthetic construct
  REGION 1..841: note = Variant of DNA polymerase I from Thermus sp. strain 2.9
MHHHHHHGGSGMLPLFEPKGRVLLVDGHHLAYRNFFALKGLTTSRGEPVQGVYGFAKSLLKALKEDGDVVIVVFDAKAPSFRHEAYEAYKAGRAPTPEDFPRQLALMKELVDLLGLERLEVPGFEADDVLATLAKKAEREGYEVQILTADRDLFQLLSPRISVLHPEGHRITPEWLWEKYGLRPEQWVDFRALAGDPSDNIPGVKGIGEKTALKLLKEWGSLENLLKNLDQVKPESVREKILAHLEDLKLSRELSRVRTDLPLEVDFRRRREPDWEGLKAFLERLEFGSLLHEFGLLESPLPAEEAPWPPPEGAFLGYRLSRPEPMWAELLALAASAQERVYRAEDPHGALRGLKEVRGLLAKDLAVVALREGLDLPPTDDPMLLAYLLDPSNTTPEGVARRYGGEWTEDAGERALLAERLHANLLGRLQGEERLLWLYEEVEKPLSRVLAHMEATGVKLDVAYLEALSLEVAAEMRRLEEEVFRLAGHSFNLNSRDQLERVLFDNLGLPPIGKTEKTGKRSTSAAVLEALREVHPIVDKILQYRELAKLKGTYIDPLPALVHPKTGRLHTRFNQTATATGRLSSSDPNLQNIPVRTPLGQKIRRAFVAEEGWRLVALDYSQIELRVLAHLSGDENLIRVFQEGKDIHTQTASWMFGLSAEAIDPLMRRAAKTINFGVLYGMSAHRLSQELGIPYEEAAAFIQKYFQSYPKVKAWIEKTLEEGRTRGYVETLFGRRRYVPDLNARVKSVREAAERMAFNMPVQGTAADLMKLAMVRLFPQLREVGARMLLQVHDELLLEAPKERAEEVAALAKEVMEGVWPLAVPLEVEVGIGEDWLAAKG

SEQ ID NO: 1451 - DNA, 2529 bp, synthetic construct
  misc_feature 1..2529: note = Variant of DNA polymerase I from Thermus sp. strain 2.9
  source 1..2529: mol_type = other DNA
atgcaccatcatcatcatcatggcggtagcggcatgttaccgttgttcgaacctaaaggtcgcgtgcttctggttgatggccatcatctcgcgtatcgtaacttctttgccctgaaaggattaaccaccagccgtggcgagccggtacagggtgtctacggctttgcaaagtcgctcctgaaagctctgaaagaagacggtgatgtggtgattgttgtctttgatgcgaaagcgccaagttttcgccacgaagcgtacgaagcttacaaagccgggcgtgctggtacgccggaagactttcctcgccaattggcgcttatgaaggaattagtggatttgcttggcctcgaacgcttggaagttcccggtttcgaggcagacgacgtattagcgactctcgcaaagaaagccgaacgtgagggctatgaagtccagatcttgacagcagatcgcgatcttttccagcttttatctccgcgcatctcggtgttacacccggaagggcatcgtatcaccccggaatggctctgggagaaatatggtttgcgtcccgaacaatgggtggattttcgcgccttagcaggcgatccgagcgacaatattccgggagttaaaggtatcggcgagaagacggcgctcaagctccttaaagaatgggggtcgttggagaacttgcttaagaatttagatcaggtcaaaccagagtcagtgcgtgagaagattcttgcacacctcgaagacctcaaattaagccgcgaattgtcccgtgtacgcaccgatttgccgctcgaagttgatttccgtggccgccgcgaacctgactgggagggtcttaaagcgtttttagagcgtcttgaatttggttcgctcttgcatgaattcggccttttagaaagcccgttaccagccgaagaagcaccttggccaccgcccgaaggcgcgtttttaggttaccgtttgagtcgcccggaaccgatgtgggccgaattattggctcttgcagcgtctgcccagggacgtgtgtatcgcgcggaagaccctcatggtgcgctccgcggcctcaaagaagtccgtggactccttgccaaagacttagctgttgttgcattgcgcgaaggtcttgatttacctccgactgatgatccaatgcttcttgcgtacctcttggacccgtcaaacacgacgcccgaaggcgtagcccgtcgttacggcggcgagtggaccgaagatgcaggcgagcgcgcgttattggccgaacgtttgcacgccaatttattaggacgtttgcaaggcgaggaacgtctcctctggctttacgaagaagtggagaaaccattgagtcgcgtgctcgcgcatatggaagctaccggtgtcaaattagacgtggcgtatttggaggcactcagccttgaagttgctgccgaaatgcgccgcttggaggaagaagtattccgtttagcaggccactcctttaaccttaattctcgcgatcagttagaacgtgtgttgttcgatgaacttggtctccctcctatcggcaagacagagaagaccggtaaacgtagcacttcagcggcggttttagaagctcttcgcgaagtccatcccattgtggacaagatcttgcagtaccgcgaactcgcgaaattgaaaggcacctatattgaccctcttccggcattagtccacccgaaaacgggacgcctccatacccgcttcaaccaaacagccacggcgaccggtcgtttgtcctcctctgatccaaaccttcagaatattccagtacgtaccccattgggccagaagatccgccgcgcgtttgtagctgaggagggttggcgtttagtggccctcgattatagccaaattgaattacgtgtccttgcccatctttctggcgatgagaacctcatccgcgtgtttcaggaaggcaaagacattcacactcaaacggcaagctggatgtttggattatcagctgaagcgatcgatcctttgatgcgtcgtgcagcgaagaccatcaatttcggtgttctctacggtatgagtgcccatcgtttgtcgcaggaattaggcattccctatgaagaagctgcggcgttcattcagcgctactttcaaagctatcccaaagttaaagcatggatcgagaagactctcgaagaaggccgcacacgtggttacgtagagaccttatttggacgtcgccgctatgttcccgatttaaacgctcgcgtgaaatctgtccgtgaagccgccgaacgcatggcgttcaacatgcctgtacagggcacggcagctgacctcatgaaacttgcaatggtgcgcctttttccacaattgcgtgaagttggtgcccgcatgctcttgcaggtccacgatgaactcttgttagaagcgccaaaagagcgtgcggaagaggtggcagccctcgcgaaagaggttatggaaggcgtgtggcccttagcggtgcctcttgaagtcgaagttggtattggcgaggattggttggctgccaaaggataatga

SEQ ID NO: 1452 - protein, 841 aa, synthetic construct
  REGION 1..841: note = Variant of DNA polymerase I from Thermus sp. strain 2.9
MHHHHHHGGSGMLPLFEPKGRVLLVDGHHLAYRNFFALKGLTTSRGEPVQGVYGFAKSLLKALKEDGDVVIVVFDAKAPSFRHEAYEAYKAGRAGTPEDFPRQLALMKELVDLLGLERLEVPGFEADDVLATLAKKAEREGYEVQILTADRDLFQLLSPRISVLHPEGHRITPEWLWEKYGLRPEQWVDFRALAGDPSDNIPGVKGIGEKTALKLLKEWGSLENLLKNLDQVKPESVREKILAHLEDLKLSRELSRVRTDLPLEVDFRGRREPDWEGLKAFLERLEFGSLLHEFGLLESPLPAEEAPWPPPEGAFLGYRLSRPEPMWAELLALAASAQGRVYRAEDPHGALRGLKEVRGLLAKDLAVVALREGLDLPPTDDPMLLAYLLDPSNTTPEGVARRYGGEWTEDAGERALLAERLHANLLGRLQGEERLLWLYEEVEKPLSRVLAHMEATGVKLDVAYLEALSLEVAAEMRRLEEEVFRLAGHSFNLNSRDQLERVLFDELGLPPIGKTEKTGKRSTSAAVLEALREVHPIVDKILQYRELAKLKGTYIDPLPALVHPKTGRLHTRFNQTATATGRLSSSDPNLQNIPVRTPLGQKIRRAFVAEEGWRLVALDYSQIELRVLAHLSGDENLIRVFQEGKDIHTQTASWMFGLSAEAIDPLMRRAAKTINFGVLYGMSAHRLSQELGIPYEEAAAFIQRYFQSYPKVKAWIEKTLEEGRTRGYVETLFGRRRYVPDLNARVKSVREAAERMAFNMPVQGTAADLMKLAMVRLFPQLREVGARMLLQVHDELLLEAPKERAEEVAALAKEVMEGVWPLAVPLEVEVGIGEDWLAAKG

SEQ ID NO: 1453 - DNA, 2529 bp, synthetic construct
  misc_feature 1..2529: note = Variant of DNA polymerase I from Thermus sp. strain 2.9
  source 1..2529: mol_type = other DNA
atgcaccatcatcatcatcatggcggtagcggcatgttaccgttgttcgaacctaaaggtcgcgtgcttctggttgatggccatcatctcgcgtatcgtaacttctttgccctgaaaggattaaccaccagccgtggcgagccggtacagggtgtctacggctttgcaaagtcgctcctgaaagctctgaaagaagacggtgatgtggtgattgttgtctttgatgcgaaagcgccaagttttcgccacgaagcgtacgaagcttacaaagccgggcgtgctccaacgccggaagactttcctcgccaattggcgcttatgaaggaattagtggatttgcttggcctcgaacgcttggaagttcccggtttcgaggcagacgacgtattagcgactctcgcaaagaaagccgaacgtgagggctatgaagtccagatcttgacagcagatcgcgatcttttccagcttttatctccgcgcatctcggtgttacacccggaagggcatcgtatcaccccggaatggctctgggagaaatatggtttgcgtcccgaacaatgggtggattttcgcgccttagcaggcgatccgagcgacaatattccgggagttaaaggtatcggcgagaagacggcgctcaagctccttaaagaatgggggtcgttggagaacttgcttaagaatttagatcaggtcaaaccagagtcagtgcgtgagaagattcttgcacacctcgaagacctcaaattaagccgcgaattgtcccgtgtacgcaccgatttgccgctcgaagttgatttccgtggccgccgcgaacctgactgggagggtcttaaagcgtttttagagcgtcttgaatttggttcgctcttgcatgaattcggccttttagaaagcccgttaccagccgaagaagcaccttggccaccgcccgaaggcgcgtttttaggttaccgtttgagtcgcccggaaccgatgtgggccgaattattggctcttgcagcgtctgcccagggacgtgtgtatcgcgcggaagaccctcatggtgcgctccgcggcctcaaagaagtccgtggactccttgccaaagacttagctgttgttgcattgcgcgaaggtcttgatttacctccgactgatgatccaatgcttcttgcgtacctcttggacccgtcaaacacgacgcccgaaggcgtagcccgtcgttacggcggcgagtggaccgaagatgcaggcgagcgcgcgttattggccgaacgtttgcacgccaatttattaggacgtttgcaaggcgaggaacgtctcctctggctttacgaagaagtggagaaaccattgagtcgcgtgctcgcgcatatggaagctaccggtgtcaaattagacgtggcgtatttggaggcactcagccttgaagttgctgccgaaatgcgccgcttggaggaagaagtattccgtttagcaggccactcctttaaccttaattctcgcgatcagttagaacgtgtgttgttcgatgaacttggtctccctcctatcggcaagacagagaagaccggtaaacgtagcacttcagcggcggttttagaagctcttcgcccggtccatcccattgtggacaagatcttgcagtaccgcgaactcgcgaaattgaaaggcacctatattgaccctcttccggcattagtccacccgaaaacgggacgcctccatacccgcttcaaccaaacagccacggcgaccggtcgtttgtcctcctctgatccaaaccttcagaatattccagtacgtaccccattgggccagaagatccgccgcgcgtttgtagctgaggagggttggcgtttagtggccctcgattatagccaaattgaattacgtgtccttgcccatctttctggcgatgagaacctcatccgcgtgtttcaggaaggcaaagacattcacactcaaacggcaagctggatgtttggattatcagctgaagcgatcgatcctttgatgcgtcgtgcagcgaagaccatcaatttcggtgttctctacggtatgagtgcccatcgtttgtcgcaggaattaggcattccctatgaagaagctgcggcgttcattcagcgctactttcaaagctatcccaaagttaaagcatggatcgagaagactctcgaagaaggccgcacacgtggttacgtagagaccttatttggacgtcgccgctatgttcccgatttaaacgctcgcgtgaaatctgtccgtgaagccgccgaacgcatggcgttcaacatgcctgtacagggcacggcagctgacctcatgaaacttgcaatggtgcgcctttttccacaattgcgtgaagttggtgcccgcatgctcttgcaggtccacgatgaactcttgttagaagcgccaaaagagcgtgcggaagaggtggcagccctcgcgaaagaggttatggaaggcgtgtggcccttagcggtgcctcttgaagtcgaagttggtattggcgaggattggttggctgccaaaggataatga

SEQ ID NO: 1454 - protein, 841 aa, synthetic construct
  REGION 1..841: note = Variant of DNA polymerase I from Thermus sp. strain 2.9
MHHHHHHGGSGMLPLFEPKGRVLLVDGHHLAYRNFFALKGLTTSRGEPVQGVYGFAKSLLKALKEDGDVVIVVFDAKAPSFRHEAYEAYKAGRAPTPEDFPRQLALMKELVDLLGLERLEVPGFEADDVLATLAKKAEREGYEVQILTADRDLFQLLSPRISVLHPEGHRITPEWLWEKYGLRPEQWVDFRALAGDPSDNIPGVKGIGEKTALKLLKEWGSLENLLKNLDQVKPESVREKILAHLEDLKLSRELSRVRTDLPLEVDFRGRREPDWEGLKAFLERLEFGSLLHEFGLLESPLPAEEAPWPPPEGAFLGYRLSRPEPMWAELLALAASAQGRVYRAEDPHGALRGLKEVRGLLAKDLAVVALREGLDLPPTDDPMLLAYLLDPSNTTPEGVARRYGGEWTEDAGERALLAERLHANLLGRLQGEERLLWLYEEVEKPLSRVLAHMEATGVKLDVAYLEALSLEVAAEMRRLEEEVFRLAGHSFNLNSRDQLERVLFDELGLPPIGKTEKTGKRSTSAAVLEALRPVHPIVDKILQYRELAKLKGTYIDPLPALVHPKTGRLHTRFNQTATATGRLSSSDPNLQNIPVRTPLGQKIRRAFVAEEGWRLVALDYSQIELRVLAHLSGDENLIRVFQEGKDIHTQTASWMFGLSAEAIDPLMRRAAKTINFGVLYGMSAHRLSQELGIPYEEAAAFIQRYFQSYPKVKAWIEKTLEEGRTRGYVETLFGRRRYVPDLNARVKSVREAAERMAFNMPVQGTAADLMKLAMVRLFPQLREVGARMLLQVHDELLLEAPKERAEEVAALAKEVMEGVWPLAVPLEVEVGIGEDWLAAKG

SEQ ID NO: 1455 - DNA, 2529 bp, synthetic construct
  misc_feature 1..2529: note = Variant of DNA polymerase I from Thermus sp. strain 2.9
  source 1..2529: mol_type = other DNA
atgcaccatcatcatcatcatggcggtagcggcatgttaccgttgttcgaacctaaaggtcgcgtgcttctggttgatggccatcatctcgcgtatcgtaacttctttgccctgaaaggattaaccaccagccgtggcgagccggtacagggtgtctacggctttgcaaagtcgctcctgaaagctctgaaagaagacggtgatgtggtgattgttgtctttgatgcgaaagcgccaagttttcgccacgaagcgtacgaagcttacaaagccgggcgtgctccaacgccggaagactttcctcgccaattggcgcttatgaaggaattagtggatttgcttggcctcgaacgcttggaagttcccggtttcgaggcagacgacgtattagcgactctcgcaaagaaagccgaacgtgagggctatgaagtccagatcttgacagcagatcgcgatcttttccagcttttatctccgcgcatctcggtgttacacccggaagggcatcgtatcaccccggaatggctctgggagaaatatggtttgcgtcccgaacaatgggtggattttcgcgccttagcaggcgatccgagcgacaatattccgggagttaaaggtatcggcgagaagacggcgctcaagctccttaaagaatgggggtcgttggagaacttgcttaagaatttagatcaggtcaaaccagagtcagtgcgtgagaagattcttgcacacctcgaagacctcaaattaagccgcgaattgtcccgtgtacgcaccgatttgccgctcgaagttgatttccgtggccgccgcgaacctgaccttgagggtcttaaagcgtttttagagcgtcttgaatttggttcgctcttgcatgaattcggccttttagaaagcccgttaccagccgaagaagcaccttggccaccgcccgaaggcgcgtttttaggttaccgtttgagtcgcccggaaccgatgtgggccgaattattggctcttgcagcgtctgcccagggacgtgtgtatcgcgcggaagaccctcatggtgcgctccgcggcctcaaagaagtccgtggactccttgccaaagacttagctgttgttgcattgcgcgaaggtcttgatttacctccgactgatgatccaatgcttcttgcgtacctcttggacccgtcaaacacgacgcccgaaggcgtagcccgtcgttacggcggcgagtggaccgaagatgcaggcgagcgcgcgttattggccgaacgtttgcacgccaatttattaggacgtttgcaaggcgaggaacgtctcctctggctttacgaagaagtggagaaaccattgagtcgcgtgctcgcgcatatggaagctaccggtgtcaaattagacgtggcgtatttggaggcactcagccttgaagttgctgccgaaatgcgccgcttggaggaagaagtattccgtttagcaggccactcctttaaccttaattctcgcgatcagttagaacgtgtgttgttcgatgaacttggtctccctcctatcggcaagacagagaagaccggtaaacgtagcacttcagcggcggttttagaagctcttcgcgaagtccatcccattgtggacaagatcttgcagtaccgcgaactcgcgaaattgaaaggcacctatattgaccctcttccggcattagtccacccgaaaacgggacgcctccatacccgcttcaaccaaacagccacggcgaccggtcgtttgtcctcctctgatccaaaccttcagaatattccagtacgtaccccattgggccagaagatccgccgcgcgtttgtagctgaggagggttggcgtttagtggccctcgattatagccaaattgaattacgtgtccttgcccatctttctggcgatgagaacctcatccgcgtgtttcaggaaggcaaagacattcacactcaaacggcaagctggatgtttggattatcagctgaagcgatcgatcctttgatgcgtcgtgcagcgaagaccatcaatttcggtgttctctacggtatgagtgcccatcgtttgtcgcaggaattaggcattccctatgaagaagctgcggcgttcattcagcgctactttcaaagctatcccaaagttaaagcatggatcgagaagactctcgaagaaggccgcacacgtggttacgtagagaccttatttggacgtcgccgctatgttcccgatttaaacgctcgcgtgaaatctgtccgtgaagccgccgaacgcatggcgttcaacatgcctgtacagggcacggcagctgacctcatgaaacttgcaatggtgcgcctttttccacaattgcgtgaagttggtgcccgcatgctcttgcaggtccacgatgaactcttgttagaagcgccaaaagagcgtgcggaagaggtggcagccctcgcgaaagaggttatggaaggcgtgtggcccttagcggtgcctcttgaagtcgaagttggtattggcgaggattggttggctgccaaaggataatga

SEQ ID NO: 1456 - protein, 841 aa, synthetic construct
  REGION 1..841: note = Variant of DNA polymerase I from Thermus sp. strain 2.9
MHHHHHHGGSGMLPLFEPKGRVLLVDGHHLAYRNFFALKGLTTSRGEPVQGVYGFAKSLLKALKEDGDVVIVVFDAKAPSFRHEAYEAYKAGRAPTPEDFPRQLALMKELVDLLGLERLEVPGFEADDVLATLAKKAEREGYEVQILTADRDLFQLLSPRISVLHPEGHRITPEWLWEKYGLRPEQWVDFRALAGDPSDNIPGVKGIGEKTALKLLKEWGSLENLLKNLDQVKPESVREKILAHLEDLKLSRELSRVRTDLPLEVDFRGRREPDLEGLKAFLERLEFGSLLHEFGLLESPLPAEEAPWPPPEGAFLGYRLSRPEPMWAELLALAASAQGRVYRAEDPHGALRGLKEVRGLLAKDLAVVALREGLDLPPTDDPMLLAYLLDPSNTTPEGVARRYGGEWTEDAGERALLAERLHANLLGRLQGEERLLWLYEEVEKPLSRVLAHMEATGVKLDVAYLEALSLEVAAEMRRLEEEVFRLAGHSFNLNSRDQLERVLFDELGLPPIGKTEKTGKRSTSAAVLEALREVHPIVDKILQYRELAKLKGTYIDPLPALVHPKTGRLHTRFNQTATATGRLSSSDPNLQNIPVRTPLGQKIRRAFVAEEGWRLVALDYSQIELRVLAHLSGDENLIRVFQEGKDIHTQTASWMFGLSAEAIDPLMRRAAKTINFGVLYGMSAHRLSQELGIPYEEAAAFIQRYFQSYPKVKAWIEKTLEEGRTRGYVETLFGRRRYVPDLNARVKSVREAAERMAFNMPVQGTAADLMKLAMVRLFPQLREVGARMLLQVHDELLLEAPKERAEEVAALAKEVMEGVWPLAVPLEVEVGIGEDWLAAKG

SEQ ID NO: 1457 - DNA, 2529 bp, synthetic construct
  misc_feature 1..2529: note = Variant of DNA polymerase I from Thermus sp. strain 2.9
  source 1..2529: mol_type = other DNA
atgcaccatcatcatcatcatggcggtagcggcatgttaccgttgttcgaacctaaaggtcgcgtgcttctggttgatggccatcatctcgcgtatcgtaacttctttgccctgaaaggattaaccaccagccgtggcgagccggtacagggtgtctacggctttgcaaagtcgctcctgaaagctctgaaagaagacggtgatgtggtgattgttgtctttgatgcgaaagcgccaagttttcgccacgaagcgtacgaagcttacaaagccgggcgtgctccaacgccggaagactttcctcgccaattggcgcttatgaaggaattagtggatttgcttggcctcgaacgcttggaagttcccggtttcgaggcagacgacgtattagcgactctcgcaaagaaagccgaacgtgagggctatgaagtccagatcttgacagcagatcgcgatcttttccagcttttatctccgcgcatctcggtgttacacccggaagggcatcgtatcaccccggaatggctctgggagaaatatggtttgcgtcccgaacaatgggtggattttcgcgccttagcaggcgatccgagcgacaatattccgggagttaaaggtatcggcgagaagacggcgctcaagctccttaaagaatgggggtcgttggagaacttgcttaagaatttagatcaggtcaaaccagagtcagtgcgtgagaagattcttgcacacctcgaagacctcaaattaagccgcgaattgtcccgtgtacgcaccgatttgccgctcgaagttgatttccgtggtcgccgcgaacctgactgggagggtcttaaagcgtttttagagcgtcttgaatttggttcgctcttgcatgaattcggccttttagaaagcccgttaccagccgaagaagcaccttggccaccgcccgaaggcgcgtttttaggttaccgtttgagtcgcccggaaccgatgtgggccgaattactggctcttgcagcgtctgcccaggggcgtgcgtatcgcgcggaagaccctcatggtgcgctccgtggcctcaaagaagtccgtggactccttgccaaagacttagctgttgttgcattgcgcgaaggtcttgatttacctccgactgatgatccaatgcttcttgcgtacctcttggacccgtcaaacacgacgcccgaaggcgtagcccgtcgttacggcggcgagtggaccgaagatgcaggcgagcgcgcgttattggccgaacgtttgcacgccaatttattaggacgtttgcaaggcgaggaacgtctcctctggctttacgaagaagtggagaaaccattgagtcgcgtgctcgcgcatatggaagctaccggtgtcaaattagacgtggcgtatttggagaacctcagccttgaagttgctgccgaaatgcgccgcttggaggaagaagtattccgtttagcaggccactcctttaaccttaattctcgcgatcagttagaacgtgtgttgttcgataaccttggtctccctcctatcggcaagacagagaagaccggtaaacgtagcacttcagcggcggttttagaagctcttcgcgaagtccatcccattgtggacaagatcttgcagtaccgcgaactcgcgaaattgaaaggcacctatattgaccctcttccggcattagtccacccgaaaacgggacgcctccatacccgcttcaaccaaacagccacggcgaccggtcgtttgtcctcctctgatccaaaccttcagaatattccagtacgtaccccattgggccagaagatccgccgcgcgtttgtagctgaggagggttggcgtttagtggccctcgattatagccaaattgaattacgtgtccttgcccatctttctggcgatgagaacctcatccgcgtgtttcaggaaggcaaagacattcacactcaaacggcaagctggatgtttggattatcaccagaagcgatcgatcctttgatgcgtcgtgcagcgaagaccgttaatttcggtgttctctacggtatgagtgcccatcgtttgtcgcaggaattaggcattccctatgaagaagctgccgcgttcattcagcgctactttcaaagctatcccaaagttaaagcatggatcgagaagactctcgaagaaggccgcacacgtggttacgtagagaccttatttggacgtcgccgctatgttcccgatttaaacgctcgcgtgaaatctgtccgtgaagccgccgaacgcatggcgttcaacatgcctgtacagggcacggcagctgacctcatgaaacttgcaatggtgcgcctttttccacaattgcgtgaagttggtgcccgcatgctcttgcaggtccacgatgaactcttgttagaagcgccaaaagagcgtgcggaagaggtggcagccctcgcgaaagaggttatggaaggcgtgtggcccttagcggtgcctcttgaagtcgaagttggtattggcgaggattggttggctgccaaaggataatga

SEQ ID NO: 1458 - protein, 841 aa, synthetic construct
  REGION 1..841: note = Variant of DNA polymerase I from Thermus sp. strain 2.9
MHHHHHHGGSGMLPLFEPKGRVLLVDGHHLAYRNFFALKGLTTSRGEPVQGVYGFAKSLLKALKEDGDVVIVVFDAKAPSFRHEAYEAYKAGRAPTPEDFPRQLALMKELVDLLGLERLEVPGFEADDVLATLAKKAEREGYEVQILTADRDLFQLLSPRISVLHPEGHRITPEWLWEKYGLRPEQWVDFRALAGDPSDNIPGVKGIGEKTALKLLKEWGSLENLLKNLDQVKPESVREKILAHLEDLKLSRELSRVRTDLPLEVDFRGRREPDWEGLKAFLERLEFGSLLHEFGLLESPLPAEEAPWPPPEGAFLGYRLSRPEPMWAELLALAASAQGRAYRAEDPHGALRGLKEVRGLLAKDLAVVALREGLDLPPTDDPMLLAYLLDPSNTTPEGVARRYGGEWTEDAGERALLAERLHANLLGRLQGEERLLWLYEEVEKPLSRVLAHMEATGVKLDVAYLENLSLEVAAEMRRLEEEVFRLAGHSFNLNSRDQLERVLFDNLGLPPIGKTEKTGKRSTSAAVLEALREVHPIVDKILQYRELAKLKGTYIDPLPALVHPKTGRLHTRFNQTATATGRLSSSDPNLQNIPVRTPLGQKIRRAFVAEEGWRLVALDYSQIELRVLAHLSGDENLIRVFQEGKDIHTQTASWMFGLSPEAIDPLMRRAAKTVNFGVLYGMSAHRLSQELGIPYEEAAAFIQRYFQSYPKVKAWIEKTLEEGRTRGYVETLFGRRRYVPDLNARVKSVREAAERMAFNMPVQGTAADLMKLAMVRLFPQLREVGARMLLQVHDELLLEAPKERAEEVAALAKEVMEGVWPLAVPLEVEVGIGEDWLAAKG

SEQ ID NO: 1459 - DNA, 2529 bp, synthetic construct
  misc_feature 1..2529: note = Variant of DNA polymerase I from Thermus sp. strain 2.9
  source 1..2529: mol_type = other DNA
atgcaccatcatcatcatcatggcggtagcggcatgttaccgttgttcgaacctaaaggtcgcgtgcttctggttgatggccatcatctcgcgtatcgtaacttctttgccctgaaaggattaaccaccagccgtggcgagccggtacagggtgtctacggctttgcaaagtcgctcctgaaagctctgaaagaagacggtgatgtggtgattgttgtctttgatgcgaaagcgccaagttttcgccacgaagcgtacgaagcttacaaagccgggcgtgctccaacgccggaagactttcctcgccaattggcgcttatgaaggaattagtggatttgcttggcctcgaacgcttggaagttcccggtttcgaggcagacgacgtattagcgactctcgcaaagaaagccgaacgtgagggctatgaagtccagatcttgacagcagatcgcgatcttttccagcttttatctccgcgcatctcggtgttacacccggaagggcatcgtatcaccccggaatggctctgggagaaatatggtttgcgtcccgaacaatgggtggattttcgcgccttagcaggcgatccgagcgacaatattccgggagttaaaggtatcggcgagaagacggcgctcaagctccttaaagaatgggggtcgttggagaacttgcttaagaatttagatcaggtcaaaccagagtcagtgcgtgagaagattcttgcacacctcgaagacctcaaattaagccgcgaattgtcccgtgtacgcaccgatttgccgctcgaagttgatttccgtggccgccgcgaacctgactgggagggtcttaaagcgtttttagagcgtcttgaatttggttcgctcttgcatgaattcggccttttagaaagcccgttaccagccgaagaagcaccttggccaccgcccgaaggcgcgtttttaggttaccgtttgagtcgcccggaaccgatgtgggccgaattatcggctcttgcagcgtctgcccaggggcgtgtgtatcgcgcggaagaccctcatggtgcgctccgcggcctcaaagaagtcaacggactccttgccaaagacttagctgttgttgcattgcgcgaaggtcttgatttacctccgactgatgatccaatgcttcttgcgtacctcttggacccgtcaaacacgacgcccgaaggcgtagcccgtcgttacggcggcgagtggaccgaagatgcaggcgagcgcgcgttattggccgaacgtttgcacgccaatttattaggacgtttgcaaggcgaggaacgtctcctctggctttacgaagaagtggagaaaccattgagtcgcgtgctcgcgcatatggaagctaccggtgtcaaattagacgtggcgtatttggagaacctcagccttgaagttgctgccgaaatgcgccgcttggaggaagaagtattccgtttagcaggccactcctttaaccttaattctcgcgatcagttagaacgtgtgttgttcgatgagcttggtctccctcctatcggcaagacagagaagaccggtaaacgtagcacttcagcggcggttttagaagctcttcgcgaagtccatcccattgtggacaagatcttgcagtaccgcgaactcgcgaaattgaaaggcacctatattgaccctcttccggcattagtccacccgaaaacgggacgcctccatacccgcttcaaccaaacagccacggcgaccggtcgtttgtcctcctctgatccaaaccttcagaatattccagtacgtaccccattgggccagaagatccgccgcgcgtttgtagctgaggagggttggcgtttagtggccctcgattatagccaaattgaattacgtgtccttgcccatctttctggcgatgagaacctcatccgcgtgtttcaggaaggcaaagacattcacactcaaacggcaagctggatgtttggattatcagctgaagcgatcgatcctttgatgcgtcgtgcagcgaagaccgttaatttcggtgttctctacggtatgagtgcccatcgtttgtcgcaggaattaggcattccctatgaagaagctgtcgcgttcattcagaagtactttcaaagctatcccaaagttaaagcatggatcgagaagactctcgaagaaggccgcacacgtggttacgtagagaccttatttggacgtcgccgctatgttcccgatttaaacgctcgcgtgaaatctgtccgtgaagccgccgaacgcatggcgttcaacatgcctgtacagggcacggcagctgacctcatgaaacttgcaatggtgcgcctttttccacaattgcgtgaagttggtgcccgcatgctcttgcaggtccacgatgaactcttgttagaagcgccaaaagagcgtgcggaagaggtggcagccctcgcgaaagaggttatggaaggcgtgtggcccttagcggtgcctcttgaagtcgaagttggtattggcgaggattggttggctgccaaaggataatga

SEQ ID NO: 1460 - protein, 841 aa, synthetic construct
  REGION 1..841: note = Variant of DNA polymerase I from Thermus sp. strain 2.9
MHHHHHHGGSGMLPLFEPKGRVLLVDGHHLAYRNFFALKGLTTSRGEPVQGVYGFAKSLLKALKEDGDVVIVVFDAKAPSFRHEAYEAYKAGRAPTPEDFPRQLALMKELVDLLGLERLEVPGFEADDVLATLAKKAEREGYEVQILTADRDLFQLLSPRISVLHPEGHRITPEWLWEKYGLRPEQWVDFRALAGDPSDNIPGVKGIGEKTALKLLKEWGSLENLLKNLDQVKPESVREKILAHLEDLKLSRELSRVRTDLPLEVDFRGRREPDWEGLKAFLERLEFGSLLHEFGLLESPLPAEEAPWPPPEGAFLGYRLSRPEPMWAELSALAASAQGRVYRAEDPHGALRGLKEVNGLLAKDLAVVALREGLDLPPTDDPMLLAYLLDPSNTTPEGVARRYGGEWTEDAGERALLAERLHANLLGRLQGEERLLWLYEEVEKPLSRVLAHMEATGVKLDVAYLENLSLEVAAEMRRLEEEVFRLAGHSFNLNSRDQLERVLFDELGLPPIGKTEKTGKRSTSAAVLEALREVHPIVDKILQYRELAKLKGTYIDPLPALVHPKTGRLHTRFNQTATATGRLSSSDPNLQNIPVRTPLGQKIRRAFVAEEGWRLVALDYSQIELRVLAHLSGDENLIRVFQEGKDIHTQTASWMFGLSAEAIDPLMRRAAKTVNFGVLYGMSAHRLSQELGIPYEEAVAFIQKYFQSYPKVKAWIEKTLEEGRTRGYVETLFGRRRYVPDLNARVKSVREAAERMAFNMPVQGTAADLMKLAMVRLFPQLREVGARMLLQVHDELLLEAPKERAEEVAALAKEVMEGVWPLAVPLEVEVGIGEDWLAAKG

SEQ ID NO: 1461 - DNA, 2529 bp, synthetic construct
  misc_feature 1..2529: note = Variant of DNA polymerase I from Thermus sp. strain 2.9
  source 1..2529: mol_type = other DNA
atgcaccatcatcatcatcatggcggtagcggcatgttaccgttgttcgaacctaaaggtcgcgtgcttctggttgatggccatcatctcgcgtatcgtaacttctttgccctgaaaggattaaccaccagccgtggcgagccggtacagggtgtctacggctttgcaaagtcgctcctgaaagctctgaaagaagacggtgatgtggtgattgttgtctttgatgcgaaagcgccaagttttcgccacgaagcgtacgaagcttacaaagccgggcgtgctccaacgccggaagactttcctcgccaattggcgcttatgaaggaattagtggatttgcttggcctcgaacgcttggaagttcccggtttcgaggcagacgacgtattagcgactctcgcaaagaaagccgaacgtgagggctatgaagtccagatcttgacagcagatcgcgatcttttccagcttttatctccgcgcatctcggtgttacacccggaagggcatcgtatcaccccggaatggctctgggagaaatatggtttgcgtcccgaacaatgggtggattttcgcgccttagcaggcgatccgagcgacaatattccgggagttaaaggtatcggcgagaagacggcgctcaagctccttaaagaatgggggtcgttggagaacttgcttaagaatttagatcaggtcaaaccagagtcagtgcgtgagaagattcttgcacacctcgaagacctcaaattaagccgcgaattgtcccgtgtacgcaccgatttgccgctcgaagttgatttccgtggccgccgcgaacctgactgggagggtcttaaagcgtttttagagcgtcttgaatttggttcgctcttgcatgaattcggccttttagaaagcccgttaccagccgaagaagcaccttggccaccgcccgaaggcgcgtttttaggttaccgtttgagtcgcccggaaccgatgtgggccgaattattggctcttgcagcgtctgcccaggggcgtgtgtatcgcgcggaagaccctcatggtgcgctcaagggcctcaaagaagtccgtggactccttgccaaagacttagctgttgttgcattgcgcgaaggtcttgatttacctccgactgatgatccaatgcttcttgcgtacctcttggacccgtcaaacacgacgcccgaaggcgtagcccgtcgttacggcggcgagtggaccgaagatgcaggtaagcgcgcgttattggccgaacgtttgcacgccaatttattaggacgtttgcaaggcgaggaacgtctcctctggctttacgaagaagtggagaaaccattgagtcgcgtgctcgcgcatatggaagctaccggtgtcaaattagacgtggcgtatttggagaacctcagccttgaagttgctgccgaaatgcgccgcttggaggaagaagtattccgtttagcaggccactcctttaaccttaattctcgcgatcagttagaacgtgtgttgttcgataaccttggtctccctcctatcggcaagacagagaagaccggtaaacgtagcacttcagcggcggttttagaagctcttcgcgaagtccatcccattgtggacaagatcttgcagtaccgcgaactcgcgaaattgaaaggcacctatattgaccctcttccggcattagtccacccgaaaacgggacgcctccatacccgcttcaaccaaacagccacggcgaccggtcgtttgtcctcctctgatccaaaccttcagaatattccagtacgtaccccattgggccagaagatccgccgcgcgtttgtagctgaggagggttggcgtttagtggccctcgattatagccaaattgaattacgtgtccttgcccatctttctggcgatgagaacctcatccgcgtgtttcaggaaggcaaagacattcacactcaaacggcaagctggatgtttggattatcagcagaagcgatcgatcctttgatgcgtcgtgcagcgaagaccattaatttcggtgttctctacggtatgagtgcccatcgtttgtcgcaggaattaggcattccctatgaagaagctgcggcgttcattcagcgctactttcaaagctatcccaaagttaaagcatggatcgagaagactctcgaagaaggccgcacacgtggttacgtagagaccttatttggacgtcgccgctatgttcccgatttaaacgctcgcgtgaaatctgtccgtgaagccgccgaacgcatggcgttcaacatgcctgtacagggcacggcagctgacctcatgaaacttgcaatggtgcgcctttttccacaattgcgtgaagttggtgcccgcatgctcttgcaggtccacgatgaactcttgttagaagcgccaaaagagcgtgcggaagaggtggcagccctcgcgaaagaggttatggaaggcgtgtggcccttagcggtgcctcttgaagtcgaagttggtattggcgaggattggttggctgccaaaggataatga

SEQ ID NO: 1462 - protein, 841 aa, synthetic construct
  REGION 1..841: note = Variant of DNA polymerase I from Thermus sp. strain 2.9
MHHHHHHGGSGMLPLFEPKGRVLLVDGHHLAYRNFFALKGLTTSRGEPVQGVYGFAKSLLKALKEDGDVVIVVFDAKAPSFRHEAYEAYKAGRAPTPEDFPRQLALMKELVDLLGLERLEVPGFEADDVLATLAKKAEREGYEVQILTADRDLFQLLSPRISVLHPEGHRITPEWLWEKYGLRPEQWVDFRALAGDPSDNIPGVKGIGEKTALKLLKEWGSLENLLKNLDQVKPESVREKILAHLEDLKLSRELSRVRTDLPLEVDFRGRREPDWEGLKAFLERLEFGSLLHEFGLLESPLPAEEAPWPPPEGAFLGYRLSRPEPMWAELLALAASAQGRVYRAEDPHGALKGLKEVRGLLAKDLAVVALREGLDLPPTDDPMLLAYLLDPSNTTPEGVARRYGGEWTEDAGKRALLAERLHANLLGRLQGEERLLWLYEEVEKPLSRVLAHMEATGVKLDVAYLENLSLEVAAEMRRLEEEVFRLAGHSFNLNSRDQLERVLFDNLGLPPIGKTEKTGKRSTSAAVLEALREVHPIVDKILQYRELAKLKGTYIDPLPALVHPKTGRLHTRFNQTATATGRLSSSDPNLQNIPVRTPLGQKIRRAFVAEEGWRLVALDYSQIELRVLAHLSGDENLIRVFQEGKDIHTQTASWMFGLSAEAIDPLMRRAAKTINFGVLYGMSAHRLSQELGIPYEEAAAFIQRYFQSYPKVKAWIEKTLEEGRTRGYVETLFGRRRYVPDLNARVKSVREAAERMAFNMPVQGTAADLMKLAMVRLFPQLREVGARMLLQVHDELLLEAPKERAEEVAALAKEVMEGVWPLAVPLEVEVGIGEDWLAAKG

SEQ ID NO: 1463 - DNA, 2529 bp, synthetic construct
  misc_feature 1..2529: note = Variant of DNA polymerase I from Thermus sp. strain 2.9
  source 1..2529: mol_type = other DNA
atgcaccatcatcatcatcatggcggtagcggcatgttaccgttgttcgaacctaaaggtcgcgtgcttctggttgatggccatcatctcgcgtatcgtaacttctttgccctgaaaggattaaccaccagccgtggcgagccggtacagggtgtctacggctttgcaaagtcgctcctgaaagctctgaaagaagacggtgatgtggtgattgttgtctttgatgcgaaagcgccaagttttcgccacgaagcgtacgaagcttacaaagccgggcgtgctccaacgccggaagactttcctcgccaattggcgcttatgaaggaattagtggatttgcttggcctcgaacgcttggaagttcccggtttcgaggcagacgacgtattagcgactctcgcaaagaaagccgaacgtgagggctatgaagtccagatcttgacagcagatcgcgatcttttccagcttttatctccgcgcatctcggtgttacacccggaagggcatcgtatcaccccggaatggctctgggagaaatatggtttgcgtcccgaacaatgggtggattttcgcgccttagcaggcgatccgagcgacaatattccgggagttaaaggtatcggcgagaagacggcgctcaagctccttaaagaatgggggtcgttggagaacttgcttaagaatttagatcaggtcaaaccagagtcagtgcgtgagaagattcttgcacacctcgaagacctcaaattaagccgcgaattgtcccgtgtacgcaccgatttgccgctcgaagttgatttccgtggccgccgcgaacctgactgggagggtcttaaagcgtttttagagcgtcttgaatttggttcgctcttgcatgaattcggccttttagaaagcccgttaccagccgaagaagcaccttggccaccgcccgaaggcgcgtttttaggttaccgtttgagtcgcccggaaccgatgtgggccgaattattggctcttgcagcgtctgcccagggacgtgtgtatcgcgcggaagaccctcatggtgcgctccgcggcctcaaagaagtccgtggactccttgccaaagacttagctgttgttgcattgcgcgaaggtcttgatttacctccgactgatgatccaatgcttcttgcgtacctcttggacccgtcaaacacgacgcccgaaggcgtagcccgtcgttacggcggcgagtggaccgaagatgcaggcgagcgcgcgttattggccgaacgtttgcacgccaatttattaggacagttgcaaggcgaggaacgtctcctctggctttacgaagaagtggagaaaccattgagtcgcgtgctcgcgcatatggaagctaccggtgtcaaattagacgtggcgtatttggaggcactcagccttgaagttgctgccgaaatgcgccgcttggaggaagaagtattccgtttagcaggccactcctttaaccttaattctcgcgatcagttagaacgtgtgttgttcgatgaacttggtctccctcctatcggcaagacagagaagaccggtaaacgtagcacttcagcggcggttttagaagctcttcgcgaagtccatcccattgtggacaagatcttgcagtaccgcgaactcgcgaaattgaaaggcacctatattgaccctcttccggcattagtccacccgaaaacgggacgcctccatacccgcttcaaccaaacagccacggcgaccggtcgtttgtcctcctctgatccaaaccttcagaatattccagtacgtaccccattgggccagaagatccgccgcgcgtttgtagctgaggagggttggcgtttagtggccctcgattatagccaaattgaattacgtgtccttgcccatctttctggcgatgagaacctcatccgcgtgtttcaggaaggcaaagacattcacactcaaacggcaagctggatgtttggattatcagctgaagcgatcgatcctttgatgcgtcgtgcagcgaagaccatcaatttcggtgttctctacggtatgagtgcccatcgtttgtcgcaggaattaggcattccctatgaagaagctgcggcgttcattcagcgctactttcaaagctatcccaaagttaaagcatggatcgagaagactctcgaagaaggccgcacacgtggttacgtagagaccttatttggacgtcgccgctatgttcccgatttaaacgctcgcgtgaaatctgtccgtgaagccgccgaacgcatggcgttcaacatgcctgtacagggcacggcagctgacctcatgaaacttgcaatggtgcgcctttttccacaattgcgtgaagttggtgcccgcatgctcttgcaggtccacgatgaactcttgttagaagcgccaaaagagcgtgcggaagaggtggcagccctcgcgaaagaggttatggaaggcgtgtggcccttagcggtgcctcttgaagtcgaagttggtattggcgaggattggttggctgccaaaggataatga

SEQ ID NO: 1464 - protein, 841 aa, synthetic construct
  REGION 1..841: note = Variant of DNA polymerase I from Thermus sp. strain 2.9
MHHHHHHGGSGMLPLFEPKGRVLLVDGHHLAYRNFFALKGLTTSRGEPVQGVYGFAKSLLKALKEDGDVVIVVFDAKAPSFRHEAYEAYKAGRAPTPEDFPRQLALMKELVDLLGLERLEVPGFEADDVLATLAKKAEREGYEVQILTADRDLFQLLSPRISVLHPEGHRITPEWLWEKYGLRPEQWVDFRALAGDPSDNIPGVKGIGEKTALKLLKEWGSLENLLKNLDQVKPESVREKILAHLEDLKLSRELSRVRTDLPLEVDFRGRREPDWEGLKAFLERLEFGSLLHEFGLLESPLPAEEAPWPPPEGAFLGYRLSRPEPMWAELLALAASAQGRVYRAEDPHGALRGLKEVRGLLAKDLAVVALREGLDLPPTDDPMLLAYLLDPSNTTPEGVARRYGGEWTEDAGERALLAERLHANLLGQLQGEERLLWLYEEVEKPLSRVLAHMEATGVKLDVAYLEALSLEVAAEMRRLEEEVFRLAGHSFNLNSRDQLERVLFDELGLPPIGKTEKTGKRSTSAAVLEALREVHPIVDKILQYRELAKLKGTYIDPLPALVHPKTGRLHTRFNQTATATGRLSSSDPNLQNIPVRTPLGQKIRRAFVAEEGWRLVALDYSQIELRVLAHLSGDENLIRVFQEGKDIHTQTASWMFGLSAEAIDPLMRRAAKTINFGVLYGMSAHRLSQELGIPYEEAAAFIQRYFQSYPKVKAWIEKTLEEGRTRGYVETLFGRRRYVPDLNARVKSVREAAERMAFNMPVQGTAADLMKLAMVRLFPQLREVGARMLLQVHDELLLEAPKERAEEVAALAKEVMEGVWPLAVPLEVEVGIGEDWLAAKG

SEQ ID NO: 1465 - DNA, 2529 bp, synthetic construct
  misc_feature 1..2529: note = Variant of DNA polymerase I from Thermus sp. strain 2.9
  source 1..2529: mol_type = other DNA
atgcaccatcatcatcatcatggcggtagcggcatgttaccgttgttcgaacctaaaggtcgcgtgcttctggttgatggccatcatctcgcgtatcgtaacttctttgccctgaaaggattaaccaccagccgtggcgagccggtacagggtgtctacggctttgcaaagtcgctcctgaaagctctgaaagaagacggtgatgtggtgattgttgtctttgatgcgaaagcgccaagttttcgccacgaagcgtacgaagcttacaaagccgggcgtgctccaacgccggaagactttcctcgccaattggcgcttatgaaggaattagtggatttgcttggcctcgaacgcttggaagttcccggtttcgaggcagacgacgtattagcgactctcgcaaagaaagccgaacgtgagggctatgaagtccagatcttgacagcagatcgcgatcttttccagcttttatctccgcgcatctcggtgttacacccggaagggcatcgtatcaccccggaatggctctgggagaaatatggtttgcgtcccgaacaatgggtggattttcgcgccttagcaggcgatccgagcgacaatattccgggagttaaaggtatcggcgagaagacggcgctcaagctccttaaagaatgggggtcgttggagaacttgcttaagaatttagatcaggtcaaaccagagtcagtgcgtgagaagattcttgcacacctcgaagacctcaaattaagccgcgaattgtcccgtgtacgcaccgatttgccgctcgaagttgatttccgtggtcgccgcgaacctgactgggagggtcttaaagcgtttttagagcgtcttgaatttggttcgctcttgcatgaattcggccttttagaaagcccgttaccagccgaagaagcaccttggccaccgcccgaaggcgcgtttttaggttaccgtttgagtcgcccggaaccgatgtgggccgaattattggctcttgcagcgtctgcccaggagcgtgtgtatcgcgcggaagaccctcatggtgcgctccgtggcctcaaagaagtccgtggactccttgccaaagacttagctgttgttgcattgcgcgaaggtcttgatttacctccgactgatgatccaatgcttcttgcgtacctcttggacccgtcaaacacgacgcccgaaggcgtagcccgtcgttacggcggcgagtggaccgaagatgcagctgagcgcgcgttattggccgaacgtttgcacgccaatttattaggacgtttgcaaggcgaggaacgtctcctctggctttacgaagaagtggagaaaccattgagtcgcgtgctcgcgcatatggaagctaccggtgtcaaattagacgtggcgtatttggagaacctcagccttgaagttgctgccgaaatgcgccgcttggaggaagaagtattccgtttagcaggccactcctttaaccttaattctcgcgatcagttagaacgtgtgttgttcgatgaacttggtctccctcctatcggcaagacagagaagaccggtaaacgtagcacttcagcggcggttttagaagctcttcgcgaagtccatcccattgtggacaagatcttgcagtaccgcgaactcgcgaaattgaaaggcacctatattgaccctcttccggcattagtccacccgaaaacgggacgcctccatacccgcttcaaccaaacagccacggcgaccggtcgtttgtcctcctctgatccaaaccttcagaatattccagtacgtaccccattgggccagaagatccgccgcgcgtttgtagctgaggagggttggcgtttagtggccctcgattatagccaaattgaattacgtgtccttgcccatctttctggcgatgagaacctcatccgcgtgtttcaggaaggcaaagacattcacactcaaacggcaagctggatgtttggattatcagctgaagcgatcgatcctttgatgcgtcgtgcagcgaagaccgttaatttcggtgttctctacggtatgagtgcccatcgtttgtcgcaggaattaggcattccctatgaagaagctgcggcgttcattcagcgctactttcaaagctatcccaaagttaaagcatggatcgagaagactctcgaagaaggccgcacacgtggttacgtagagaccttatttggacgtcgccgctatgttcccgatttaaacgctcgcgtgaaatctgtccgtgaagccgccgaacgcatggcgttcaacatgcctgtacagggcacggcagctgacctcatgaaacttgcaatggtgcgcctttttccacaattgcgtgaagttggtgcccgcatgctcttgcaggtccacgatgaactcttgttagaagcgccaaaagagcgtgcggaagaggtggcagccctcgcgaaagaggttatggaaggcgtgtggcccttagcggtgcctcttgaagtcgaagttggtattggcgaggattggttggctgccaaaggataatga

SEQ ID NO: 1466 - protein, 841 aa, synthetic construct
  REGION 1..841: note = Variant of DNA polymerase I from Thermus sp. strain 2.9
MHHHHHHGGSGMLPLFEPKGRVLLVDGHHLAYRNFFALKGLTTSRGEPVQGVYGFAKSLLKALKEDGDVVIVVFDAKAPSFRHEAYEAYKAGRAPTPEDFPRQLALMKELVDLLGLERLEVPGFEADDVLATLAKKAEREGYEVQILTADRDLFQLLSPRISVLHPEGHRITPEWLWEKYGLRPEQWVDFRALAGDPSDNIPGVKGIGEKTALKLLKEWGSLENLLKNLDQVKPESVREKILAHLEDLKLSRELSRVRTDLPLEVDFRGRREPDWEGLKAFLERLEFGSLLHEFGLLESPLPAEEAPWPPPEGAFLGYRLSRPEPMWAELLALAASAQERVYRAEDPHGALRGLKEVRGLLAKDLAVVALREGLDLPPTDDPMLLAYLLDPSNTTPEGVARRYGGEWTEDAAERALLAERLHANLLGRLQGEERLLWLYEEVEKPLSRVLAHMEATGVKLDVAYLENLSLEVAAEMRRLEEEVFRLAGHSFNLNSRDQLERVLFDELGLPPIGKTEKTGKRSTSAAVLEALREVHPIVDKILQYRELAKLKGTYIDPLPALVHPKTGRLHTRFNQTATATGRLSSSDPNLQNIPVRTPLGQKIRRAFVAEEGWRLVALDYSQIELRVLAHLSGDENLIRVFQEGKDIHTQTASWMFGLSAEAIDPLMRRAAKTVNFGVLYGMSAHRLSQELGIPYEEAAAFIQRYFQSYPKVKAWIEKTLEEGRTRGYVETLFGRRRYVPDLNARVKSVREAAERMAFNMPVQGTAADLMKLAMVRLFPQLREVGARMLLQVHDELLLEAPKERAEEVAALAKEVMEGVWPLAVPLEVEVGIGEDWLAAKG

SEQ ID NO: 1467 - DNA, 2529 bp, synthetic construct
  misc_feature 1..2529: note = Variant of DNA polymerase I from Thermus sp. strain 2.9
  source 1..2529: mol_type = other DNA
atgcaccatcatcatcatcatggcggtagcggcatgttaccgttgttcgaacctaaaggtcgcgtgcttctggttgatggccatcatctcgcgtatcgtaacttctttgccctgaaaggattaaccaccagccgtggcgagccggtacagggtgtctacggctttgcaaagtcgctcctgaaagctctgaaagaagacggtgatgtggtgattgttgtctttgatgcgaaagcgccaagttttcgccacgaagcgtacgaagcttacaaagccgggcgtgctccaacgccggaagactttcctcgccaattggcgcttatgaaggaattagtggatttgcttggcctcgaacgcttggaagttcccggtttcgaggcagacgacgtattagcgactctcgcaaagaaagccgaacgtgagggctatgaagtccagatcttgacagcagatcgcgatcttttccagcttttatctccgcgcatctcggtgttacacccggaagggcatcgtatcaccccggaatggctctgggagaaatatggtttgcgtcccgaacaatgggtggattttcgcgccttagcaggcgatccgagcgacaatattccgggagttaaaggtatcggcgagaagacggcgctcaagctccttaaagaatgggggtcgttggagaacttgcttaagaatttagatcaggtcaaaccagagtcagtgcgtgagaagattcttgcacacctcgaagacctcaaattaagccgcgaattgtcccgtgtacgcaccgatttgccgctcgaagttgatttccgtggccgccgcgaacctgactgggagggtcttaaagcgtttttagagcgtcttgaatttggttcgctcttgcatgaattcggccttttagaaagcccgttaccagccgaagaagcaccttggccaccgcccgaaggcgcgtttttaggttaccgtttgagtcgccttgaaccgatgtgggccgaattattggctcttgcagcgtctgcccagggacgtgtgtatcgcgcggaagaccctcatggtgcgctccgcggcctcaaagaagtccgtggactccttgccaaagacttagctgttgttgcattgcgcgaaggtcttgatttacctccgactgatgatccaatgcttcttgcgtacctcttggacccgtcaaacacgacgcccgaaggcgtagcccgtcgttacggcggcgagtggaccgaagatgcaggcgagcgcgcgttattggccgaacgtttgcacgccaatttattaggacgtttgcaaggcgaggaacgtctcctctggctttacgaagaagtggagaaaccattgagtcgcgtgctcgcgcatatggaagctaccggtgtcaaattagacgtggcgtatttggaggcactcagccttgaagttgctgccgaaatgcgccgcttggaggaagaagtattccgtttagcaggccactcctttaaccttaattctcgcgatcagttagaacgtgtgttgttcgatgaacttggtctccctcctatcggcaagacagagaagaccggtaaacgtagcacttcagcggcggttttagaagctcttcgcgaagtccatcccattgtggacaagatcttgcagtaccgcgaactcgcgaaattgaaaggcacctatattgaccctcttccggcattagtccacccgaaaacgggacgcctccatacccgcttcaaccaaacagccacggcgaccggtcgtttgtcctcctctgatccaaaccttcagaatattccagtacgtaccccattgggccagaagatccgccgcgcgtttgtagctgaggagggttggcgtttagtggccctcgattatagccaaattgaattacgtgtccttgcccatctttctggcgatgagaacctcatccgcgtgtttcaggaaggcaaagacattcacactcaaacggcaagctggatgtttggattatcagctgaagcgatcgatcctttgatgcgtcgtgcagcgaagaccatcaatttcggtgttctctacggtatgagtgcccatcgtttgtcgcaggaattaggcattccctatgaagaagctgcggcgttcattcagcgctactttcaaagctatcccaaagttaaagcatggatcgagaagactctcgaagaaggccgcacacgtggttacgtagagaccttatttggacgtcgccgctatgttcccgatttaaacgctcgcgtgaaatctgtccgtgaagccgccgaacgcatggcgttcaacatgcctgtacagggcacggcagctgacctcatgaaacttgcaatggtgcgcctttttccacaattgcgtgaagttggtgcccgcatgctcttgcaggtccacgatgaactcttgttagaagcgccaaaagagcgtgcggaagaggtggcagccctcgcgaaagaggttatggaaggcgtgtggcccttagcggtgcctcttgaagtcgaagttggtattggcgaggattggttggctgccaaaggataatga

SEQ ID NO: 1468 - protein, 841 aa, synthetic construct
  REGION 1..841: note = Variant of DNA polymerase I from Thermus sp. strain 2.9
MHHHHHHGGSGMLPLFEPKGRVLLVDGHHLAYRNFFALKGLTTSRGEPVQGVYGFAKSLLKALKEDGDVVIVVFDAKAPSFRHEAYEAYKAGRAPTPEDFPRQLALMKELVDLLGLERLEVPGFEADDVLATLAKKAEREGYEVQILTADRDLFQLLSPRISVLHPEGHRITPEWLWEKYGLRPEQWVDFRALAGDPSDNIPGVKGIGEKTALKLLKEWGSLENLLKNLDQVKPESVREKILAHLEDLKLSRELSRVRTDLPLEVDFRGRREPDWEGLKAFLERLEFGSLLHEFGLLESPLPAEEAPWPPPEGAFLGYRLSRLEPMWAELLALAASAQGRVYRAEDPHGALRGLKEVRGLLAKDLAVVALREGLDLPPTDDPMLLAYLLDPSNTTPEGVARRYGGEWTEDAGERALLAERLHANLLGRLQGEERLLWLYEEVEKPLSRVLAHMEATGVKLDVAYLEALSLEVAAEMRRLEEEVFRLAGHSFNLNSRDQLERVLFDELGLPPIGKTEKTGKRSTSAAVLEALREVHPIVDKILQYRELAKLKGTYIDPLPALVHPKTGRLHTRFNQTATATGRLSSSDPNLQNIPVRTPLGQKIRRAFVAEEGWRLVALDYSQIELRVLAHLSGDENLIRVFQEGKDIHTQTASWMFGLSAEAIDPLMRRAAKTINFGVLYGMSAHRLSQELGIPYEEAAAFIQRYFQSYPKVKAWIEKTLEEGRTRGYVETLFGRRRYVPDLNARVKSVREAAERMAFNMPVQGTAADLMKLAMVRLFPQLREVGARMLLQVHDELLLEAPKERAEEVAALAKEVMEGVWPLAVPLEVEVGIGEDWLAAKG

SEQ ID NO: 1469 - DNA, 2529 bp, synthetic construct
  misc_feature 1..2529: note = Variant of DNA polymerase I from Thermus sp. strain 2.9
  source 1..2529: mol_type = other DNA
atgcaccatcatcatcatcatggcggtagcggcatgttaccgttgttcgaacctaaaggtcgcgtgcttctggttgatggccatcatctcgcgtatcgtaacttctttgccctgaaaggattaaccaccagccgtggcgagccggtacagggtgtctacggctttgcaaagtcgctcctgaaagctctgaaagaagacggtgatgtggtgattgttgtctttgatgcgaaagcgccaagttttcgccacgaagcgtacgaagcttacaaagccgggcgtgctcggacgccggaagactttcctcgccaattggcgcttatgaaggaattagtggatttgcttggcctcgaacgcttggaagttcccggtttcgaggcagacgacgtattagcgactctcgcaaagaaagccgaacgtgagggctatgaagtccagatcttgacagcagatcgcgatcttttccagcttttatctccgcgcatctcggtgttacacccggaagggcatcgtatcaccccggaatggctctgggagaaatatggtttgcgtcccgaacaatgggtggattttcgcgccttagcaggcgatccgagcgacaatattccgggagttaaaggtatcggcgagaagacggcgctcaagctccttaaagaatgggggtcgttggagaacttgcttaagaatttagatcaggtcaaaccagagtcagtgcgtgagaagattcttgcacacctcgaagacctcaaattaagccgcgaattgtcccgtgtacgcaccgatttgccgctcgaagttgatttccgtggccgccgcgaacctgactgggagggtcttaaagcgtttttagagcgtcttgaatttggttcgctcttgcatgaattcggccttttagaaagcccgttaccagccgaagaagcaccttggccaccgcccgaaggcgcgtttttaggttaccgtttgagtcgcccggaaccgatgtgggccgaattattggctcttgcagcgtctgcccagggacgtgtgtatcgcgcggaagaccctcatggtgcgctccgcggcctcaaagaagtccgtggactccttgccaaagacttagctgttgttgcattgcgcgaaggtcttgatttacctccgactgatgatccaatgcttcttgcgtacctcttggacccgtcaaacacgacgcccgaaggcgtagcccgtcgttacggcggcgagtggaccgaagatgcaggcgagcgcgcgttattggccgaacgtttgcacgccaatttattaggacgtttgcaaggcgaggaacgtctcctctggctttacgaagaagtggagaaaccattgagtcgcgtgctcgcgcatatggaagctaccggtgtcaaattagacgtggcgtatttggaggcactcagccttgaagttgctgccgaaatgcgccgcttggaggaagaagtattccgtttagcaggccactcctttaaccttaattctcgcgatcagttagaacgtgtgttgttcgatgaacttggtctccctcctatcggcaagacagagaagaccggtaaacgtagcacttcagcggcggttttagaagctcttcgcgaagtccatcccattgtggacaagatcttgcagtaccgcgaactcgcgaaattgaaaggcacctatattgaccctcttccggcattagtccacccgaaaacgggacgcctccatacccgcttcaaccaaacagccacggcgaccggtcgtttgtcctcctctgatccaaaccttcagaatattccagtacgtaccccattgggccagaagatccgccgcgcgtttgtagctgaggagggttggcgtttagtggccctcgattatagccaaattgaattacgtgtccttgcccatctttctggcgatgagaacctcatccgcgtgtttcaggaaggcaaagacattcacactcaaacggcaagctggatgtttggattatcagctgaagcgatcgatcctttgatgcgtcgtgcagcgaagaccatcaatttcggtgttctctacggtatgagtgcccatcgtttgtcgcaggaattaggcattccctatgaagaagctgcggcgttcattcagcgctactttcaaagctatcccaaagttaaagcatggatcgagaagactctcgaagaaggccgcacacgtggttacgtagagaccttatttggacgtcgccgctatgttcccgatttaaacgctcgcgtgaaatctgtccgtgaagccgccgaacgcatggcgttcaacatgcctgtacagggcacggcagctgacctcatgaaacttgcaatggtgcgcctttttccacaattgcgtgaagttggtgcccgcatgctcttgcaggtccacgatgaactcttgttagaagcgccaaaagagcgtgcggaagaggtggcagccctcgcgaaagaggttatggaaggcgtgtggcccttagcggtgcctcttgaagtcgaagttggtattggcgaggattggttggctgccaaaggataatga

SEQ ID NO: 1470 - protein, 841 aa, synthetic construct
  REGION 1..841: note = Variant of DNA polymerase I from Thermus sp. strain 2.9
MHHHHHHGGSGMLPLFEPKGRVLLVDGHHLAYRNFFALKGLTTSRGEPVQGVYGFAKSLLKALKEDGDVVIVVFDAKAPSFRHEAYEAYKAGRARTPEDFPRQLALMKELVDLLGLERLEVPGFEADDVLATLAKKAEREGYEVQILTADRDLFQLLSPRISVLHPEGHRITPEWLWEKYGLRPEQWVDFRALAGDPSDNIPGVKGIGEKTALKLLKEWGSLENLLKNLDQVKPESVREKILAHLEDLKLSRELSRVRTDLPLEVDFRGRREPDWEGLKAFLERLEFGSLLHEFGLLESPLPAEEAPWPPPEGAFLGYRLSRPEPMWAELLALAASAQGRVYRAEDPHGALRGLKEVRGLLAKDLAVVALREGLDLPPTDDPMLLAYLLDPSNTTPEGVARRYGGEWTEDAGERALLAERLHANLLGRLQGEERLLWLYEEVEKPLSRVLAHMEATGVKLDVAYLEALSLEVAAEMRRLEEEVFRLAGHSFNLNSRDQLERVLFDELGLPPIGKTEKTGKRSTSAAVLEALREVHPIVDKILQYRELAKLKGTYIDPLPALVHPKTGRLHTRFNQTATATGRLSSSDPNLQNIPVRTPLGQKIRRAFVAEEGWRLVALDYSQIELRVLAHLSGDENLIRVFQEGKDIHTQTASWMFGLSAEAIDPLMRRAAKTINFGVLYGMSAHRLSQELGIPYEEAAAFIQRYFQSYPKVKAWIEKTLEEGRTRGYVETLFGRRRYVPDLNARVKSVREAAERMAFNMPVQGTAADLMKLAMVRLFPQLREVGARMLLQVHDELLLEAPKERAEEVAALAKEVMEGVWPLAVPLEVEVGIGEDWLAAKG

SEQ ID NO: 1471 - DNA, 2529 bp, synthetic construct
  misc_feature 1..2529: note = Variant of DNA polymerase I from Thermus sp. strain 2.9
  source 1..2529: mol_type = other DNA
atgcaccatcatcatcatcatggcggtagcggcatgttaccgttgttcgaacctaaaggtcgcgtgcttctggttgatggccatcatctcgcgtatcgtaacttctttgccctgaaaggattaaccaccagccgtggcgagccggtacagggtgtctacggctttgcaaagtcgctcctgaaagctctgaaagaagacggtgatgtggtgattgttgtctttgatgcgaaagcgccaagttttcgccacgaagcgtacgaagcttacaaagccgggcgtgctccaacgccggaagactttcctcgccaattggcgcttatgaaggaattagtggatttgcttggcctcgaacgcttggaagttcagggtttcgaggcagacgacgtattagcgactctcgcaaagaaagccgaacgtgagggctatgaagtccagatcttgacagcagatcgcgatcttttccagcttttatctccgcgcatctcggtgttacacccggaagggcatcgtatcaccccggaatggctctgggagaaatatggtttgcgtcccgaacaatgggtggattttcgcgccttagcaggcgatccgagcgacaatattccgggagttaaaggtatcggcgagaagacggcgctcaagctccttaaagaatgggggtcgttggagaacttgcttaagaatttagatcaggtcaaaccagagtcagtgcgtgagaagattcttgcacacctcgaagacctcaaattaagccgcgaattgtcccgtgtacgcaccgatttgccgctcgaagttgatttccgtggccgccgcgaacctgactgggagggtcttaaagcgtttttagagcgtcttgaatttggttcgctcttgcatgaattcggccttttagaaagcccgttaccagccgaagaagcaccttggccaccgcccgaaggcgcgtttttaggttaccgtttgagtcgcccggaaccgatgtgggccgaattattggctcttgcagcgtctgcccagggacgtgtgtatcgcgcggaagaccctcatggtgcgctccgcggcctcaaagaagtccgtggactccttgccaaagacttagctgttgttgcattgcgcgaaggtcttgatttacctccgactgatgatccaatgcttcttgcgtacctcttggacccgtcaaacacgacgcccgaaggcgtagcccgtcgttacggcggcgagtggaccgaagatgcaggcgagcgcgcgttattggccgaacgtttgcacgccaatttattaggacgtttgcaaggcgaggaacgtctcctctggctttacgaagaagtggagaaaccattgagtcgcgtgctcgcgcatatggaagctaccggtgtcaaattagacgtggcgtatttggaggcactcagccttgaagttgctgccgaaatgcgccgcttggaggaagaagtattccgtttagcaggccactcctttaaccttaattctcgcgatcagttagaacgtgtgttgttcgatgaacttggtctccctcctatcggcaagacagagaagaccggtaaacgtagcacttcagcggcggttttagaagctcttcgcgaagtccatcccattgtggacaagatcttgcagtaccgcgaactcgcgaaattgaaaggcacctatattgaccctcttccggcattagtccacccgaaaacgggacgcctccatacccgcttcaaccaaacagccacggcgaccggtcgtttgtcctcctctgatccaaaccttcagaatattccagtacgtaccccattgggccagaagatccgccgcgcgtttgtagctgaggagggttggcgtttagtggccctcgattatagccaaattgaattacgtgtccttgcccatctttctggcgatgagaacctcatccgcgtgtttcaggaaggcaaagacattcacactcaaacggcaagctggatgtttggattatcagctgaagcgatcgatcctttgatgcgtcgtgcagcgaagaccatcaatttcggtgttctctacggtatgagtgcccatcgtttgtcgcaggaattaggcattccctatgaagaagctgcggcgttcattcagcgctactttcaaagctatcccaaagttaaagcatggatcgagaagactctcgaagaaggccgcacacgtggttacgtagagaccttatttggacgtcgccgctatgttcccgatttaaacgctcgcgtgaaatctgtccgtgaagccgccgaacgcatggcgttcaacatgcctgtacagggcacggcagctgacctcatgaaacttgcaatggtgcgcctttttccacaattgcgtgaagttggtgcccgcatgctcttgcaggtccacgatgaactcttgttagaagcgccaaaagagcgtgcggaagaggtggcagccctcgcgaaagaggttatggaaggcgtgtggcccttagcggtgcctcttgaagtcgaagttggtattggcgaggattggttggctgccaaaggataatga

SEQ ID NO: 1472 - protein, 841 aa, synthetic construct
  REGION 1..841: note = Variant of DNA polymerase I from Thermus sp. strain 2.9
MHHHHHHGGSGMLPLFEPKGRVLLVDGHHLAYRNFFALKGLTTSRGEPVQGVYGFAKSLLKALKEDGDVVIVVFDAKAPSFRHEAYEAYKAGRAPTPEDFPRQLALMKELVDLLGLERLEVQGFEADDVLATLAKKAEREGYEVQILTADRDLFQLLSPRISVLHPEGHRITPEWLWEKYGLRPEQWVDFRALAGDPSDNIPGVKGIGEKTALKLLKEWGSLENLLKNLDQVKPESVREKILAHLEDLKLSRELSRVRTDLPLEVDFRGRREPDWEGLKAFLERLEFGSLLHEFGLLESPLPAEEAPWPPPEGAFLGYRLSRPEPMWAELLALAASAQGRVYRAEDPHGALRGLKEVRGLLAKDLAVVALREGLDLPPTDDPMLLAYLLDPSNTTPEGVARRYGGEWTEDAGERALLAERLHANLLGRLQGEERLLWLYEEVEKPLSRVLAHMEATGVKLDVAYLEALSLEVAAEMRRLEEEVFRLAGHSFNLNSRDQLERVLFDELGLPPIGKTEKTGKRSTSAAVLEALREVHPIVDKILQYRELAKLKGTYIDPLPALVHPKTGRLHTRFNQTATATGRLSSSDPNLQNIPVRTPLGQKIRRAFVAEEGWRLVALDYSQIELRVLAHLSGDENLIRVFQEGKDIHTQTASWMFGLSAEAIDPLMRRAAKTINFGVLYGMSAHRLSQELGIPYEEAAAFIQRYFQSYPKVKAWIEKTLEEGRTRGYVETLFGRRRYVPDLNARVKSVREAAERMAFNMPVQGTAADLMKLAMVRLFPQLREVGARMLLQVHDELLLEAPKERAEEVAALAKEVMEGVWPLAVPLEVEVGIGEDWLAAKG

SEQ ID NO: 1473 - DNA, 2529 bp, synthetic construct
  misc_feature 1..2529: note = Variant of DNA polymerase I from Thermus sp. strain 2.9
  source 1..2529: mol_type = other DNA
atgcaccatcatcatcatcatggcggtagcggcatgttaccgttgttcgaacctaaaggtcgcgtgcttctggttgatggccatcatctcgcgtatcgtaacttctttgccctgaaaggattaaccaccagccgtggcgagccggtacagggtgtctacggctttgcaaagtcgctcctgaaagctctgaaagaagacggtgatgtggtgattgttgtctttgatgcgaaagcgccaagttttcgccacgaagcgtacgaagcttacaaagccgggcgtgctccaacgccggaagactttcctcgccaattggcgcttatgaaggaattagtggatttgcttggcctcgaacgcttggaagttcccggtttcgaggcagacgacgtattagcgactctcgcaaagaaagccgaacgtgagggctatgaagtccagatcttgacagcagatcgcgatcttttccagcttttatctccgcgcatctcggtgttacacccggaagggcatcgtatcaccccggaatggctctgggagaaatatggtttgcgtcccgaacaatgggtggattttcgcgccttagcaggcgatccgagcgacaatattccgggagttaaaggtatcggcgagaagacggcgctcaagctccttaaagaatgggggtcgttggagaacttgcttaagaatttagatcaggtcaaaccagagtcagtgcgtgagaagattcttgcacacctcgaagacctcaaattaagccgcgaattgtcccgtgtacgcaccgatttgccgctcgaagttgatttccgtggtcgccgcgaacctgactgggagggtcttaaagcgtttttagagcgtcttgaatttggttcgctcttgcatgaattcggccttttagaaagcccgttaccagccgaagaagcaccttggccaccgcccgaaggcgcgtttttaggttaccgtttgagtcgcccggaaccgatgtgggccgaattattggctcttgcagcgtctgcccaggagcgtgtgtatcgcgcggaagaccctcatggtgcgctccgtggcctcaaagaagtccgtggactccttgccaaagacttagctgttgttgcattgcgcgaaggtcttgatttacctccgactgatgatccaatgcttcttgcgtacctcttggacccgtcaaacacgacgcccgaaggcgtagcccgtcgttacggcggcgagtggaccgaagatgcaggcgagcgcgcgttattggccgaacgtttgcacgccaatttattaggacgtttgcaaggcgaggaacgtctcctctggctttacgaagaagtggagaaaccattgagtcgcgtgctcgcgcatatggaagctaccggtgtcaaattagacgtggcgtatttggaggcactcagccttgaagttgctgccgaaatgcgccgcttggaggaagaagtattccgtttagcaggccactcctttaaccttaattctcgcgatcagttagaacgtgtgttgttcgatgaacttggtctccctcctatcggcaagacagagaagaccggtaaacgtagcacttcagcggcggttttagaagctcttcgcgaagtccatcccattgtggacaagatcttgcagtaccgcgaactcgcgaaattgaaaggcacctatattgaccctcttccggcattagtccacccgaaaacgggacgcctccatacccgcttcaaccaaacagccacggcgaccggtcgtttgtcctcctctgatccaaaccttcagaatattccagtacgtaccccattgggccagaagatccgccgcgcgtttgtagctgaggagggttggcgtttagtggccctcgattatagccaaattgaattacgtgtccttgcccatctttctggcgatgagaacctcatccgcgtgtttcaggaaggcaaagacattcacactcaaacggcaagctggatgtttggattatcaccagaagcgatcgatcctttgatgcgtcgtgcagcgaagaccgttaatttcggtgttctctacggtatgagtgcccatcgtttgtcgcaggaattaggcattccctatgaagaagctgcggcgttcattcagcgctactttcaaagctatcccaaagttaaagcatggatcgagaagactctcgaagaaggccgcacacgtggttacgtagagaccttatttggacgtcgccgctatgttcccgatttaaacgctcgcgtgaaatctgtccgtgaagccgccgaacgcatggcgttcaacatgcctgtacagggcacggcagctgacctcatgaaacttgcaatggtgcgcctttttccacaattgcgtgaagttggtgcccgcatgctcttgcaggtccacgatgaactcttgttagaagcgccaaaagagcgtgcggaagaggtggcagccctcgcgaaagaggttatggaaggcgtgtggcccttagcggtgcctcttgaagtcgaagttggtattggcgaggattggttggctgccaaaggataatga

SEQ ID NO: 1474 - protein, 841 aa, synthetic construct
  REGION 1..841: note = Variant of DNA polymerase I from Thermus sp. strain 2.9
MHHHHHHGGSGMLPLFEPKGRVLLVDGHHLAYRNFFALKGLTTSRGEPVQGVYGFAKSLLKALKEDGDVVIVVFDAKAPSFRHEAYEAYKAGRAPTPEDFPRQLALMKELVDLLGLERLEVPGFEADDVLATLAKKAEREGYEVQILTADRDLFQLLSPRISVLHPEGHRITPEWLWEKYGLRPEQWVDFRALAGDPSDNIPGVKGIGEKTALKLLKEWGSLENLLKNLDQVKPESVREKILAHLEDLKLSRELSRVRTDLPLEVDFRGRREPDWEGLKAFLERLEFGSLLHEFGLLESPLPAEEAPWPPPEGAFLGYRLSRPEPMWAELLALAASAQERVYRAEDPHGALRGLKEVRGLLAKDLAVVALREGLDLPPTDDPMLLAYLLDPSNTTPEGVARRYGGEWTEDAGERALLAERLHANLLGRLQGEERLLWLYEEVEKPLSRVLAHMEATGVKLDVAYLEALSLEVAAEMRRLEEEVFRLAGHSFNLNSRDQLERVLFDELGLPPIGKTEKTGKRSTSAAVLEALREVHPIVDKILQYRELAKLKGTYIDPLPALVHPKTGRLHTRFNQTATATGRLSSSDPNLQNIPVRTPLGQKIRRAFVAEEGWRLVALDYSQIELRVLAHLSGDENLIRVFQEGKDIHTQTASWMFGLSPEAIDPLMRRAAKTVNFGVLYGMSAHRLSQELGIPYEEAAAFIQRYFQSYPKVKAWIEKTLEEGRTRGYVETLFGRRRYVPDLNARVKSVREAAERMAFNMPVQGTAADLMKLAMVRLFPQLREVGARMLLQVHDELLLEAPKERAEEVAALAKEVMEGVWPLAVPLEVEVGIGEDWLAAKG

SEQ ID NO: 1475 - DNA, 2529 bp, synthetic construct
  misc_feature 1..2529: note = Variant of DNA polymerase I from Thermus sp. strain 2.9
  source 1..2529: mol_type = other DNA
atgcaccatcatcatcatcatggcggtagcggcatgttaccgttgttcgaacctaaaggtcgcgtgcttctggttgatggccatcatctcgcgtatcgtaacttctttgccctgaaaggattaaccaccagccgtggcgagccggtacagggtgtctacggctttgcaaagtcgctcctgaaagctctgaaagaagacggtgatgtggtgattgttgtctttgatgcgaaagcgccaagttttcgccacgaagcgtacgaagcttacaaagccgggcgtgctccaacgccggaagactttcctcgccaattggcgcttatgaaggaattagtggatttgcttggcctcgaacgcttggaagttcccggtttcgaggcagacgacgtattagcgactctcgcaaagaaagccgaacgtgagggctatgaagtccagatcttgacagcagatcgcgatcttttccagcttttatctccgcgcatctcggtgttacacccggaagggcatcgtatcaccccggaatggctctgggagaaatatggtttgcgtcccgaacaatgggtggattttcgcgccttagcaggcgatccgcatgacaatattccgggagttaaaggtatcggcgagaagacggcgctcaagctccttaaagaatgggggtcgttggagaacttgcttaagaatttagatcaggtcaaaccagagtcagtgcgtgagaagattcttgcacacctcgaagacctcaaattaagccgcgaattgtcccgtgtacgcaccgatttgccgctcgaagttgatttccgtggccgccgcgaacctgactgggagggtcttaaagcgtttttagagcgtcttgaatttggttcgctcttgcatgaattcggccttttagaaagcccgttaccagccgaagaagcaccttggccaccgcccgaaggcgcgtttttaggttaccgtttgagtcgcccggaaccgatgtgggccgaattattggctcttgcagcgtctgcccagggacgtgtgtatcgcgcggaagaccctcatggtgcgctccgcggcctcaaagaagtccgtggactccttgccaaagacttagctgttgttgcattgcgcgaaggtcttgatttacctccgactgatgatccaatgcttcttgcgtacctcttggacccgtcaaacacgacgcccgaaggcgtagcccgtcgttacggcggcgagtggaccgaagatgcaggcgagcgcgcgttattggccgaacgtttgcacgccaatttattaggacgtttgcaaggcgaggaacgtctcctctggctttacgaagaagtggagaaaccattgagtcgcgtgctcgcgcatatggaagctaccggtgtcaaattagacgtggcgtatttggaggcactcagccttgaagttgctgccgaaatgcgccgcttggaggaagaagtattccgtttagcaggccactcctttaaccttaattctcgcgatcagttagaacgtgtgttgttcgatgaacttggtctccctcctatcggcaagacagagaagaccggtaaacgtagcacttcagcggcggttttagaagctcttcgcgaagtccatcccattgtggacaagatcttgcagtaccgcgaactcgcgaaattgaaaggcacctatattgaccctcttccggcattagtccacccgaaaacgggacgcctccatacccgcttcaaccaaacagccacggcgaccggtcgtttgtcctcctctgatccaaaccttcagaatattccagtacgtaccccattgggccagaagatccgccgcgcgtttgtagctgaggagggttggcgtttagtggccctcgattatagccaaattgaattacgtgtccttgcccatctttctggcgatgagaacctcatccgcgtgtttcaggaaggcaaagacattcacactcaaacggcaagctggatgtttggattatcagctgaagcgatcgatcctttgatgcgtcgtgcagcgaagaccatcaatttcggtgttctctacggtatgagtgcccatcgtttgtcgcaggaattaggcattccctatgaagaagctgcggcgttcattcagcgctactttcaaagctatcccaaagttaaagcatggatcgagaagactctcgaagaaggccgcacacgtggttacgtagagaccttatttggacgtcgccgctatgttcccgatttaaacgctcgcgtgaaatctgtccgtgaagccgccgaacgcatggcgttcaacatgcctgtacagggcacggcagctgacctcatgaaacttgcaatggtgcgcctttttccacaattgcgtgaagttggtgcccgcatgctcttgcaggtccacgatgaactcttgttagaagcgccaaaagagcgtgcggaagaggtggcagccctcgcgaaagaggttatggaaggcgtgtggcccttagcggtgcctcttgaagtcgaagttggtattggcgaggattggttggctgccaaaggataatga

SEQ ID NO: 1476 - protein, 841 aa, synthetic construct
  REGION 1..841: note = Variant of DNA polymerase I from Thermus sp. strain 2.9
MHHHHHHGGSGMLPLFEPKGRVLLVDGHHLAYRNFFALKGLTTSRGEPVQGVYGFAKSLLKALKEDGDVVIVVFDAKAPSFRHEAYEAYKAGRAPTPEDFPRQLALMKELVDLLGLERLEVPGFEADDVLATLAKKAEREGYEVQILTADRDLFQLLSPRISVLHPEGHRITPEWLWEKYGLRPEQWVDFRALAGDPHDNIPGVKGIGEKTALKLLKEWGSLENLLKNLDQVKPESVREKILAHLEDLKLSRELSRVRTDLPLEVDFRGRREPDWEGLKAFLERLEFGSLLHEFGLLESPLPAEEAPWPPPEGAFLGYRLSRPEPMWAELLALAASAQGRVYRAEDPHGALRGLKEVRGLLAKDLAVVALREGLDLPPTDDPMLLAYLLDPSNTTPEGVARRYGGEWTEDAGERALLAERLHANLLGRLQGEERLLWLYEEVEKPLSRVLAHMEATGVKLDVAYLEALSLEVAAEMRRLEEEVFRLAGHSFNLNSRDQLERVLFDELGLPPIGKTEKTGKRSTSAAVLEALREVHPIVDKILQYRELAKLKGTYIDPLPALVHPKTGRLHTRFNQTATATGRLSSSDPNLQNIPVRTPLGQKIRRAFVAEEGWRLVALDYSQIELRVLAHLSGDENLIRVFQEGKDIHTQTASWMFGLSAEAIDPLMRRAAKTINFGVLYGMSAHRLSQELGIPYEEAAAFIQRYFQSYPKVKAWIEKTLEEGRTRGYVETLFGRRRYVPDLNARVKSVREAAERMAFNMPVQGTAADLMKLAMVRLFPQLREVGARMLLQVHDELLLEAPKERAEEVAALAKEVMEGVWPLAVPLEVEVGIGEDWLAAKG

SEQ ID NO: 1477 - DNA, 2529 bp, synthetic construct
  misc_feature 1..2529: note = Variant of DNA polymerase I from Thermus sp. strain 2.9
  source 1..2529: mol_type = other DNA
atgcaccatcatcatcatcatggcggtagcggcatgttaccgttgttcgaacctaaaggtcgcgtgcttctggttgatggccatcatctcgcgtatcgtaacttctttgccctgaaaggattaaccaccagccgtggcgagccggtacagggtgtctacggctttgcaaagtcgctcctgaaagctctgaaagaagacggtgatgtggtgattgttgtctttgatgcgaaagcgccaagttttcgccacgaagcgtacgaagcttacaaagccgggcgtgctccaacgccggaagactttcctcgccaattggcgcttatgaaggaattagtggatttgcttggcctcgaacgcttggaagttcccggtttcgaggcagacgacgtattagcgactctcgcaaagaaagccgaacgtgagggctatgaagtccagatcttgacagcagatcgcgatcttttccagcttttatctccgcgcatctcggtgttacacccggaagggcatcgtatcaccccggaatggctctgggagaaatatggtttgcgtcccgaacaatgggtggattttcgcgccttagcaggcgatccgagcgacaatattccgggagttaaaggtatcggcgagaagacggcgctcaagctccttaaagaatgggggtcgttggagaacttgcttaagaatttagatcaggtcaaaccagagtcagtgcgtgagaagattcttgcacacctcgaagacctcaaattaagccgcgaattgtcccgtgtacgcaccgatttgccgctcgaagttgatttccgtggtcgccgcgaacctgactgggagggtcttaaagcgtttttagagcgtcttgaatttggttcgctcttgcatgaattcggccttttagaaagcccgttaccagccgaagaagcaccttggccaccgcccgaaggcgcgtttttaggttaccgtttgagtcgcccggaaccgatgtgggccgaattattggctcttgcagcgtctgcccagggacgtgtgtatcgcgcggaagaccctcatggtgcgctccgtggcctcaaagaagtccgtggactccttgccaaagacttagctgttgttgcattgcgcgaaggtcttgatttacctccgactgatgatccaatgcttcttgcgtacctcttggacccgtcaaacacgacgcccgaaggcgtagcccgtcgttacggcggcgagtggaccgaagatgcaggcgagcgcgcgttattggccgaacgtttgcacgccaatttattaggacgtttgcaaggcgaggaacgtctcctctggctttacgaagaagtggagaaaccattgagtcgcgtgctcgcgcatatggaagctaccggtgtcaaattagacgtggcgtatttggagaacctcagccttgaagttgctgccgaaatgcgccgcttggaggaagaagtattccgtttagcaggccactcctttaaccttaattctcgcgatcagttagaacgtgtgttgttcgatgagcttggtctccctcctatcggcaagacagagaagaccggtaaacgtagcacttcagcggcggttttagaagctcttcgcgaagtccatcccattgtggacaagatcttgcagtaccgcgaactcgcgaaattgaaaggcacctatattgaccctcttccggcattagtccacccgaaaacgggacgcctccatacccgcttcaaccaaacagccacggcgaccggtcgtttgtcctcctctgatccaaaccttcagaatattccagtacgtaccccattgggccagaagatccgccgcgcgtttgtagctgaggagggttggcgtttagtggccctcgattatagccaaattgaattacgtgtccttgcccatctttctggcgatgagaacctcatccgcgtgtttcaggaaggcaaagacattcacactcaaacggcaagctggatgtttggattatcagctgaagcgatcgatcctttgatgcgtcgtgcagcgaagaccattaatttcggtgttctctacggtatgagtgcccatcgtttgtcgcaggaattaggcattccctatgaagaagctgcggcgttcattcagcgctactttcaaagctatcccaaagttaaagcatggatcgagaagactctcgaagaaggccgcacacgtggttacgtagagaccttatttggacgtcgccgctatgttcccgatttaaacgctcgcgtgaaatctgtccgtgaagccgccgaacgcatggcgttcaacatgcctgtacagggcacggcagctgacctcatgaaacttgcaatggtgcgcctttttccacaattgcgtgaagttggtgcccgcatgctcttgcaggtccacgatgaactcttgttagaagcgccaaaagagcgtgcggaagaggtggcagccctcgcgaaagaggttatggaaggcgtgtggcccttagcggtgcctcttgaagtcgaagttggtattggcgaggattggttggctgccaaaggataatga

SEQ ID NO: 1478 - protein, 841 aa, synthetic construct
  REGION 1..841: note = Variant of DNA polymerase I from Thermus sp. strain 2.9
MHHHHHHGGSGMLPLFEPKGRVLLVDGHHLAYRNFFALKGLTTSRGEPVQGVYGFAKSLLKALKEDGDVVIVVFDAKAPSFRHEAYEAYKAGRAPTPEDFPRQLALMKELVDLLGLERLEVPGFEADDVLATLAKKAEREGYEVQILTADRDLFQLLSPRISVLHPEGHRITPEWLWEKYGLRPEQWVDFRALAGDPSDNIPGVKGIGEKTALKLLKEWGSLENLLKNLDQVKPESVREKILAHLEDLKLSRELSRVRTDLPLEVDFRGRREPDWEGLKAFLERLEFGSLLHEFGLLESPLPAEEAPWPPPEGAFLGYRLSRPEPMWAELLALAASAQGRVYRAEDPHGALRGLKEVRGLLAKDLAVVALREGLDLPPTDDPMLLAYLLDPSNTTPEGVARRYGGEWTEDAGERALLAERLHANLLGRLQGEERLLWLYEEVEKPLSRVLAHMEATGVKLDVAYLENLSLEVAAEMRRLEEEVFRLAGHSFNLNSRDQLERVLFDELGLPPIGKTEKTGKRSTSAAVLEALREVHPIVDKILQYRELAKLKGTYIDPLPALVHPKTGRLHTRFNQTATATGRLSSSDPNLQNIPVRTPLGQKIRRAFVAEEGWRLVALDYSQIELRVLAHLSGDENLIRVFQEGKDIHTQTASWMFGLSAEAIDPLMRRAAKTINFGVLYGMSAHRLSQELGIPYEEAAAFIQRYFQSYPKVKAWIEKTLEEGRTRGYVETLFGRRRYVPDLNARVKSVREAAERMAFNMPVQGTAADLMKLAMVRLFPQLREVGARMLLQVHDELLLEAPKERAEEVAALAKEVMEGVWPLAVPLEVEVGIGEDWLAAKG

(The sequence listing continues in the following parts.)